United States Patent Application Publication US 2026/0092266 A1 - sequence listing, part 6

SEQ ID NO: 995 - DNA, 23198 bp, synthetic construct
  variation 14510..14580: note = n is a, c, g, or t
  source 1..23198: mol_type = other DNA
  misc_feature 1..23198: note = Synthetic
tccacttcgtcaacgatggcgaagttaaacggacgctgcaccatttcatcaatggaatacttcatgttgtcgcgcaggtagtcaaagccgaattcgttgttcgtgccgtaagtgatgtcgcaagcgtaagccgcgcggcgttcctcgtccgtcaagccgtggacgattgccccgacgctcaaccccaaaaagcggtaaatctgccccatccagtcagagtcgcgttttgccagatagtcgttgacggtaacgacgtgaacgcctttgcccgtcagcgcgttcagatacaccgccaaagtcgcaaccagcgttttgccttcgcccgttcgcatttccgcgatttgtccgcggtgcaaaacgatgccgccgataagctgaacgtcgaaatgccgctgtcctatggtgcgtttggcggcttcgcggattgtggcgaacgcgtcgggcaggatgtcgtccagcgtttcaccgtccgccaagcgttttttcagcatcagcgtgcgggctttcaattcttcgtccgaaaggggagcgatttcgggttccagcgcgttgattttcgcgacggtttttcttaatcccttgacatagcgttcgttcgcgctgccaaagactttacgcatcaaagagccaatcatttcaatccccttaatatataatagagtaagaatcatcctacttaaccccattgggcgcgggctgtcaatcatcttattttattgctttaccaaaaagctaaaggcggctatgatattgaaaagtttttttattggaaaggtggaacatgaataaaacccttaaattgacagcattgcttttaatgctgtccgcgaacgcaaacgccgccgacaaaaaggcggacgccgactttgtcgttgcgacggtcaacggaacgaaaatcatgctgtccgaagtgcgggatgtcaaagaaaactcgaacccgcagctggcggctttgccgatgaacgccgtgtacgatcctttgttggaaaatctggttgacatgaccattatttcggatgcggccaaggctgataaagtgcagaattccgccgaattcaaaaaaatgatgaaaagcgtcgaaaaacagctgctggcgcgcctgtatttggaacagcaggccaaaaaaatgcagaccaaagccaagctgatggaaatgtatgaacagtacaagcgcaacaatcccccgcaagaggaaatgtccgccgcgcacatcttgctgaaaacggaaaaagaagccaaagacgtcatcaaacagctggaaaaaggcgccgatttcgccgaattggccaacaaggtatccgaaaacaaagggcttgaaggcggagatttgggatatttcacccgcgaactgatggtgcccgagttttccgaagccgctttccgcatgaaagaaggcgagatttccaaaatacccgtcaaaacgcagtttggctggcacgttatcaaagcgggcccccgccgtttgacggaagttccgagctttgacgaaatggaaaaggaactgacgcagactcaagcctctcaagcggtggaagaaatcgtttccggcttgcgcaaaaaagcgaaaatcgaacgcgttcccgtttcatttgacgccaaaggcaatgtcgtcgcaaaataaaacttgtcaaaccgaaaaaatcccgccgttaaatgccggcgggatttttgtatgctttggaaaaggcaaaaaaagtgccgccgcacttaggggaaaaggcggcggctttcagattcctttaaggggttggaggacgcaattagggggttgcgtcaaaggaatactgaacttgcaaacccaacacgtgggctgttgtttgatacttggcgtcaattcgctgcaaagaaccgataggcgtttgagccggattgttgctcatgttgtgacggtcgttgtgaaccgaataatgcggcaggtacaggaacatgtatcccatatcgaacgtccaagcgcttttcttgtaactggcaccgacggcgaattcccaacggtcgttgtcggcaatcgcggtcgtgcgttcgcgcgaattgggaacagggctttcgtcgaaaccgatgcccgtgcggaacgtccagttttcggaatgataataatccatgccgaggctgatgtcccaagtgtttttccaacgctgggcgacttcgacgggcgaacggaggtttttaatccgcaacgcgtcaaaccgcgtccaacgcgtccatttcgcgcccgcgctcaaaccgattttatcattcaatttgtggaacgcggacagggaaaccagttcgggggcgtccatcggcagtttcgcgtcgtaagttcctgccagcatggggaaatctttggcaaagtcaaagtcgcctttgatttgatgttgggaacgcgaacggtatgcaatgcccgcgcgggtgtttttggtgaattcgtacattgcgccgacgttcaaaccccatccccagtcttccaagtcgaactcgttgtaaaaacgcgctttcggattggtcggggaaacgggggcggttgacgtcaaatcgacatttgcattgcgggcgaagacgccgaaacccaaagacagcttatcggtcgctttgacggcaacggcggttgaatagtcgataacggacaattcggaatcaacgccgtgatccgtaccgacccagctcatcggatattcaatcgccagaccgaacgggacgtaaacgccgaaaccgacggcgacgcggtcgttgaccttgtattgcgcaaaaaagttcggaacggcggtcgtaacgtcaacgttcgtcgaatcggcaacaccgcgataaacaccgttgacatccgaatgtaaattgatgacggaaatgcccgcctgcacgccggatccgcccaaagtcatccccgcagggttgtacgccaaagcggaataatcgtcgccgacaacgccgccgcccgcatatgctctgcccaaaccggcaacactgaaatcgtttaactgccagcccgaagcgttggcggatgtggatgcgcaaacgcccgtcagagccagcgcaaaaatttttgatgtgtttttagccatcggttttatccttggtttcatttctgtaaagggcgataatcgaacgtgtttgtttaatcatcaaagaaatcagtttgtcgatttccttttccccgtaatcggtccaatgaacatgtttcaaaacggtttgtttgcggactttgaacgaaaacagcgatgcgaacagcggaaatgtgtagagggtgatttcctcaatcgtcgctttgtccgacgcggcggtcgctttgataatcaaatccgcgaaaattttatgaatcgggaaaatcaaaccttcgtacagggtcgaaaacgcttcgccggggttggcgtattcgtgcagaaacacggtaaccgcttcgtcgggcagctgtgtcgaatacagcagtttccccaacgatttcaagatgccgcacaaagccgtttccgcctgttcgggcgttgaatttttgtcgcttaataccgcaacggccgattcaatcgtttcatcaaccaccgcccgaacaccgtgaacgatgttttccaaaacggcgcggtacagcccttgtttgccgccgaaataataggcgattgcggaaatattcacgtcggcggcgcgggcgatttcacgggtcgatgtttccgtgtaccccttgtcggcgaaaacggcggtcgccttttccaacaaacgttcttttgaatccgtgggcatcgaaagagctgtccttttgtttaacgaaacatcgccactttatcataaaaaaatcaaaagtcaatcaatcgtttgaatttttttttgtaaagggagctaaccgttcaaacggcgttgttcttcaacgggttgaacggttatcgccttgacgggacaggcggttttgcatgcgccgcagccgatgcacaggtcggaatcgaagcggggaaagtcctcgaaccgttcctttttaaccgcgtgtttcggacatttcatcacgcacagtccgcatttgacgcatttcgattcgtcgacgcttgccaatccgatttgggtgcgctgtttgtcggacaggctcaagcggcgaattgcgcccgacgggcagacgtcgccgcatttatggcagtcgaacgcacaaaagctttctgcaaaatcgatatgcacggcgggataatccgaatcggcttttttcaaaattttcatcgggcagttttgaacacacagattgcagttcaaacagcggtttgcgaaccgttgcgcgtcgcgcgcgcccgcgggaacgatgacgtttttgactttggcggcgattttttggctcacaaccgcgccgcttttgaacgccagaacggcgaaagccgccaatcccgccccgcccagcagcattttgcggcggctttcgttcatcgccagcggataggcgggaatcctgccgaaccgaattccgccgcggcggcacgcccccatgcagtcaaagcatttgatgcaggtttcattgtcaacttttttgtttttaaaatcgatgcttcccgtcggacactttgcggcgcacagtccgcaggaaacgcatttgcggttgtcgatgccgacttggaaaaccgaatgtttggcaatcactcccagcaccgccccgacggggcagatgtggacgcagaaaaaacgtttgccgaacgcgacgaacaacgccagaacaaccgctgccccgatgcccagatatgcgccgcttgccgccgaaccgaacagggtgtagggatcgatatagcgcgcggccgccgccgatccgccgattaaaacgccgaacaccaaagcggcaaggacgtatttgaacggattgcttttgcgcacgggaattttgcggcggaacagcatgccgaacagttcttgcgccaatccgaggggacacagcgtcgaacagtagattctgccgaacaacagcgtcaaaacgacgatgcccgcgaacaggcaggcggcaaataccgtgccgtccaaaaccgccctttgcaaagcggcggtgaattgaacgtcaagtattctgacggggtagtccttgcccgaaaacagcagaacaacagcgctcaagacaaccaacgcaacaacaaaacgcaggtatttcaaagctttcatgacagccgctcctttttacaaaccgcagataatcgcgacgccgcacgccataatcgtgccgcccgcgatttcatgggcgtaagcttccaatcgtttgaagcgcaaagcgttaatgcccagaacgcccaaggttaccgccagcatcatggtcgcaatcgttgcgattgaaaagattaaagtgcaggatacgaccgccgacatccccaaaacactggacgccgtcaaaatcggcagcaacgcttcgcagggacccaaaacgaaaatgatgaacagcacccaaacggaaatgcctttggcatcggcggcgggaaagtgtgaatgttccgcgccgtgcttgtgctgccagcggtggcgcaaagcccacagcaggtacgccccgcccaagccgataagcgcgtatgccgcgacgtcgccgcggttgtcctctatccattggaagttttccgcgctcagccatttggaaaaatacaaaaacgccatggcaatcagcagagcgctcaaaatatgcccgacgccgcatgcgaatgtcagcgccagcgtttttttcaggctgtagccgcggattttgccgattgcgacaaacggcaaatagtggtcgggtcccataatcgtatgaatgaccgccgtcagcagcgccgtaattcccaaagccgataaagtcgtcgtcatgcgtttatcctttcaatccgatgtcgaaactgcccgaacggaagccctccaaatcaagcgtgacataatcaaatccgatgtttttcaaagtgtttgcgattttcccagctttttcaaccgcggcggggaaagcggcttgcggcacttcaagccgcgccaaatcgccgtgaacgcgcaggcggatgtttccaacgtcggggaacattgctttcaatgccgcttcgccctgcgccgcgcgggcgattttttcgtccgtcagttccgtattgtacggaaatcgcgtcgccaagcacggggcggcgggctttgatgccgtggacaaccccaactgcgccgacaacgcgcggatttctgctttggaaaattcggacaagggcgacagaacgcccatttctttcagcgctttgcgtccggggcggtaaacgtgcgaatcgtcgccgttcgtaccgtcgatgatatggaccaagccgttcgccgccgcataatcggcaaactgcgaaaaaaccgcttttttgcaatgataacagcggtcggtgcggttgaatcggacggcttcgaccgcaaacgggttgaacgtgaaaagatgatgctccaccccgaatttttgggcgaacgccgccgcctgttcggcttccgcgggggattgaagcgccgtttgcatggtcaaagcggcgaatttgaacggtttttcctttgccatatccgccaacaccgccagcaaaagcgagctgtcggccccgcccgaaaacgccagcgcgattccgccgtccgtcaaaggggcaagccgtcgtttcaaacggtcaagcattgtcccgttcctctgccgttttgcgcgcttcgtcgtaaagcttgcgaaacggggtgcccgtttgttcgcttaacgctttgacgctttcgtattcgggattgtagcgcacgatgtcgcccgtccagcactttttgaccagcaccgttcccgccgaaatcgcgacagggcggatgtcgcgctccatacagcggcgttcgaccgcgtatttgcgcagtccgatggtcgtcgtgttggcgaaaatgatgttttccgccgtggtgaggagcttttcggggacaatcgcccgcagcatgtacgcgggacggtttttcttcataaagcacggctcgaagtgaacgtcgaacgcgcccgcttgaaacagtttttccatggtcatgcccaattcttcggcggtggaatcgtcaatgttcgtttcgatgacgtaaagcttgccgtccgtgtcggcgtcctcgataatcattgcgcgcaaaaagttcgcgtgtccgaaatcgcgcttgcccaaaccgatgcccgttttcaacactttgtacgaagcgggcagagtgtcgcgcgtgcgcaaaacggctgcggcggcgattcccgtcggcgtgaccatttccccgtttgtatccgtcgggcgcaaagcgatgccgtgtgcggcggcgatgttcaaaacggcggggacggggacgggcaaagagccgtgctggcacatgacgaaaccgcgcccttcgttcaatccgtcgacaatcacgttcttgacgcccaaatcgtcggccaaaacggcaatggcgataatgtcgacaatggaatcgattgcgccgacctcgtgaaagtggacttcgtcaacagaacagccgtgggctttggcttcggctgccgcgacgatttcaaagatttttttggcggttcggcgcgcgctgtccgtcattttcccgcggtcgataatggcgaatacgtcggataaatggcggtgttcgtgggggtggtgatgagagtgatattcttcctcgtgcgcatggttgcgggcgtgcaggcgaacgtcgaaatccaatcccgcaatgctgtaggagtttttccgttcgacatgccagtcgaagccgtccagatgcagactgtccaacacggcggcgagcttttccctgcttgcccccaaatccagcaaagccgcgacggtcatgtctccgctgatgccgttagccccttccaaatacagatattcagtcatgatgttttcctttgacaatgcggcaagccgtgaccgccgccccgaacccgttgtcgatattgacgacgctgacaccctcggcgcatgaattgagcatggtcagcaacgccgacaagccgtgaaacgacgccccgtagccgaccgacgtcggaacggcgatgacgggaaccgccaccagtcccgcgacaacgcccgccaaagccccctccatgcccgcgacggcaatgacggcgtcagcttggcggatctcgtcgattttggcgaacaagcggtgaattccggccaccccgacgtcaaagaaccggtcgacggttgcccccagaaactcggcggtttgtgcggcttcttcggcaacgggaaggtcagccgtgcccgcggtgcaaacggcgatgcgtccgcccgaatgcggcttttcccctttgaccagcgacaaaatccgcgacgtttcgtcgtatgaaacgggcagtcccgccgctttgacaaaggcggcttgttccgccgaacagcgcgtcgcgaatacggcacggttgtccgacagaaaagcgttgaaaatgccgaccagctgttcgttcgtcttgcccgcgccgaaaattgcttcgggtgttcccgtcctttgtgcacgggtcatatccgttttggcgtatcccagctctttgaacgtatcggacatggcagattccttattaggattcaaaagtctttgcgacttctttcatccacttgctgatttcgatgtgctgtgggcaatgctgttcgcacaaatgacagctgaggcagctggacgctttgccgtgcgatttcgtcaagttcgcgtagtaaatgcgctgggcgttgaacggtttgtccgaacgttcctgcttttcggcgttgaacaaagcgaaatagtcgggaatcgcaatcttcatcgggcagaattcgacgcagtagcggcaagccgtgcacggaatcgaaatcgcggcgtgcaaagtgcggatggctttttcaacggtgtgtttttcctcgtcgtccagcggcttgaagttctgcatgtaggacgtgttgtccaacagctggtccatagtgctcatgccgctcaaaaccatcatcacgccgggcagggacgccgcatagcggattgcccacgacgcgaccgacatattcggttccgcgtctttgaacactttttcgacttcgggcggaacgactgccaaagacccgcccttgacgggttccatgacgacgacgggcttgttgtatttctgcgcgatttcatagcatttacgcgactgaacgctggggttgtcccagtcgatgtagttgatttgcagctggacgaaatcgacttcgggatgggctttcaggacttcctccagcaaatcggctttgtcatggaacgaaaaaccgatgtttttgattttgccctcttttttcttttgcgcgatgaacccgaagcagtcgtatttgtcgacgttgggcagggtcgtcgcgttgacgttgtgaaccagataatagtcaaagtattccaaacccgttttttccaactgcttgttgaaaatggtttcgcggtcttccgcgcttttcagataaccggcgggcagtttgctggcgacggtgaatttgtcgcgcgggtggcgttcgaccagcgatttgcgcaaagcgatttcgctttcgtagcccatgtacatccacgccgtatcgaaataggtgaagccgcgttccaaaaacgtgtcgaccattttgttcagcgtttcatagtcgatggacgtctggtcggcgggatttttcagcggcaggcgcataaaaccgaaccccagcttattcttggggttaactttgcggcgcacctcttcggaaacggacaggttttcggcaatggtcagtttgggcaaagcggtgaaagcgaacgccgccagagtggacatcaaaaaatcgcgtctgttcatggaaaaatctcctttaattgaaacaaccgtgcaaaagtttacaatttagagttcactctaagtcaagagaaaagtgaacgggaaaatgaaaagggggcgacgcgcggtcagcccccttttcttctgaggggacggctaccccgatacaagaccggatcgccggagccccactcggaaaactttcgtttcgattattatcggcttcctttccaacaaaaacgcaaataatccgtgttttccgtaaaaaagagattgccataagtttttttatgcgtcaagctgttattaaatctatttttaagcgaggacatcatggaaaaacggattttcggtttcgatataggaattgcgtcgctgggatgggccgttgttgattttgacgacacggcagaccccgaaaacaacatttatcctacgggaaaaattgtcaagtcgggggtgcgctgtttccccgttgcggaaaatccaaaggacggcaaatcattagcgtttcccagacgtcaaaaacggttgcagcgcaaattgtgccgccgcaaagccagacgcatggcgggcataaaggctttgtttgtcgcaaacggtttgattgacagggcttctttatttgatgaaaaagagaatatctataaagcgcgcgacaaagccgacgtttgggatttgcgcgtcaaagctttgaccgaaaaattgactacggttgaatttatccgtgttttgacgcatttggcaaaacaccgcggctttaaatcctaccgtatcgtgcaggaaaaggcggacaaggaaaacggcaaggttttggcagcggtcaaagcaaacagagctttgctggaaaacagcaaaactctggcgcaaatcattgtcgaaaagggcggtccaaaacgaaacagagatgatagagaaggcaactcgacttatgaaaattcgatcccccgcgacgaaatcgaacgggaagcaaaactgatttttgaaaaacaacgcgaattgggcttgactgcggcgaccgaaaaattgcagcgggattttgtgggaatcgcttttcgtttccgtgaaatcaacggcaaaaaaatcgaaaaaatgataggaaaatgcctgtttgaaaaagacgaaccccgtgcgccgaaaaacgccccctccgccgagtttttcgtggcatggacgaaaatcaacaactgccatgttcgggacaatgacggcaaattacgctttttgacgcaagaggaaaaagacgccgtttttgaactgctgaaaaacaaaaaagaagtcaagtatgcagatatccacaaaaagctttttccgaatcgtccggatattcggtttgcggatgtggaatacaatccgaagcccgtttttgacaagaaaacaggtgaaatcaaagaaccgtccgaacccgaaagcttgaaattttttgcgctgaaaggatggcacgatttaaaaagcgcgattgacgtttccgcttatccgaatgaatggctggacaaagcggtcaccgtgattgccacgcaaaaaaacgatgccaatatttcaaaggagctgaaaaatctgggtttttccgcttcggatgctgaaaatctggctggattgtccttttcaaaattcataagtctgtcgctaaaggcgttatacaaaattctgcccgaaatgcaggcgggcaaaaagtacaacgaagcctgtgaagccgtcggatacgactttaaatcgacgggtgaatcttttgccgtgcaaaagggaaaattcctgccgccgattcccgaatctttggcaacgaccgttcctgtcgtcaaccgagcaatggctcaattccgaaaagtgtacaatgccttggtgcgcgaatacggcacgcccgatcaaatcaatgtcgaactggcgcgcgatgtttataacaaccatgacgaacgccgggaaattgccgcaaagcaaaacgaatatgcagaagaaaagaaaaaggtcaaagcatcggcgtgcagcaaactggagctggccgatatcagcggacgcgacttgctgaagttccgtttgtatgaacagcaggacggcaagtgtatttattcgggcgaaaagctggatttgcgcagattggtggagcaggattattgcgatgtcgaccatatcattccgtattcccgctctttggacaattcgcagaacaacaaagttttatgcttgtcgcgcgaaaatcggcaaaaatcggataaaacaccgttggaatacattacagatcccgtaaaacaggcggaatttatcgcccgcgtcaaatccatgaaaggattgggctctaaaaaacgggacagactgctgattcgcgactttaacgaaaaggatgtcgatttcagagaacgcaatatcaacgacacgcggtatatggcgcgttacattatgaaatatctggacgactgcatagatttttcgcaaagcaagacggatgtcaaagaccgcgtccaagcccgaaacggagcattgacggatttcttgcgtcatcaatggggattgaaaaaagaccgttccgaaagcgacaaacatcacgcgcaggatgcgatagtcatcgcttgcgcgaccaacggatatacgcagtatctggctcatctgtcgaaaatttttgaaaacaagcaagcttacgccaacaaatacggcgaaccgtggtacaaggcgttcaaacaacatgtcaaacagccgtgggacggattttatcaagacgttcaagcatcgctggcggaaatttttgtttcccgcccgccgcgcaaaaacgcaacgggggaaattcatcaagataccgttcatacactcaacccgaaaaagaaaaacaggtggggtgaacttgtatacagcgcaaaggacgttaaatctggattaaatgttcgcggtggaatggcgggcaatagcaatatgttccgttgcgatgtttttgaaaaaggcggacgattttttatcgttccggtgtatttggctgatttctgtgaaaaaaacagatcagattgtttctgtccgaaagataaagagcatgaaaaacccgatgaaacatataagtttttgtttagtgtgtttaaagatgattatctttctatagaaacgaataaaggagaaaaattttatggttatatgaaccaatatataacctctacgggacaattttatataggttcaaatgattcatcgccaatgtactcaatatcaacatcttcatttgaaaaacaggatattttattgtatcgcattggcgaaaaatttgaaaaatgttctgttgttgactttgattcggaaaaacaagaaatgaaagtagcttctttagaagacggctctattcacaaaatcaaagcttctgcaaaagtaaataagaaaggagagactcaaaaaatttataaaacagataagccctatgaaaaattagataaaggaaaaacaatcagctcagctacttttaagagaatacgaaaataccaagttgatcctttgggacggtatgtcgaggtcaaatccgagatcagactaccgctgaacatcaaaaaaggaaaatcgtaatggcttggcgtgtcgttcaaatcacttccgcctgtaaactgtccgtcaaaaacaggcagctgctttacgaaccgactgacggggaacatataacgcttccgctggaagatattgccgtcgtcattttggaaagcaaacatattttgatgacttcgaccttgcttgccgaactggcggaatacggcgtttgtctgtttacatgcgacgggacgcatacgccgaacggggtttatacggctttcggcaatcattccagacacagcgcagtggctaatctgcaaatcgaggcatccgaaccgctgaaaaagcgactgtggcagaaaatcgtcaaagccaaaatccgcaatcaagccgaggtgttacgccgtgtcggcaatcgttattgcgataaattggaagagattgcaaagaatgtccaatcaggcgacacgacaaacggcgaagcattcgcggcagggctttattgggacaatttattcgacaatttcaaacgccacgatgccgacatcaccaatgccgcattgaattacggatatgccattgtccgcgggtctgttgcccgcagtttggtcggtgcgggtcttttgccatgttttggattgcatcacgccaacaaattgaacgcgtttaacttggcggacgatatgattgaaccgttccgcgcttttgtcgattgggcggttgtcaaagccgacttgggtgaaaaagattctttggaaaagcaggacaagcaactgcttgtgtccctactgacacacaactgttcctatgatgacgaggaaactacgattctcaaagcgattgaacaaacggcgtattctctggtcaacgcttttaaggacaaagaagccaaatcacttgttttgcccgaattttcaaaaactccgctgtttgagtaaaaaaatggcgcaactgggggaaagatatatgcgcatactggtctttttcgacctgcctgtcaaaacaaaagcggaaaggcggcgtgcgactcgattcagaaaagatttgattgacgacggttacatcatgttgcagctatccgtttattcgcgcatttgcaaaggcgaagacaccgccgaaaagcacaaaaaacggctgaaatccttggttcctgaagacgggagcgtacgtgttttgtcggtcacggaaaaacaatacgcgtccatggatattttagtcggattgccgaaaaaaacggaaaaaatcggggctgaacagctggttttgctgtgatttttcactcggaaaatacggaaaaagtccttgtttttcaaggacttttccttaatttattatatcgcatttttgttgnnnnnnnnnnnnnnnnnnnnnnnnnnnnnnnnnnnnnnnnnnnnnnnnnnnnnnnnnnnnnnnnnnnnnnntgttggaaaggaagcgataaccaatcgaaaagcttgtcgatgcgatgatgaattatatcgcatttttgttggaaaggaagcgataaccggtcggcggctcgctggatttgaacggtaattatatcgcatttttgttggaaaggaagcgataaccgctttgactttgattttttctttttgttgattatatcgcatttttgttggaaaggaagcgataactcatcaaagcaattttggacacaagcttttattatatcgcatttttgttggaaaggaagcgataacaccgcaaggcgtcatttgggattattaccgattatatcgcatttttgttggaaaggaagcgataactcacggcaaagggcgaaaaggacgttcaaaattatatcgcatttttgttggaaaggaagcgataacttgatgaaagcatattcgacgccgaaaagaattatatcgcatttttgttggaaaggaagcgataaccaggactacgaccacacaaaagcgtacacgattatatcgcatttttgttggaaaggaagcgataacacgcctgatgttcccattcaggcgcgcggaattatatcgcatttttgttggaaaggaagcgataactgaagcgcattaagcaaaacacggccgcttattatatcgcatttttgttggaaaggaagcgataacatcacgcaaaacctgtacttgaaacacgctattatatcgcatttttgttggaaaggaagcgataacaaggaacaagcgaaacaaaacgccgttgatattatatcgcatttttgttggaaaggaagcgataaccctttaaaaaagggggggggggggcttaatcaaatttgacgggacgccagttgtaacgatcgggcaggggcttttcttttctgcgcaaaacaaagtttttaagtctttgccacagcgattttttcggtttcagcgccgcgatgtttttatgcaggatttcttccagcatggcaaacgacacgacatcgttttcaaagtttcccgttacgcatccgcaggtgaagcggtgacagttgttgaacaaaacgttgtacggcgttttttcgttgatgtgttttttcgcccttttcgcgacaatcggcgcggcaagcacaacatccgttttttcaaagcaagccgtgtaaatgcggttggaatcgggattcgttccgggcgggaagaaagtcttgggcgattcgacgcggatttgactgtgacggttcaaactgacgattttcccgtcgccgatgtacacgcccgtatgttccagcagcagacccaaatcgcacttcaaaatacagccgacgacgggtttgacgtcgggcgagcgcaaagtcttgtaacgtcttttgcggaaatttttccgcagcatgaccatgaaacggcggcttttgttcaacagagttctcctttaaaactacattttacggctttttgcgtttttttgaagaaaaaagattttttgattccgcaaattatgtattatagcgaaaacaggcgtctgaatcggcgcggcttttgaacagaaggatttgatatggaaacaacgccccacccgttgctggaactgaagaacgttaccaagtttttcgggtcgaacaaagttttggacgatgtggatttaaccattaacgacggcgagtttttgacgcttttggggccgtccggctgcggaaaaacgactctgctgcgcctgattgcggggtttgaacggccgacgtcgggcaaaatcattatgaacggcaaggaaatttcccacctgccgccaaaccgccgctttgtcaacaccgtgtttcagcagtacgctttgtttccgcatatgactgtgtttgacaacgtcgctttcggcttgcagatgaagggtttgcccgacgacgaaatcgaaatcgaagtcttcagcgcgttggaaaaagtcaaaatgcaccagttctatctgcgctatccgtccgaactgtccagcgggcagcagcaacgggtcgccatggcgcgcgcgttcatcaacaatccgaaagtgttgctgctggacgaacccttgtccgctttggattacaagctgcggcaggaaatgcagattgaactgaaagagcttcagcgcgatttgggcgttacgttcgtgtatgtgactcacgaccaagaggaagccctttccatgtccgaccgcgtcgccgttttgaacgaaggcatgatagagcaggtcggcacgccgattcaaatctacgaagagccgaaaaatatgttcgtcgccaaattcgtcggcgaaatcaacgtgttcgacggcatgattatcaaggttgaagccgacacgttcgacacgattgtcgaaggcatgttctaccgtttgcgcaaaccgtcgacgttcgacgtcagccgcggcggcaaaatcaaagtgctactgcgtcccgaagacatggtggtcagcaaagtcaacgaccccgaagcagaagcgcccgaaaacgcgttgcgcggggttatcagccacttggtttacaaagggcgcacaatcgatttgtggattcagacggcgggcggcaatatggtgatggcgacgcagttctttaacgaagacgatcccgaaatcatctatcaggccgacgatgtcgtgaacgtcagctggattaaggattgggaggtcattctgcccgatgcttaaaaccgcggacaacttttgccgcacggcggtcttgtactttattttcatctggttcggggtgatggtgtttgcgccgaacctgctggtgctgctggcaagctttttgaccaaagaacccgtgtggttcttgcgcctgccgctgaatttgcaggcgtaccgcgctttgggcgacgcggctctgctgaccgtgattttgaaatccgtcggcttggcgttcgtaacaacgctgttttgcctgctgttcgggtatccgttcacttattttatcgcacggttttccaaggaaacgcgcgcgctgtttttgatgctgattgtcgtgccgttctggacaaactcccttatccgcaactacgcgctgattgcggtgctgagcgaggacggcttgattaacgcgtttttgttgcatttcgggctgattgccgaaccgctgaagctgctgaacacgacgttcgcggtgttcgtgggcatggtgtacacgctgttgccgtttatgattctgccgatctacgccgtattggaaaaaatcgaccgaagccttgtcgaagcggcggcggatttgggcgcgggcccgtttgaagtgttttacaagattgtgattccgttgagctttccggggattgtcgcgggatgcatcatggttttcctgcccgctttgacgctgttctatgtgtccgacattctgggcggaacggacgtcaacgttttgggcagcatcatccgcaacaagtttatgattgaccgcgactggcccgtcggggcggcaatcagcgtcgctttgacggcgtttatgctggttttactgcatttgtactataaaagcggcaacaccgtcgaacaggagcgtcaattatggtaagcaaactgctcaaagcgctgtatatcgctctggtatacgtgtttttatatatgccgctggcggtggcgattgtgttttcgttcaacgacgccagcaattccaacgcgtggagcggctttacgaccaaatggtacgtcaatttgctgcatgaccaaagcttgataaaatcggcgttgaggtcgctgtttctggcggcttcgtcggcgacggtgtcgacggtggtcgggacgattatggcgattgccttgcaccgctaccgctttatcgggcagaaagtcgtgttcgggtcgctgtccgtgattatgatgtcgcccgaaatcatccaaggcatttctttggcgatgatttttatcgtgttggggattcctttgggttttacgacgctgcttttggcgcacacggttttttgctttccgtttgtgaccatgacggttctggcgcggctgaaaggcgtcagccgcacgttggcggaagcggcggcggatttgggcgcgaacgatgtcagcattgtgcgccgcattttgattcccttgattattcccgctgtgtttgcaggttggctgatgagcttcacgctgtccatcgacgacgtgattatcagctttttcgtcagcggaaagtcgtatgaaatcctgccgttgaaaatctattctatggtcagaacggggattcagcccgacgtcaacgcgctgtgcgcggcgctgttctttgtgactttcgccgttgtgatgatttcgtaccgtctggtgcgcgacagaaaataagcttgcgttccggcggaaaatgtgagaggataataagcgaagtaagaattggtgtctcacatcagaaaaaaaagatttgcccccgatgttgcagcatcgggggcttttccttttaccaagcattatgaatacagctcagtaaaagaaggacagccgttaaaagaactttaatcagcttcctgcttgtaaatgaagtaagaattgtactcacctctctttcactcggaagaccgagccgcgcctgaatcgggcgcggttatcgttttaagggataaatctttcgatactcttaaaaaatggatttgaaccctttacaaactttttacctgtttgtaagatgattgattaaatgaaaatatatgtccgtcgtcgggcggattttggttgaaagaggatttgatatgaatttatccaaaggtttttcaatgttttacggcagccgcgcgctggaaaacaaaatcgacgaatttctggaccgcatttccgaagcgggcttgatttacaaaaaggcgattcatgtcttccttgaacacggcgtgaccgaagactttgtgacccatgcggaacaaatcggtcatatcgaaagccgcgccgacgaactgcgccgcgaagtcgaagcgggactgtatgaacagaacttgattcccgacttgcgcgccgacgtgctgagcttggttgaggacttggacgccattttgaacgcttatgacgccagcggataccgtttcacgattgaacagcccgtgttccccgcgactctgcaccccgacattctggcgattgtggattccgtgacgaattcggtcgaacaaatcacgattgcctccagaacgtttttccgcgatttcaattcctgccgcgactatattcacaaagtccgtttttacgaaagcgaagccgacagaatcagcaccaaaatcaaacgcgcgatttattcgtccgatttgcctttggcaaacaaaatgcacttgtccagctttgtcgaaatgattgacaatctggcggatatggcggaagacatcaccgacaaactggcgatttacgtcatcaagcgcgacaactgacaaaggcgggcgttatgggctttacgggactgattttcctttcaagcggtttgtttttggggtggtcgctgggcgcgaacgatgcggcgaacatctttggcacggcggtcagcacccgcatggtcagattcaaaaccgccgccattgtttgcagtatcttcatcgctttgggcgcggtcatcagcggcgtcggcgcggcgtacactttgggcagtttgggcgcggtcaacgcgattgcgggttcttttgttacggcgtttgcggcggcgttcaccgtgtattcgatgattaagtgcggattgcccgtgtccgtgtctcaagccgttgtcggcgcgattatcggctggaactggtttaccgattccgtcaccgacgttcagtctgtcgtcaaaatcgcctcgacttgggtggcttgcccgttgctggcggggacgttttcagccgttatttatctggttttgaaccgcttgctgcggtcggcgaaaattcacttgttgcgccgcgactattgcacccgcgtcgccatgatagtcacaggcgcgttcggtgcgtattccctgggcgcgaacaacatggctaacgttgtcggcgtattcgttcccgttgcgccgttcgtcgaattcgactttgcgggacttcacatttccgccgttcaacagctgtttttcgttggttccgtcgcaaccgcaatcggcgtattcacctattcccaccgcgtgatgggaacggtcggcaaaggattgatgccgctgtccccgttcgccgcttgggtcgtcgtcgtcgcccagtccatggtgctgttcctgttcgcgtccgagggcttggaatacttcttggcatcgcacaacctgcctaccgttccgctggttcccgtgtccagcacgcaagccgtcgtcggcgcggtcatcggcatcggcctgtgcaaaggcgcggcgaaaaccattaaatggagcgttgtcgtccgcatcgtctgcggttggattatcacccccgtcattgcggcgactatctgctttttcgccctgtttttcatgcagaacgtcttttatcagcgcgtctatacgccgaaaacctacttcatttcggaacgcgtctataacaaaatggtggcagacggtttgccagccaaccaaatcggcgtgctgaaaggcgaacgttacaagtcgggtgtcgagttcatgaacgctgttcgcgcccgcgtcggcaaaatgtccagcgcgaccgaacaaaatctgctcaacaccgccgaactgctgaaaatctatatcgatcccgaaaagtttgaaaatcttgaccctcaaatgttttcggaagaacagatttcccaaatcaagcagctttccggcttgacgttcagctaccgttgggaactgcaggacgcgctgattaaaatcagccccgaatgggcataccgtcccgcaaccgtcatcaacaagcgctacaacaaagcccttgccgtcgagctgtcccaaatcgagaacgtctttacggtcaggaagaaggcgaaaaagcgcaatctcctttacgaagactaaaaacgcgattttaacggccgattggttcgtcagctgtgatactcggttttcgtgtaccgtttgtacacgtcaaacctgcgtttctcgcttcctgccactcgactcgttaaaatcggttttaggataagatttccccgtgcgggcagcacctccgattttctgcaggtattggtacgagtgccaaccaatcacaggattgccacgcccctgcggggctcgcaagttcgattcttgttgttttattgaaaataaaccaagaatcgcaactgcgaacgaagtgaagcagtcccgtgcaggattggcacttgtgcaaacttatcgcgggattgccgcgtcgcgacttcgtcgctcctcgcaagttcgagtcctttccccttacgggcaatagtggacaaaaattcggacaaaagacttgtaaaaattcggcaatatggtatcgtaaaggaaaatcgattcttgggaaagagaatgttatgtccaaatccttggctgactttatggatgcgtccgtgaaagcatacacctgcgggcgtgatgcgcaggaaaccatgggaacgctgcaaaaggcttttgtcgcttcctccaaacgcaaagcgggcaaggaaaaggagattttcgccgccgttctggaacccgtgatgaaaaccgtgcgcggtcgcgaaaccatggaaactttggcggatttgggatacaaatttcaatttgaagtcggcaatttcggtggtatgtgttgcagttccgaaaaaacgattttgctgaatccgaattacaacaacgaatttttgtcgcatgttttggtacacgaaggccgccatgccattcagtattcgcgcgcgccggaaaatgcgccggaattcgaggaaaccaaagtcgccgatatgttccgtatgcgccaagcgatcgaagctgacgcctgtgcgcatcaatccgcttttgtttatgaatgtaaaaccgttgcgccggaagtgtacaaaaactttaaggcggcggactatcccatgctgaccgcttatgaaaaggaaatggaaaaatcgggcgatgaaaagaaagccatgcgggtcagttttgaagcgtggtacgattacaagtattttcgcgatttttacgacaactatcacaaggaagccatgaaaaacgtggcgaatttcggcaaaaaggaaaaaaatccggcgttcttttccaaagactatcccgtcaaggatgtcgtcagtatgtgcgtgtatcagggcaagccttatatgacggcggagtttttgaacggcgacaaagcgtattccgttcccaaaaaagatgcgaaagaaatcaaagccgctttggcggcttatgtcaaagccgtgccgaacgccaagcttgacacatcgattgacacaatggctttgcgcgacgggacaatgcacattgtcaaatctgcaaaccgtcagtcgaatgcggtcgcggcggctttgaatcaaagcaaaggacgctgaaatgttggattcggtgaaaaaatttttgcaaaaaccctttaaaaagtatgcttgcggggaaaaggcgcggcaggcgcaaaaaactttgcaaaacacattcaccgcatcatccgcaaaatccgccgcggatgaaaagcggctgttgggcgatgttttggaaacgctgaacaaaacggacagcgggcgcgaaacgttggaaaatctgtcggatttgggctacaaaatcaaatttcagaatttgggcaagcaattcggcggatactgcaattac

SEQ ID NO: 996 - DNA, 22994 bp, synthetic construct
  source 1..22994: mol_type = other DNA
  misc_feature 1..22994: note = Synthetic
catccgcacgaccaaagggctgcggatcgccaccgtcagacaagagatttccgacacaagcgtgtccctgttggactgtgtactgcaagccgacacggaacgaacggaactgctggccgaactggaaaaggctgaagcttcaagcgacggtatgcggattggcgaactgcacgaacgtttgaacgtcatcggcgccaattccgccgaatcccgcgccggcgcgattttgtacggcctcggcttttccgcggaacagcaaaaacagcccctgtccgatttttccggcggctggcggatgcgcgtttcattggcggcggcgttgttcgtgccgtcagacattttattgctggacgaaccgaccaaccatttggatttggaagcgacgctgtggctggaaaactatctggcgaaatacggcggcacgctgatcgtcatcagccacgaccggtctttgctgaatcatttgtgcacacgcattttgcacgttgaaaacctgaaaatcgccagttacggcggcaattacgacgcattcgagcaaacccgcgccctgcagctggaaaacgaacagaaacaggccgcgaaaaccgaagagatgcgcaaacacctgcaatctttcgttgaccgttttcgttacaaagcgaacaaggcgaaacaggcgcaaagccgtgttaaaatgctggaaaagttgccgccaaaggctgttttcaccgccgaatcgtcgttgcgtttcacttttccgtcgccgcaggaactgccctcgcctttggtgaaaatcgaagacggcagcgtcggatacggcgaccatatcgtcctgtcgaagttgaatttgcgaatcgacgccgacgaccgcatcgccctgttgggcgcgaacggcaacgggaaatcgacgttcgccaaactgctggccggcaagctgaagttggcgggcggaacaatgcaggcatccgcaaagttgcaggtcgggtattacgcccaacatcaaaccgaagagctgtcgccgacgctgaccgctttccagcaaatgcagctggtgatgaaagaatcgaacgaaacgcaaattcgcgcgcatctgggcaatttcggattgacccagcaaaaggcagacacccgcatcgaacagctgtcgggcggggaaaaggcgcgactgctgttcgccgtgatgacgcgcaacgcgccgcacatcctgttgctggacgaaccgacaaaccatctggacatcgacgcgcgcgacgcgctgaccgacgcgattaacgcttaccgcggcgcggtcattttaatcacgcacgatccgcatctgatcgaactgaccgccgaccggctgtggctgattgacggcggacgatgccaaccctacgacggcgatttggacgactaccgcgaattgctggcacaaaaggcgcgtgtgcaaagtgcgggcaaagcggcggaaaaaaccgacaaagctcccgccgtttcgcgcaaggacgaacgccgcgaagccgccgaaaaacgccagctgtccgccccgctgcgcaaggaattgaaaacggtcgaagcgcagatggacaagctgaacgcgcaaaaggaaaagatcgaggaaatgctggaagacccgaccctttacatgatcggattgaacgcggcaaaggtcaaaaacctgcaaatatcgctggcgcagataaacgatgaaatcgacgccgccgaacaacggtggctggaattgtccgaagaactggaaaaattcgcctgacaaaacgccctgctttaaaacggggcactccaaattttcattaaccgccgccgcagataaaaacccctgttttttatccgccgcttttgctatactctaacttgatcggtgaaaaagaccggtcagggcgtcagaaacccttaccgacatagtcgccgcgactacggcgactgataaatcatacgtcaaatctgcctaaagggcggattttggcgaataaggttgtgtgctgaataagccaagccgtctttatgttggtacggtttctgaaaatccgcccacctgcaaaggtgggtattttcatgcaaaaaagggagtttcagaaatgaaaaaaacattggcaagccttatagtgttatctttattgacaggatgtcaaaatgtggggggctattcaaaacaatatgttagttgggcgcaaaagaaaaacgattgcgtttatgaagaaaaaactacacgtttggaaacgatacattaccttacacgcgatgaaacgaaggaatatgtgcaaaacgtaaacacgataacgtataacgacacgatgtgctcgaagataatagaagcagaacttaaaaacaaaacaaataaaagtgctttgcacaataattttaatcaaatcaacagtgtaagtaacacaaatatttcgtatcagtggtaataaaattaaaaaagccctcttttgaactgtaccccgaaaattggacagcccaaaaaaggtcctggggcagttcattttgagggcttttttgtgttctggactatttttcttacgccatttggctgttgtcccattcggcaatcttggattttgtcagcgcctgatgacgacgccttagccatctttactgatattcttctgcaaacgaatcgggcgcggcggtgtatttttaagataaaaggaaaagccccgaatggggctttttctttggattttgcggattatctgtccgtccggttggcggcgatttgcgcgcggatcatctttgacgccaaatcgcgcgcctgcgtcgtttccttgtttttcagaatctgttgacgtttgacgtcgccgtttttcacggtcggccgcttcattccctttgtgcgcggggggatcgtgtcggcgcgcgtcggaatgccgtccaaagctttggaatcgtccttgcccgtcaattccttgcggatttcaaagtattttttcatctgcgtcatcgtgtggtcgcaaacgtccagatactttccactgttcaggatttcaggatcgtccttaaaataattaccgtgttgtgtccacgcgatttccgcaatcgttttttgcgcggaaatcgacatatcgaatttcatctgcgcgtctggattcttgccgtttgcaatgtcgcgcagatcctgctgcatcggttccagcaaatagttggcttcgtacaccgactttgtcccctgctggtcgtaccacgatttgaacgtgtcggtcagcagctgatcgcccagttgcgcgtcgtttttaatcaacgccttcgtaaagcccgcggcgatcggcggatagtatttataaaattcctgtttcggcgcttcgtcgcccaagcggaacatttcttcacacgccgtcgcggcgtacgcctgcgcgtcggcttccatcgcgcgcatatagatcaagtttgttttcacgtcccatctgttttcttccaaatttgacgcacggacgaactgccccgcgtgacggcattcgtgacacatcgtgccgaccagcttcgcatcggaaaatttcgggttcagcgcaatgcgcttgtgttccggatcggcgaaaccgaacgcgcggcattcgcctttgacaaagttgaagtgatatccgttgtccgccgcgatacgcaaggtttccaaaccggttttgctgcgcgacaaacggttgatcagcgcgatcatgcgcggacggtcttttttcgcgcaatagcgcaaatcgacgtcaacggcgggcttttcgtcgggatattctgcttttttgtacggggtaaaagcttgtttcagcgtacccgccagcttgcgttgcgccagaatgtttttccagcgttcaatcgtgttgcccatgctcatcgtttcgccgacgttgccgcgcggctgtcccatttcaggcaggcggcgttcaaacgcgtccttgttcgtcggcagggcgtcaaccgatttgtccggttcgattcccgcgcgttcccaacggattttaaagaacgcctgcgcgtcggatttcgtgcgttcgccgacggaggcaaagcgcggctcgtccaaaaaatccggattttccgccgacagatagttgccgtttttcgtccagccgaccttttcgacaacggttttggaatcgacgttttcggaaaacgtgtaaatgccttcgtcgtcgttgccgccgctcgccagattgaagttttgtttaatcgcgtcgtgcatcggttcgatgatgtagccttcctcgtaattctgtttggtgcgcgtctggtcgtaccaccctttgaacacgtcggcgacgaccttgtcgttcaaaacgccctctttggcgatcgcctgttcataggatttgtaaatgggcggatagaatttggcaaacgtcgccaagggccctttgtccccttggttttccagttctttgcacgctttgacggcataggcctgcgcgtcggcttccttggcgcgggaatagcggatgatcgacgcgacgttcagtttgtcgcggtcgggcagatcggccatacgcacggattgccccgcgtggcgggattcgtggcacaaagtggaaaccagcttgtcatcggacgccatgggccctaaaccgatgtagttcacgccgccgaaaaagcacccgaagcagtttgtcttcgcgtccagaaaaccgaatttaacgccggccttgttcgcgatttccaacgtttcgcgccccgcttcggatttggccaagcggttgacgatgtggatcatgcgcggcaattcgtcgtccgcgcacagcgacagatcgacgtcaaccgtcaatttttcgttcggatcgtaggtgatttgctgtttcggttcttccataacctgttgcaacattgaagacgtcataatttccatagcttttgctccttagcgggaacggttggcggcgacgcgcgcgaacgcggctttttgcgcctgtttttcggacgcgtaacgctgtttgttgttcaaaatgcggtctttggcctcgaacatccccgccatcggcttttcgcccattttggggcgttcgcggtgcatatagtccggacgcgtcgggatcgtttccaacgacggatcgggtttcatgccggtcaattcctcgcgcattttgaaaaattcgcgcatatcgcccatcgcctgctgcgcgacatccataaacttgccgctttccagctgtttcgggtctttggtgtaatagttgccgtcctttgtccaacacgccagcgcgacgacctcttccgcggtcattttctgtttgtcatagaacaaagtcggttccttgccctgtttcagatcatagatttcctttgtcatcggttcgatctgataggcttcctcgtaaacggttttggtgcggatctggtcgtaccacgcttcgttcgtttccgtcatgacttcgtggttgactttgccgtgcttgtcataggacgcgcggaacgcttcttcgatttcgggatagcgttgggcgaaaatgttgtacggcgaccggtcgccctgcagcgccaattccttgcacgcggtgacggcgtaggtctgcgcgtcggcttccatcgcgcggaaacacatcagttccgaacgcacgtccagcacgccgaacgcttcgtgcgcgccgcgaacgaattgccccgcgtggcgcgcttcgtggcacagcgtgccgaccagctttgcgtcggattcctgcgggttcaagcgcacccaatgccccgcttcgtcgcacgcgccgcaacaacgcacacctgcgtcgaaaaagctgaatttgaaaccgttgtccgccgcgatttgcaacgtttccaaaccgcacgggctttttgccaaacggttgaccaaagccaccatacggggctgatcctccgccttgcattccgtcatatcaatggcgacgacgggcttggcggcgggatcgtaatcgtttttggaaacattggcgtcaaaaatctgttgtaacggcatgggtgaacctcgcttaaaaaacttatgcgaatatagtagaaaagatcgtgattttgtcaatattttttataaaatccactgtcgcccgccttttctggaaaacatttgttttgtttaaaatcaatatgatgcgacaaaaaaatgatttttcacatcatcggatgaaaacacaccgttttatggacgaaaggttaattttccgattcccgacggaatcatacaaaaaaccccgccgcggacaggttccggcgacggagttcttcaaatggtcaaaggcggaatatcacctgcggcgcgccgccaaagatgcgatgatccgcgcggtcacggggttgaccttgcggtcacgcgttccctgttgcgcgtttccgttttcctttgccgccggatcgttttcacagccgcgcactttcagcgtgttcaaggatggatccggtttttctcccgtcaccttttcacgtttggcaaaatatttttcggcgacatcgcgcgtttccggcgcgatcgacagcttatccgcgttttccaaaacatccggacgatccgcccaatagcattttccggcggcgttgtggcagaacaggttgaccacgtcggcggatttcagcttttcatcatacggtgcgaagtccttttcccgcatcatttcctgcataacgtcggtgatgtccgcttcgtacgcttccatcatatcgacatccttgtaccacccctcgaacgcgccttgcaacatcttgtccgtcacgggcgattccggatcgggcgccgcgttcataaacccttcggcgatatcgacggaatcctcggcgaaacaattccatggggcggcgtttccggaattgacgcgaatttcgtggcacgtcgcggcggcggccgtttcggcgtccgcttccaacgcgcggttgtgcatcacctcgcccctaacatcgtaacatccgtattcggccgtcgcgccgcggatgaattgctgcgcgtgtctggattcatgcgccaaagtcgccaccaacagaccgtcgtccatgctgggattcaaaacgatcatggcactgcccgcttcgcaatacccgcaggtgtccttttgcttttccattgtcagcgtatagccggccttggcggcgtcctccaacacggcgcggccgaacggagagctttcggcgattgtattgaccagatgcgtcaaacggcgaacatcggcggaaccgcactttttccccggacgcccgacgatttgaatatccaccaacggcttttcatcgggataaaacttatcgggaacgttttttttgccgaaaacctgcttaggggttgaatttgccatattgacctccgccgaaactcgttgaattaaatggaagatagcacctctttgacaaaaataaaacatatttttgtcgaaaacgtacaaaaaaaacacgccgccccgtcgaacaaaggtgttgccaacgcgcgaaatccgtcgtatattgaaaaaagtgataaaccgttttccgtaaaggaggggatttttctcttttcgccggagaagagctttttatggttgagttttcgtctgttttcgggtaatttacccccgaacagatgaatttgtgtttatcggagaataatctcctcttacaaaaggatgtgaattttatggtacaggttatcgtacgtgacaacaatgtcgatcaggctttgaaagctttgaaaaagaaaatgcagcgcgaaggcgttttccgtgaaatgaaattgcgccgcaactttgaaaagccgtccgaaaagaaagcccgcgaaaaggccgaagccgttcgccgcgcccgcaagttggaacgcaagcgtttggaacgcgacggattctaagcatcgcgaaaatccataaaaggcggaagagaaatcttccgtctttttttgtgtttcctgcggccgccccatagccgccggcaattttgtctattttctgaaaaattgcgctatttcttgacacccactccccgcccgtgtaatatattttataaagtacgcaggaggacgccccatggacaaaacatcgacagccgcgcaaacggacaaacattcgccggaacaggccgcgtccgtccggatatcccgcgaaatggccgccaagttgaaatccgagtgggaggatctgcaaaaacgccaaaacggccgccgcgtccgctcaaacgaccggatcagctccgtttccatcatccgtagccgtcagggcaaggaatccgtgcgcgtcaacatgggcgacggccgcgaaatcctcagcgcgtccttggaacgggcggccgtcgaatttgaaaaaacggcgcgcaaagtttacgccagctccagaatcgaagaatttttaagaaaaatcaaagaaaacggatgggacgccgtcgaaggtgaaatccccgccgaaatcaaggacgccgtgcgcaacgcgtgcgaacgcgcgaacatttccctgtcgtccaagggcgaacgcgccaaggaacgcgaggccgctcaacaggcgtcgcagcgcgccgccgaagcggcggatcacgccataaaggccgccgcccgtcccgccgcgcaaccggccgcgttcgacaacaaaaaagcggccgatttcattgtcgccgccgccgtcgccgacttcgccgcctccgctttctgcaaaaacagcggcatgaagatgctcaaaccgacacagcaacgccgcaagggatcgtcctccaaacaggaaaaaatcgccctgaaaatgccggacggctctttctttgaaatcaagctggtcggcgacaacatcaacgccaaccgcgtcaaggcgcaggcgatggccgaagctttgttccgtcggaaaaaaggattgcccgcggaaaaaggtgacgaaaagctgttggcggccatggcgaaacagaaaattgaaacgttggccgatttgcaacaaaaatccggccgcgtcaacaatatcgctgacaaactgatccctgaaaaatacaaagacgccttgaagcacgaaaagggaaaagacattgaacatttgaaaaaattcaatgaaatgttccgcccgcgcagaaccaacggcgaaaaaaagcaaaaacgcagtgccgaaatcgtgtcgctggatatgtcggtcgggcgcaaaatcgacgatatggtgcaggaatgccgcgcgaataaaaaagaaaacaaaagactttccgccgcggatatgaacaaatacaccctgctcaatttctacggcaaaatgaacaaagaagacgccgtcacgcccgccgccgaaaaattcgcggcgcaaatggcggaaaaaggcgtttccggcaaagagctgttcgccaaatacaacaacggtaaaacgccgcaaaaggaaatggaaagctatatcgccgaccgcgtcaacgggaaactgcccgcccccgtcctgaaaaaagacaaaaagaagaaaaaacagaacacggccgcctcccccgccaaagaaacgaccgccgatgaaaaacggcgcgtgctggaacggatgaaagcggattacgcggcgcgaaaacagccgccgcccaaaggattgcaacagcaaatcgccggcagacaaacgacgcccgccgcgaaaacggccgccggaaacgccgcgcccccacccgccgccaaacggacgattcccctgtcccccgcgatgcaggcggcgttgatcaaacaacgcatcacacccgtgcgctgaccgccggaacgcgaaccgaaaaacgggaacgccgcagaatatcgcccaaccgttcggagcaaagccgccgcgatatccgtttgccgtaccctttcccttaacttaaaccgccgcgattaccggattaccgcgccccagcgacatcagccacctgatcgccacctcttgaacgacagcctcactcgacgcctgttcgccgcattgccaacaaaccgccgcgccccaaaccggccgacgatttttctatcttctttatgtcgtgaaaaaacttaggggacggctaccccgatacaagaccggatcgccgtagccccactcggaaaactttcgttccgattattatcgcttcctttccaataaaaacacaaataatcgcgttttccgtaaatttgatattgccataatcatttttataggtcaagctgttattaaatcaattttttagcgagcgcatcatgaaaaagagaattttcggtttcgatatcggcatagcttccttgggttgggccgttgtggattttgacgacacggccgatcctgaaaacgacatttatccgaccggtgaaattgtcaaatcgggcgtcagatgttttcctgtcgcagaaaatccgaaagacggcagttctttggcgcagcccagacgccagaaacgattgctgcgccgattgtgccgccgcaaagccagacggatggcgggcatcaaaaatctgttcgtcgccaacggattgatcggcaaagacgctttgttcaacgaaaaaagcaatatttacaaagcgcgcgacaatgcggacgtttgggatttgcgcgtcaaagctttgaccgataaactgacgacaatcgaattcatccgcgttttaacgcatttggccaaacaccgcggatttaaatcctatcgcatcgcggcggaaaaagcggatgcggaaagcggaaaagtgctggaagccgttaaggctaatcgagctttgctggaaaacggcaaaaccttggcgcaaatcatcgtcgaaaagggcggacagaaaagaaaccgtgaaaaaatgatcgtcaaaaacggcaaaacggaaaagcaggccagctatgaaaactcaattccccgcgacgaaatcgaacgcgaaacacggttgatttttgaaaaacagcgcgcgttcggtttagaggcggcgaatgaaaaactgcaacgggattttgaaaaaatcgctttccgtttccgtgaaatcaaaagcaaaaacatcgaaaaaatgatcggcaagtgcgaatttgaaaaagacgagccgcgcgcgccgaaaaacgctccgtcggccgaatttttcgtggcgtggacgaaaatcaacaactgccgcgtcagggaacctgacggaaaaatccgttttttaacgcaagaagaaaaggaaaacgtctttaatctgttgaaagatcaaaaagaagtcaagtattccgctttgaaaaaggctttgtttgccaagcgtcccgatgttcaatttaccgatattgaatacaatccaaaacccgtgtacgacaaaaaaacaggggagataatcgaaaaaacagaaaatcctgaaaatcagaagtttttctctttaaaaggatggcacgatttaaaaagcgtcatagacgtttcctcttatcccgttgaaacactggataaaatcgcgaccgtcatcgccacaaagaaaaatgacaccgatattgccaaaggattgaaagagctgaatctgccggatgctgaaattgaaaaactgacctccctgtccttttcaaaatttatccggctgtcgttgaaagctttgtataaaatcctgcctgaaatgcaaaaagggatgaaatacaacgaagcgtgcgacgccgtcggatacgactttaaatcaacaggggagagttttgccgcgcaaaagggaaaattcctgccgccgattcccgaagctttggcgacgacggttccggtcgtcaatcgcgcgatgacgcaattccgcaaagtttacaatgcgttggcgcgtgaatacggaacgccggatcaaatcaatatcgaattggcgcgcgatgtttacaacacccatgacgaacgcaagaaaatcgccgacaaacaaaaagaatacggcgaagaacggaaaaaagcgcgcgatttggcgcaggaaaaaatggaaatcgaaaacatcagcggacgcgatttgttgaaattccgtctgtatgaacagcaggacggcaagtgcatttattccggcgaaactttggatttgcggcggttgacggaacaggattattgcgatgtcgatcatatcattccctactcccgatcgctggacaattcgcaaaacaacaaagttctgtgcctgtcgcgcgaaaatcggcgaaaatcggataaaacgccgctggaatacatcatagatcccgtcaaacaggcggaatttatcgcccgcgtcaaatccatgaagggattgagcgccccgaaacgggacagactgctgatccgcgatttcaaagaaaaagagcttgaattccgcgaccgcaatatcaacgacacgcggtatatggcgcgttatatcatgaaatatcttgacgactgtattgatttttcaggcagtcaaacggatatcaaagaccatgtgcaatcgcgcatcggctcgctgaccgattttttgcgtcatcaatggggattgcacaaagaccgcaatgaaaacgaccgtcaccacgcgcaggacgcgatcgtcatcgcttgcgcgaccaacggctatacgcagtatctggctcatctgtcgaaaatttttgaaaacaagcaagcctacgccaacaaatacggacaaccgtggtataaagcgttcaaacagcacgtcaaacagccgtgggacggtttttatcaggatgttcaagcgtcgttggcggaaattttcgtatcacgcccgccgcgtaaaaacgcaacgggagaagtgcatcaagatacaatccggacactgaatccaaacaagccgcaatacagcgaaaaagacgtcaaatccggaataaaactgcgcggtggattggcaaacaacggcgatatgttgcgtgtcgatgtgttttccaagaaaaatgccaaaggcaaagaacagttctatttggttccgatttatctggcagacagaattaaacccgaattgccgaacaaagcgattgtcgcaaacaaatccgaaagtgaatggatcattatggatgcaacgtattcatttaaattcagtttatatatggatgatcttgtatctgttatcaaaggtgacaaaaaaatattcggctactataaaggaactagccgttccactgcatctataacaatagagggacacgatagaaattttattcaacccagtattggtgtgaaaacagtagataacatcaaaaaatatcagatcgatccactgggacggtatgtcgaggtcaaatccgaaatacgcctgccgttgaatatcaaaaaaaggaaatcctgatggcttggcgcatcgtccaaatcacttccgcttgcaaactgtccgttaaaaaccggcagttgctgtacgaaccggaaagcggtgaaaaagtcaccctgccgttggaagacatcgccgtcgtcattttggaaagcaagcatattttgatcacttcaacactgctttccgaactggcggaatatggtgtttgcctgttttcctgcgacggaacgcacacaccgaacggcgtttacacggctttcggcaaccattcccgacacagcgaagtggccaatttacaaattgaagcttccgaaccgctgaaaaaaaggctgtggcagaaaatcgtcaaagccaaaatccgcaaccaagccgaagttttgcgccgcgtcggcaaccgtttttgcgataaactggaagaaatcgccaagaatgttcaatccggcgacacgacaaactgcgaagcgttcgcggcgggattgtattgggacaatttgtttgaaaacttcaaacgtcacgacaccgatatcacaaatgcggcgctgaattacggttacgccattgtccgcggcgccgtcgcgcgcagcttggtcggcgcaggcctgcttccctgtttcggtttgcatcatgccaacaaattaaacgcattcaatttggcggacgacatcatcgaaccgtttcgcgcttttgtcgattgggcggttgtaaagtcggatttgggcgagaaaaacggccttgaaaatcgagacaaacagcttttagtttcagtattaacgcgaaactgttcctatgacgacgaagaaacaacgattttaaaagcggtggaacagacggcgtattcattagtcaacgcgttcaaagacaaggaatcgaagtcgctcgttttgcctgaattttccaaaactccactgttcgagtaacccgcaatggcgcaattaggggaaagatatatgcgtatattggtctttttcgacctgcccgtaaaaacaaaagccgaaagacgacgcgcgactcgattcagaaaagatttgatcgacgacggatacatcatgttgcaattatccgtttattcccgaatttgcaaaggcgaagacactgctgaaaaacacaaaaaacggctgaaatccttagttccggaagacggaagcgtccgcgttttgtcagtgacggaaaaacaatacgccgccatggatatcttagtcggaacaccgaaaaaaacggaaaaaatcggcgcggaacagctggttttactgtgatttttaaaacgcaaaaaacggaaaaagcccttgtttttcaaggactttttcacatgatattatatcgcatttttattggaaaggaagcgataactccgaccgcgcggtaatgagtttttctttcattatatcgcatttttattggaaaggaagcgataactacggcgtcgtcgaattcgacaaggatttcattatatcgcatttttattggaaaggaagcgataacttgaaaacgatacggtcgttgcgaaaaaaaattatatcgcatttttattggaaaggaagcgataacaggacgggacggacattgccgtgttgttcaattatatcgcatttttattggaaaggaagcgataacaattttcaactgcatagccgccccctacacattatatcgcatttttattggaaaggaagcgataacttcagaacgttgatttgaacactcaggggtattatatcgcatttttattggaaaggaagcgataacgtagagtgcattaatcgtcttgtccgttttattatatcgcatttttattggaaaggaagcgataacatcctcataggggctatatttccggaaaagattatatcgcatttttattggaaaggaagcgataactatgaaagccacccgacggacgacgtggcgattatatcgcatttttattggaaaggaagcgataacgcttcgcattgaaacgcgccgatgtcgcccattatatcgcatttttattggaaaggaagcgataactgatgccgcgcgtgtttgtcgcgttcgcgcattatatcgcatttttattggaaaggaagcgataaccgggatgtacgtccgcggcagtaggttagaattatatcgcatttttattggaaaggaagcgataactaacggttgttttgtcgtaaaaaccgcgcgaattatatcgcatttttattggaaaggaaacaatttgaacaaacggtatatttatattattatagcagatggttattttgtgtcaaatggcgtactgcccgtttaatcatttgtcttcactgccataattatttttggaacggtcggttgaattcggattgacaatcagtttgcagaaataggcaagctccgttttcgacctcacatatattgaaaactcgttcggtttcgcagtcgcaagtgcgcgaatgtttccggacttcgacacccaaacgggggtgacgagttcggccagacgtgacaaatttgtttgcaatgtgtccgtcatgtttactctcctttcgtgtacatttgatgcatttgcatcggatacgccagacatccgctctcagttaacattcttgtccggcaacgattacagctggcggtcatttctatatttcacacctttttggcgcaaaatatagaaaacaacaagttcaatccgatatagctaattgattttccaagcccctcccccaaaaaacagaggaggaagcgcgaacctcccctctgtaaatatcagcggatgaaattcgtccgttcgacgggttcgcgttccggcggcgtgatgccggctttggcggcggcatccttgcatttcagcagataggccatatttttggccagaatacgcatattttgcattccctctttatcctgccggacttcgtcgggggtgttgccgtgaaccatattccaatagcggccggacacgaccggcatttccgatatttgaaaatacttgttcagctgatccaaagccgccgttgtgccggcgcgtctggcgcagacgaccgccgcggccggtttcatgcggaaaacgtttctttttccggcggattccgaataaaaagccctgtccaaaaacggagtgatcacgcccgacgccgccgcgtaatgcaccggcgatccgaacacatagccgtcaaatccggccgccttttccacaaattcgttcacgcggtcgtcaatgacgcatttgcccaattcggcgcatttgcggcacgccatgcacgggacgagcggcctgacgccgatttgaaagatttccgcgccgacgccctctttttccagctgagcggcgatttccgtcaaagccgtgtatgtgcatcctttttcatgcggcgaaccgttgaccaacaaaactttcataaccttgtcctttccaaaagcgagtacaaaaaaccgccctgttcaggcggtttttcggtttaacagatgttacgattatctggctttgtaatccatagcctttttcatcgcgacctgctgcggcgccgtggcggccggtttctgctggtactggcgttttctcgcttcgatcgcggcgcggcgttcgtcgtaattctttttgaattcttccgttttgttcacgtcgcgctgttgatgtttctgcgaaaatttcgccgcgatgatgtcataggcgtacgttttgaaatagccgctgttggccattgattcgtacaaagccaccacgcgtttggcgtcgcgctgtttgttttccgtgcggccgggacgtttgaattccgaaatctgcggatctttgactttggaattttcgttgcccgcctgacggtagccgttcaaaatgcccgcaatgtctttgaaaacggggatttccttgatttcattgaccttgatgtgcattttcggacgccagttcttccacgggatacggctggcaccgccctgttcaaagactttcatgtctttgccaccctctttggattcggaacgctgacgcgtgccggggatgttgcccatatagttggtgcggaacatatccgagaacgggaacaacagcatcgcggaacgggattgccccagatagtcggcaaccgcctgttcgtatttttccggacaggaacgcgtgtcgtgcgcggggtcggtcacggcgtgtccgccgacgcgatcccagcaccccttttcgttcaaagcccagttcagggcgcaacgctgggattcatactgacggaattccatatcgcgctgctggctgctttcgtaatatcccaagtagtctttcaaatgcacgtcgcgcgccgtccattggctggccaaagacggagtgtcgtgcgtggacggcgccgccgtcgaatactgcgggtattcttcggggtggcggaaagcgttgttgttgccgccgtgttgatatccccattcgcgttcaaacggcatcacgcggtaggacagaatcccgtgatccatcagtttgtcctggaatccgggaggcagctgtcccaaatcttcgccgatcaacatacatttgttgcggtgggattccaacgcggcgaccgccatcaaatcatcgacggggtagtacacgaacgcgccttccttggcggatttgccttcggggatcatgtacagacgcgccaactgcaaaacgtgatccaaacgggtgcaaccggccgttttcatgttgttgcgcaacatttcgacaaacggttcgtaagcggtgtctttcaacgctttcggtttaaagcccatcacgtcccaattctggccgttcggcgacagaacgtcggcgggcgcgccggcggaagccttcatatacagatccttgcatccccatccttcaaatccgaacggagcggaaccgacggcgatatcggtatataaaccgattttcataccgctttccttgcaggttttctgcacattttccatctggttcagcgtttcaaactgcagataggtgtagaaaccgacgcggtctttgttggcttcggcgaacgccttgacttccggcgttttggaatcctgatattccttcggccaatcgcgccagtcggtcagtttcggttcctgcttggcgaagtgttcgcacagcgtctggaacaccgcgaaatcctgcaggcgctccccgccgtcgcgtttaaacgcttcaaatttttccttgcgttccggcgaaccgtttttcacgaactggtcgtagcatttttccaaaacgggcgttttcaattcaaacgcggccgtgtaatcgacatcaacgccgtcctgcgctttgcgccgtttcgccgtgtattcgggcgaatcgtacaaagccgtggcttctttgctctgttcaaactcgggaacggccgtcacgtcaacgtaaacgtggttgaaataggtgcggctggccggcgaatacggggaagcttcctcggccgcttcggggaacatggcgtgcaacggattgacgcccagaatgcccgcgccgcttttgccgacggtgtccgcgatttccgccaaatcggaaaagtcgccgatcccttggttttcatcggaacgctgttcgtacagctgaacgggaacgccccacgccttgccaccgtccttgatgtcgatcgggtcgtagcatttcgtcggcgcgtagatcatgcgggtggacgccttgggctgaccgggaatatccatttccagcgtgtggtatccgatatcgaaatcggccggcattttgaatccgcgtttttcgtatttgacgccgttgacttcgcgcaccatcggcttaccctcgtcgtcatacttcaaataagtatcggcgattttaacggaaccggcctgcgtgttgccgttttcctctttgaccgaccagttcagctgttcgttatcctttccggcgggaacgacgaattcgacctctttttcgcggtctttgcgcatcacgcaaacgggccccagcggggaagcgtactgcgcgtccaaagccttgttcaacgtttcgttgatgtcgcgggcgtattcctgatcggatttgtcgccctgcggtttcaacacgtccagcgcgatcagcagagactgtttgttttcaatcgtcgcgtagctgtcgatgcccgccatgacggccaagcgatgcaattcgtattcatttaaaatagccatttgagacctcgtaattgaaccgttaaaatctgattagttagaatagtatgacatctttttcggattttccagttttttttggaaaaaaatcatttttccggaaaaaatattcaccgcagtctccggccacaacgacagccggctcggccgccgccgttttttatgaattttcaatcggatgcaacggatttcttagctttttcaccgcccgcaaaagccctttccgccggataaaacgccgcaaaacgcgtcaataacagccgcaatcgcaaaaatatagccgtaaaaagtttccggaaaggataaaccacacaattttatgtcgttttttcaaaaacagactcggaatcgcccgccggttcggaatttcgcgccgcctcaaacaacgccaccaacccgtcgtgccccttttcccgcgcgatcgacgccgccgtccggccgccgtaaacgggcgcgaacggatcggcacccgcgtccagcagcaaaaccgcgattttttcatatccgcgcagcaccgcgtcggccagcgcctcgtcccgcgttcgggcgggagtcgtcagtaaaaagcgcgcgctttcctcttttccgtgcgcggccgcgccgatcagcgcggcatcgacatccccgccgacgtgttcataaagataacgcaccgtcgccgccgttccgaacgaagccgccgcgacaaccgcccaatcgtcccgcgcgccgctttgcaccaaacattcgaccagcgacagccgccccaattcggcggcattgcgcagcgcgccggccagatcggcgggattcgcatccggaatcgcccgccgcagcgcgtccaaatcattgtttttcacggcctcgaaaacaccggtcacaaccatttctccgtactcaacggttcaagcttaaatcaaaacggaaagaaatcaacaaaccccgccgttttcctgtaaaaaaaagcgtcatttcgttgacaaaaaacgcgaaatgtgaaaaaatgaggataagaaaagaatttcttggaaagaacggtgaatagaaatgtcatctgcgaaggtatcttcaagcgcgcccgtagggcacacggcgccgaccgttaaattgaacggcgtccgcgcggcatcccccgcgtcggtaagcgcgtccatatccgctttgaacgattcgaccaacgtcggcacatccacggatcaatacctgcccgcgggcgatgacgcggccgttcccgttttcgaccaaaaaccggcggaagacgaacaccccctgccccgcgcgtctttgaacgacgacgcggccgcgcggatcgggttgcagtttatggaacacggcgcgccttttttcaccgttcaagaggttgaacagcgtgtcgaaacctatgaacgcacggcggaacaatccgacgagccgctgaggaaaagaacgcagggtttcggatagaacgggaaaggagcgcgccatgaaaatcgcatccgccgctttgtcaggcatccgttcggcacaaatccgttttgaaaacagcgcgaatcgcatcgtcagcgcctctttcgcgcccgaaacgtccggtgaaccggccgcaaatcccgtcaacggagtgcgggaaaccggcatcccgtcaaccgctttcatcgccgcggaggacgtttacacgcaagaggccgtcaatatgacaacggccgttttcgcctacaaggccagcatttccgcctttaaaacgtgggatgaaacgacgcgagaaaccgtcgccgccctgtccgtttaattttttttcaaaaaagtaaaaaaaactattgacctgagcgcgaacgggctatatgttgcgacgtgttaagggcgtgtagctcagctggtagagcacttgacttttaatcaagtggccccgggttcgaatcccggcacgctcaccaaaaaaaccctcgtgatcaatcacgggggttttctttcgccggaacgcgcacgaaatcttatccggaaattttatattgaaaaatatgaaaagactgatattttaacaagtgggtccatagctcagttggttagagctgggcgctcataacgccttggtcgggggttcgagtccctctggacctaccaaaaaacctccccgttcgggaggttttcttttcgttccggcgatttagggcggccgtgccgcgcgcgggatgcttccagctaaaaaaacgcgggacgattttaaattaaaaccattccgcgcttttgcttttattcaaaccgaccggcgtcaaccgatcattttttccaaaacgtccgcgaccggatccaaagcggcggtgtcgatttcctccaccgttccggcgtcgcacgccgccgcgacggcggggtcgatcggcaaacgcgccgtgtgttcgattccgtattcgacggcggtctttttcaaatgcgatttgccgaagatttcgtattcccgtccgcaatcggggcatttgaaatacgacatattttcgaccaaggcgaccacggggatgttcatcatcttggccattttcacggctttgccgacgatcatcgaaaccagttcctgcggcgaagtcacgacgacgattccgtcaaccggcagggattggaacacggtcagcggcacgtcccccgttccgggcggcatatcgacgaacatcatgtcaacgtcgccccaaacaacatccgtccaaaactgacgcaccgtcccgccgatgacggggccgcgccacaacacagggtcggtgtcgttttccaacagcatattcaccgacatgatttcaatgccggcgtccgtttcggcggggaatatccccttttcattgccgaacgccctttgcgtcacgccgaacgccttggggatcgaaggccccgtgatgtcggcgtccaaaaccgccgttttacgcccgcgccggttcatcgcgaccgccagcatcgacgttacggacgatttgccgacgccgcccttgccgctgacgacggcgatcacctttttgattttgctgtcggcgttcggggcgtccttttgaatttccttgcgttccccgcatttcgcaccgcattgggaacagttgtgattacattccgtcataaccgaatctccgttgtgtttttaatgttcatagcccgatcgcggcgcgccgtcaaccttttgacgtttcgccgcggcgcaaaaagaaaggggattttcatccccctcctttaattttatcatcagtgacagcggatgctttcgtccgcatcgtcctcctgccccatcaaagcctgcttcgctttggccttgttttcctcttcctcctcgttccattcgatcgggatcaaaggacggatcaaagcgcgtttcaggacttcctcggcgttggaaacggggatgatttccattccctttttcacattgtcgggaatttcctccaaatccttttcgttttcctgcgggatcaagaccgttttaatccccgcgcgcaaagccgccagcaacttttctttcagcccgccgatcggtaaaaccttgcccaacagcgtgatttcaccggtcatggcgatgtctttggatacggggatgcccgtcatcgcggaaaccagagaagtgcacatcgcgatccccgcggacggcccgtccttgggcgtcgcgccttccggcacatgaatgtggatgtcgcgtttgtcgaacagatccggacggatgccgaattgcaccgcgtgcgaacgcacgaacgaccgcgccgccgcgatggattccttcatcacgtcgcccagctgccccgtttgcgtcacgcggccgtggccgggcatcataacggcttcgatcgacaggatttcgccgccgacttccgtccacgccagccccgtcgtcacgccgacctgatcctgtttttccgcgacgccgtaagtgtaaacggggatgcccgcgtattttttcaggttgcgttcggtgacggcgacggattttttattcgtcgtcatcaactctttcgccgccttg

SEQ ID NO: 997 - DNA, 11216 bp, synthetic construct
  source 1..11216: mol_type = other DNA
  misc_feature 1..11216: note = Synthetic
accccaccctgcctggccgcgccaacacggccattggcggcagcagcatgggcggtctgatggctttgtacgcggccatccggttcaatggcgttttttccaaagcggcctgcgtttcgtcggccatttctttctgcagaaaggagctgcgcgaagccattgccgaacaagatttcaatccggatacgaaagtgtttctcagttggggaagcaatgaaacccgttcggcaaagggaaaggcgattatgacatcctgcaatcgttccatgaacgaccgtctttacagaaaaggcgttcagccctatctgttccggcaggaaggcggtggccattgcgaagccgactgggcgcggcaggttcctcttttcatgaactggctctggctttgaaaagggtctcggaataacagaacgccccttccggctttgcgggccgaaaggggcggaaaagtgtccgaaaggtcttatccttcttttttccggtcgaacgtttcgctgataatggcgtacatcatgggaacgaaaatcgttgcgatgaaggtcgagaaaatcatcccgccgatcatgcccgtaccgatggcgtgacggctgcccgaaccggcccctgtcgaaagggccagaggcatgacgccaaacgtaaatgccagagaagtcatcacgatcggacggaaacggagtttcgcagcttctaccgcggcttcggcgtaagagaggccttcgtccgccttgatgacggcaaattccacaatcagaatcgcgtttttcgccgccaggccgatcagggtgaccagcccgacctggaaatacagatcgttggccaggccgcgcgcccatgtcgccaacaaagcgccggcaatcgcaaacggaacggacagcagaacgacaaacggcaaagaccatttttcatactgcgccgacagaatcaggaaaaccataatcagaccgaaaacaaacgcctgtgtactggatccgccggccagcttttcctgataagccgaaccaatccaggacagcgcgtaatccgtgcccagaacgttgtccgcgatacgctccatttcggcaatcgcctgacccgagctgtagcccggcgccggatcacccagaactttcgcggccgggaagatgttgaagcggttgatcagttccggacccgcgatacgttcaacagacaccagcgtatcaagcggcaccatggcgccggcgtttgatctgacgtatacatagtgcaggtcgtccggcgaacggcggaaatcagcttccgactgcagagtgacgcggaaattgcggccgaaataggtgaagtcgttgacgtacaggctaccgaatgtcgactgcatcaccgtgtaaaccgaattaatggggatattcattgcccgcgtcttttcccggtccagattaatgcggtactgcggtgtggccgtcgaaaatgtcgtccggacacccgacaggacagggcttccggatgcctcggccaggaattcgttcgttttgttcatcagctcgtcatacgtctttccggacttgttctggatataggcttcaaagccgccggtcgtgctcatccccatgatcgggggcattgaaaaggcaaaaccgatgccgtcggggaacgacattccctcggccgtgaactttttaaccagtgcgtcggcgctttgctccggggttttgcgttgctcccaatccttgagaatgacaaagctgatgcctgaataggtcgactgcgacgatgaaagcatgtcaaagccgttaatcgtcaggacgtcggttacgttcgggtctttgcccacaagagccgagactttgtccgtaaacgcttcggtgcggggaagggaagacgcgcgcggcatctgatacgaaataagcaggttgccctggtcttcgttcggaaccagcccgcccggaaggattttaaacagcccgataatggacgcgacaatcagagcaaaaacaaaaagggcctgaaaacggtggcgcaggaaataacgcaccatggaaacatagccgtttgtcagtttttcaaaaaacaggttgaacgccttgaaaaaaccgccgggctttttgggatgatccttgatcagcagagcgcacaaagacggcgtcagagacagggcgacaaaggcggaaattaaaacggacacggcgattgtgacggaaaactgtttgtacatcacaccggtcatgccgcccagaaaggcaatgggcagaaataccgatgacagcaccagcgcgacggcgaccaccggaccggacacttcccgcatggctttaatggcggcttcgcgggctgtcaggtgttcttcgctcatcaggcgttccacgttttccagaacgatgatcgcgtcgtcaaccacgatgccgatggccaaaatcaatccgaaaagcgtcagaaggttgattgaaaagccaagcgcatacattcccgcaaacgcgccgataatcgagaccggaaccgccagaatcggaatcagcgtcgcacggaaattctgcagaaaaaggtaaacaaccagaatgaccaggataacggcttcaaaaaacgtatgaatcacttcattgatggagacattgacgaaaatggtcgtgtcatacggtattgagtacgtaatgccgtccgggaaatttgcggaaaggcgttccattgtttcccgcacctgacgcgagacttccagagcgtttgctccggattgcaggtaaatggcaaaggcgacggcctcttcgccgttgaattttgaagaaacgctgtagtcctgcgatcccagctctatgcgcgcgacgtctttcaggcgcagaactgcgttatctcggttcgttttcaggatgatgttgccgaattcctcttcatccaccagccgaccttttgtattgacgctgtacgtgtacggtgtgtcttcgcgcatcggttcttcgccgaatttgccggccgcaaactgagaattctgttcctgcaccgccgagatgacgtcaaccgaggtcagcccgtgcgccgccagtttttccggattaagccagatgcgcatggaatagtcctgcgtcgcaaacaaagaggcgtcgccgacgccccggatgcgcttgatttcatccagaatgttcagaagggcatagttgctgacataaacggtgtcatactgttccgaggttgacttcatggccacaatctgcaggatgttatttgatttttcctgcacggtcacgccctgcttggtgacttcggaaggcaggttcgacatggcgctctggactttgttattgacgtcgattgtcgcctggttcgggtcggtgccgatttcaaaaaccgcgccgacggtcagatagccgctggccgttgccgtcgaatacatgtaaatcatgttcttgacgccgttgatcgcctgttccagcggcgcggccaccgtatcggccaggacgtctgccgttgctccgggataaaccgccgtaatctgaatttccggtgaaacaatgttcggatattgttcgaccggaaggactttcatggatacaagaccggcgatcacgatgatcagggaaagcacggtcgcgaagatggggcgctgaatgaagaattttgaaaacatggcgtattcctattcttcggtttcagaagcggtcggttcaggaggtctgacccggacgggcattccggcgcggagcttgacaaagttgtcaaggatgacggtgtcgccctcttccagtccctcatcaataatccattcacccgtttgggccgtatagcccgttttgaccggacgtacggcgactttacctgcgttgtcaacgacatatacaaacgagccttttgctccctgcaggacagcttccttcggcagggtgaaggccttttcgcgggtcagtccctccagcgtaacgcgcaggaactgccccgggatgatcttctgtccggggttggcaaatgtggcgcgcagtttcagtgtgcccgtggcctggtcaatcgagggattgacgaagttgatcataccgtcttcttcgtaaagcgaaccgtcggcaaactggactctggctctgatttccccgctgccgcgcgggttgcgaatcagccctttcttgatcatgtccgcgagccggaacagctcgttgtcagaagccgaaaagacgacatagatcggatcaacctgcgtaatcgtggtcaggaggctgttatcgccgagcgttgaaatcagcgtcccttcggaatggacttccatgctggtgattccgctgatcggcgcggtgacccgtgtgtattcatagttcagtttcgcatcttcgaaagcggctcgggcggcggcaatggaagcacgggtggaaagcacgcgggcttcggcgtcatcctgagctttgttgctggcgaaccctttttccccaagcgtttttgaacgctgccactgtttttcggcggccttcagatgggccttctgctgatcaagctgggctttggctttttccatttcgattttgtacggttcgcggtcgatttcaaacaaaagctgcccttctttaaccttggcgccttcgacgtaattccgtttcatcagaatgccgccgacgcgggcgcggacttcggtttccttggagccctgcgcttttccggtgtattcaaaggcaaggtcaacttcatggggcgaaacttcaacggccgtgacggtcagaggagtattccggggagacggcgcttctttctttttctggcatgcggggatgagagccagaaccaggacggcgccgcagatttttttcataaagggggtcatgtcgaattccattaataaaaaggcctttgcgtataaaatatcataaaaaggcaacggtacgaaattaaaataatgccgttctaattcaaaggcgatttttatacatgcctataatttgaaaaaccaaataaaacatattgaaataaaaggaattataatggcttcaaggccggagggattcttcggtgcgcaggggatacgcccggatgctttgcccggttccgcgccgacaaaataaaaaggggatgactaccctgtccgcagggacagatcgtcagagccccactctataatagattattatcgctccctttccaatacggacactgaataacaactattacaaagtacaaacatcttgccataaaatttataaaagtgcaaactgttttttataatcatgaaccggacaggagcatttaatgaaaaaacgtgttttcggatttgatgtcggtatttcatctttggggtgggcggtcgttgatattgatgatgataaggatcccgaaaaacaggaagaaatcaccggagagattatcgccgccggtgtccgtacttttccggaggcggaaaatccgaaagatggaaaatctcttgcaatgccgcgtcgtcagaaacgtctggcgcgccgtgtttgccgtcggaaagccctgagaaaaaaagatttgaaaaaactgttcgtcgaaaaggggcttgtcggggaaacggactttgttcgtaaaaacgtcccgcttgccgatgtgtgggatctgcgcgtccaggggctgagccgtcgcctgtccggagaagagctggctcgcgttttgctgcatctggccaagcaccgcggatttaaatcttaccgaaaggctcaggaaaaagaggaagagggcggcaaggttttggaggcgctgagtaaaaacaaagctcttttgtcggaaaatgaaaataaaaccctggcgcagatctttgtcgagcgcggcggaaagaaaaggaatttctgcagaacagtgactaaaaacggcacagagaaaacggaagcctgttttgacaacttatttacccgcgaagaaattatccgcgaagccggtttgatttttgaccggcagcgtacgttcgggtcggaattcgcttcacccgaatttgaagaggctttcggagagatcgctttccggcaccgcgaagttgatgtccagggtgtggaaaaaatgctgggcgtctgtccttttgaaaaagacgaaaagcgtgcgccgaaagaggctccgagcgccgagttctttgtcgctttggggaaaatcaattcaatgtctgtccttgaaggcgggcgaaaacgtcccttaacggaaggcgagcgcgccgctctgtttgatcttttgaaagcccggaaaaaagtcacatacagggatatccgtcagaaggttttcaactctccttccgaagacgatttccggttttcggatgtcgaatataacccgcggccgaaatatgacaaaaagaccaaagagcttattgtcaataagaaagcgccggaagaaaaagaattctattccttaaaaggttaccatgctttgaaaggtctgatcggtgaagcatacgatatcccgacgcaggataaaatcgtcagcgtgattgccattcagaaaaacgataaaaacattgaaggtcagctcaaagagctggggattcatccggacgatattgaaacactgaagggtgtttctttttccaaattcatcggtttatctttgaaagccgtatacaggcttttgcctgaaatggaggcggggaaaaaatataacgaagcctgtaaagccgtcggatacgatttcaaatcaaccggagaacccttctctcgggaaaaagggcctttcctgccgccgatacctcagaaactgttgacgagggttccggttgttaatcgtgccgtttcgcagttcaggaaggtttataacgccatggttcggacctacgggactccggatcagattaatgtggaaatggggcgggatatttataacaacgctcaggacagaaagaagatacaaaaggcgcaggaggagttccgggagctgaaagacgcagcccgccagaaagcggaggaacgtctggggtacgggaatgtgtctttgaaagtcctgttaaagttccggctgtatgaggaacaggatggaaaaagtgtctactccgggcgttccattgatttggatcgtctggcaaaagagccggattactgcgacgtggaccacattattccgtattcacgcagtcttgacgattccctgaataacaaggttctgtgtttttcttcggaaaaccgggaaaagtcgaatcggacgccgctggaatacctgccggtcgaaagtcacgcggattttatcggccgggtcatgagcatgaaaggaattaaaagcgccaagcgagaccgtctgctgattgaaaatttcagcgccaaagaagccgaattccgggaacggaacatcaatgacacgcgctatatggcgaaatatctgattaaatatctggatgactgcattgatttttccggatcttcggccatcctgaaagaccgtgtacagtcccgcagcggcggattgacggattttctgcgttatcagtggggactgaaaaaagaccgctcggaaaacgatcttcatcatgcgcaggatgcgattgttattgcctgtgcgacaaacggctacaccaaatatctggcgcatctgtcgaagatttttgaaaacaaacagcggtatgccgaaaaatatggcgaagcctggtacaaggcgtttaagcggcatctgaaagcgccctgggacggtttttacgaagatgtgcaaaaggcgctggcgaaaatattcgtttcccgttcaccgcggaaaaatgcgacgggagaattacataaggagacaatatgtacactgaagccctcgtccgggaaatttaaagaggaaaacgtaaagtcaggctttaaaattcgcggaggcattgccggaaacggagaaatgctgcgcgttgatgtcttttccaaaaagaataaacgcggaaaggaagaatattatcttgtccccgtttacctgaaagacatggcggccaaagtgcttccgaataaagcggtcgtggctggtaaacctgaggaggaatggctggagatggatgaatcatatgtgttcaaattcagcctttttcccgatgatttgtgttttgttcaaaagggggagaagataattttcggttattacaagggagctaatcgggcgacagcttcgattactcttgaaggacatgacagatcatttatgaaggaggggatcggcgtaaaaacacaggacaggataaaaaaattccaggttgatcctttagggcgttacgtcgaggtgaaatccgaaaaacgcttgcctctgaagccgaaatccgccgaacagaggcggcgggaccgttggaaaaatgatttttataaaaaacatccggatacaaaataatgggctggcgaattcttcaaatgacaagcgcctgcaagctttccgttaaaaacagacagctgcggtacgagccggaggaaggagaggctctttctcttccgttggaagatatttctgttatgatgctggaaaacagaaatattcttttgacgggagctttgctgtctgaattggcggaatacaatatctgcctgttttcctgtgacgggtctcatatgcccaacggtgtttttacgccgtatctggcgcacagtcgttatgccgcagttgcttcaatgcaaatcgcttcttccgagccgctgaaaaaacggctttggcagaagattgtccgacggaaaatcgaaaatcaggccgaggttttaaagcgtttgaatcataaaacggcggataagctgatacatattgccaaaaaagttcaatctggagatcctgaaaatgccgaagcgtatgccgccggtttatattggaaagcggcttttgatgattttaaacgtcatgaagaagatataaaaaatgccgctctgaattacggatatgccgtattgcgcggatgtgtggcccgttacgcggtttgcgcgggtcttataccttcttttggggttcatcataaaaaccagctgaacgcatataatctggccgatgacctgattgaacctttccgtgcttttgttgactggattgttttaaatcttccgcttgaaactgagattttaacccgggagacaaagcaaaaattgatttccgttctgacgaaaaactgctcttttgaagaggaagaaatttcgattttaaatgcaattgaaaggacatgtttttctctggtgaatgcttttaaggaaaaagacgcatctcccttgtctcttcctttattttcaaaagtgcctctgtttgaataatgagcgcgacggaggaaagatatatgcgtcttattctgttttttgacttgccggtcaaaacaaagacggaacgacggattgcgaatcgctttcgacgcgatttaatcaatgacggctatatgatgctgcagctttctgtttattcacgaatctgcaaaggagagcagacggttgaaaaacataaaaagcgtttaaaaaccttcattccggagcacggaaatgttagaatactttctgtgacggaaaagcaatacgcttccatggaaattttgattggttcgccgaaaaaagaggaaaaaatcggatgcgaacagcttcttttgctttgaaatttttagaaagaaatgcaaaaagcccttgtttttcaagggcttttttcgttgccagtatagcatatcagtattggaaaggaagcgataactttattacgttgtgagtgaatttattgaatagtatagcatatcagtattggaaaggaagcgataactgcgcggcaataaagctgtcccacgttatcagtatagcatatcagtattggaaaggaagcgataaccaatttacgccaacactgaccagtctgttgagtatagcatatcagtattggaaaggaagcgataacctggatacggactacatctctttgattttaagtatagcatatcagtattggaaaggaagcgataacctgtatacggactacatctctttgattttaagtatagcatatcagtattggaaaggaagcgataactccttgctgtggcgttttttcaatcgtcacagtatagcatatcagtattggaaaggaagcgataacacagcgcatcggcattaaaactgcgattctagtatagcatatcagtattggaaaggaagcgataacgaaagacgtttcgcatatacctcatactgaagtatagcatatcagtattggaaaggaagcgataacacttcgacggcgttttcgtaatgtttcgctagtatagcatatcagtattggaaaggaagcgataaccccaaagcctccgtctgtaaagtgctttgcagtatagcatatcagtattggaaaggaagcgataactccttagggtatttttcgcctgttccccaaagtatagcatatcagtattggaaaggaagcgataacgaagttaaactcgataacatccagtaagaaagtatagcatatcagtattggaaaggaagcgataactatccctctttgttggctatgtcttcaacaagtatagcatatcagtattggaaaggaagcgataacatcgtccagcagggtaaatgtcgtaatagaagtatagcatatcagtattggaaaggaagcgataacagatccggtcaccggttttctggcgcgttaagtatagcatatcagtattggaaaggaagcgataacactacaataaaatcggccataacatttttagtatagcatatcagtattggaaaggaagcgataaccattgttgtctcgttaacatgcggcacgaagtatagcatatcagtattggaaaggaagcgataacgttcaatggtatgaacttggcgacctgcccagtatagcatatcagtattggaaaggaagcgataacaaagtctgctgaggtctaaaattcaacacgagtatagcatatcagtattggaaaggaagcgataacataggggggattataccacatagagcaaacagtatagcatatcagtattggaaaggaagcgataacactccagtcctctttatattcacaaaattcagtatagcatatcagtattggaaaggaagcgataaccaaagtgatggagatcgtttattccaattaagtatagcatatcagtattggaaaggaagcgataacttattcgagcgacgcaagcggtcaatcttaaagtatagcatatcagtattggaaaggaagcgataactcatcaacaccaatttcctcttcatcataagtatagcatatcagtattggaaaggaagcgataactaaagagtgtgtggcgagaaagggggaatgagtatagcatatcagtattggaaaggaagcgattggcgttgtccccgaaaactggtacacaaggaattagagtctgttaaaatgtaaa

SEQ ID NO: 998 - DNA, 6827 bp, synthetic construct
  variation 6588..6707: note = n is a, c, g, or t
  variation 6177..6194: note = n is a, c, g, or t
  source 1..6827: mol_type = other DNA
  misc_feature 1..6827: note = Synthetic
gggaagccgagccgaaaaaggaaaacgtcgatttgatttgtttcgacggcggacggtgcgctttggacgcgaccggcgcggagcggggcgtttatctgcgcgcgggcaaattcaaacattcgtttttttcggacggcgcgccgttttggcggtttgacgcgaatgccgatctttaccggacgtcgaacgcgcgcccgatgcaggtttatttcaccgcgtttgacaaaaaagggcgggcggtcgcgaaacaatatttcgatttcacgctggaagggtggaaaaaagtcggaaaagccgtcttcttttcgccgtcgatgacgacgcgcggcaaaaaaaagtgccgtctggaaaagctgttcggcggtgtcaaacactatgattgcggcgcggaaacgctgagctttgaaacaaaaggctttgtcggcgacgtcgacagggtgttcgtttccgtgggggtgagggcgaaatgaaaagaatcgttctgttgttgatttgcgcgggcgcgaacgcttgcgccctgctggaaaaggtggaaaaaacgcaatatgtgtgcgtcgattcaaacgtgacggcgaccttgtccgtcaacggcgaaatcgtcggcgaaacgcctttttgcggaaatatcccgcgcggattgacgacgtccgcccgattgaaggcgcggggataccgcgatgcgaaagtgccgctggaaaagaagttgcaccggaacgtcgcggcgacgtcgaacgcgtcggggctggcgtcgtcgacggctgaaaacgcgctttccttgtttgttccgacgggattggatttgtcttacacgtcgcaggggcgctggatcgaatacatgcccgacagctactttgtcgaactgactcccgccgatttgaaacgggcggaagttgactcgcgcgatttgaaaatcaaggcgttcgcgctgaaaaacttttattccgtcaaagcgggcggggcggaacaaacggcggctttggcaaaactggcggatctgtccgaacgcgccgtcgctgtggaggcgctggaacaaacatcgccgtccgcgttcgcgctgaacgtcgccgaaaaagcaagggagggcggacaatgacgaaacgggcgattcttctgggcgcggctttttttctggtcgccgtttttccggcgcgcgccgcctggttttgcggcatgcgcaaaaacgtgtcctgtttgactgaagccattgacgaaggcaatctttcccgcgtcgtcaaaaatttgcgggcgggcgtcgatccgaacggcgaagcggacggcgtgacgccgatcgccgcggcgatcaaggcgaaaaatctttccgccgtttccgaattactgaaatacagtgttgatttggaaaaagaagcgtgcgcgagcggaaacgccttgttctgcgcgctggatcgttttccgcccgcgatggagccgctgttgcgagcgggcgcgaatccggacgcgacaaacccgcgcggcgatttgcttctgacccgcgccgtgacgggaaacaacgcgttgaaatatcagttggcgaagacgctgttgaaacacggcgcggacgtcaataaacgcgacggaaacggaaacacgcctttggcggctgttttaaaatggggcggatcggcggacgtcatgcgctttttattgaaacacggcgcaaatccgaatgttcgggtcgacggaaaaacgccgttgttcgcttatgccgttctgaacgccggaaatttgaaaaaagcggcgctgttgaaaaaattcggcgcaaacgtcaacgctcttgatgcggcgggacggacggtgctgatccgcgctttggaaaagggaaaattgacggatacaatcagttttttgctgaaaaacggcgccgacgccaacgctcggtcggcggacggcggaacgcctttgaacgcggcgatcgaggctgatgcgccgaccgtccttttgaataaactggtcgcggcgggagcgaaagtcgacgccgtcgacgcaaaagggcggacggcattgatccgcgctttggaaaagggaaaaccgacggaaacaatcgactttttattgaaaaaaggcgcggacgtcaacgcgcgggcggcaaatcgtcaaacgcctttgctcgcggcggtcaaagcgcgggcgccggacgcggttttgaacaaactgattgcggcgggtgcggacgtcaacgccgccgacgccgacggcaacagcgcggtcgcgcacaccgtgaaaacgcgggaaacggtgacgcggaaactgaacaggctggatctgctgcgcaaacacggcgcggatatgagcgccgtttccggcaaaggcgaaacaatcgccgatttgttgcgggcgggaaacaaagacgtcatcgcggacgggcgttattgggaattgttgaaaaaagtaagcgcggggaattaatacttttgttgtataaaattaggggacggctaccccgatacaagaccggatcgccgttgccccactcgaaatttatcgattattatcgcttcctttccaattaaaacgcaaataatcgttcttttcgacgaaaatgatattgccataaccgattttatgagtcaagctgaacttaaaactatttttgatagaggcggttatggaaaaaagaattttcggttttgatatcggtatcgcgtcgctggggtgggcggtcgttgatttcgacgacgcggcggatcctgaaaacaacatttacccgacgggaaaaatcgtcaaatcgggcgtacgctgtttccccgtggcggaaaatccgaaagacggcagttcgttggctttgcccagacgtcaaaaacggttgctgcgccggttgtgccgccgcaaagccagacggttgctgggaataaagcgtttgttcgccgcaagcggcttgattgacgaaaaatccctgtttgacgaaaaaagcaatatttacaaagcgcgcggcaacgacgacgtttgggatttgcgcgtcaaagccttgaccgaaaagctgacgacggtcgaatttatccgcgtattaacgcatttggctaaacaccgcggatttaaatcctatcgcatcgcggcggaaaaggcggacgccgaaagcgggaaagtgcttgccgccgtcaaagcgaacagggatttgctggaaaacggcaaaactttggctcaaatcttcgtcgaaaaaggcgggcaaaaaagaaaccggaaagacgaaaagggaaatccgacttacgccaattcgattccccgcgacgaaatcgaacgggaaacgcggctgattttcgaacgtcagcgcgcgttcggtttagaggcggcgaatgaaaaactgcaacgggatttcgaacgaatcgctttccgtttccgcgaaatcaaaagcgaagacattgaaaaaatgatcggcaaatgccagtttgaaccggatcagccgcgcgcgccgaaaaacgcgccgtccgccgaatttttcgtggcgtggacgaaaatcaacaactgccgcgttaaagagtccgacggcaaaatccgttttttgacgcaagaggaaaaagaaacggttttcgatctgttgaaaaatcaaaaggaagtcaaatattcagctttgaaaaaggcgttgtttgccaaacgtccggacgttcaattcgccgacgtcgaatacaatccgaaacccgtttatgataaaaagacgggcgaggaaatcaaaaggaacgaaaaccccgaaaaccagaaatttttctctttaaaggggtggcacgatttaaaaagcgtcatggacgtttcagcctgttctgttgaaaagctggataaaatcgcaaccgtcatcgccacgcgaaaaaacgacgccgatatcgtcaaaggattgaaagagcttgatttgccggatgcggaaacggaaaagctgacgtctctgtccttttcaaaattcgtccgcctgtctttaaaggctttgtacaagattttgcccgaaatgcaaaagggactgaaatacaacgaggcttgcgaacgcgtcggctacgatttcaaatcgacgggggagagcttcgccgcgcaaaagggaaaattcctgccgccgattccggaatctttggcgacgacggttccggtcgtcaaccgcgcgatggcgcagttccgcaaggtctacaacgcgttgacgcgcgaatacggaacgcccgatctaatcaatgtcgaactggcgcgcgacgtctacaacgatcatgacgaacgcaaaaaaatcgccgaaaaacaaaaggaatacggcgaagaaaaggaaaaagccagagccttggcgcaagccaaaacgggcatcgaaaacataggcggtcgcgatctgctgaaattccgtttgtacgaacagcaggacggcaagtgcgtttattcgggcgaagctttggatttgcggcggctgacggaacaggattactgcgacgtcgaccatatcgttccgtattcgcgttcgctggacaattcgcaaaacaacaaagttttgtgcctgtcgcgcgaaaacaggcaaaagtcggacaaaacgccgctggaatacatcgtcgatcccgtcaaacaggtggaattcatcgcccgcgtcaagtccatgaaaggactgggcgcgaaaaaacgcgacagactgcagatccgcgatttcgatgaaaaagaacttgaattccgcgaccgcaacatcaacgacacgcggtatatggcgcgctatgtcatgaaataccttgacgactgcattgatttttcaggcggtcaaacggatatcaaagaccatgtgcaagcccgcaacggggcgttgacggactttttgcggcatcaatggggattgaggaaagaccgtaatgaaaacgaccgccaccacgcgcaggacgcgatcgtcatcgcttgcgcgaccaacggttacacgcggtatctggcgcatctgtcgaaaatttttgaaaacaagcaattctacgcccaaaaacacggcgaagcgtggtacaaggcgttcaaacagtgcgtcaaacagccgtgggacggtttttatcaggacgttcaggcgtcgctggcggaaattttcgtgtcccgcccaccgcgcaaaaacgcgacgggggaggcgcatcaggatacgatccggacattgaatccaaataagccgcaatacagcgaaaaggacgtcaaatcaggaataagactgcgcggcggattggcgaacaacggcaatatgttgcgcgtcgacgtgttttctaagaaaaacgccaaaggaaaggaacagttttatctggttccgatctatctggcggacggggttaagtccgaattgccgaacagggcgatcgttgcaaacaagcctgaaagcgaatggatcgttatggacgaaacgtacgcgtttaaattcagtctgtacaaggacgatttggtgaagattcaagcagacattatgggctactatgttagcacgcatagaggaaccggagccattacaataacagctcctgataggagccaaacatgggcgggcttgggtgtgcgcaaccttgaatatatcaaaaaatatcaggtcgatcctctgggacggtacgtcgaggtcaaatcagaacaacgtctgccgctgaatatcaaaaaaggaaaacgctgatggcttggcgcatcgtccaaatcacttccgcctgcaaactgtccgttaaaaacagacagttgctgtacgaaccggaaaacggcgaaagcgtcactctgccgttggaggacgtcgccgtcgtcattttggaaagcaagcatatcttaatgacgtcgacgttgctttccgaactggcggaatacggcgtttgccttttttcctgcgacgggacgcacacgccgaacggcgtttatacggctttcggcgctcattccagacacagcgaagtcgcccatttgcaaattgaagcttccgaaccgctgaaaaaaagattgtggcagaaaatcgtcaaagccaaaatccgcaatcaagccgaagttctgcgccgcgtcggaaaccgtttttgcgacaagctggatgaaatcgccaaaaacgttcaatccggcgacgcggcgaacggcgaagcgttcgcggcgggggtgtattgggacaacctgtttgaaaacttcaaacgtcacgacgccgacatcacaaacgcggcgctgaattacggctacgccattgttcgcggcgccgtagcccgcagtttggtcggggcggggctgttgccctgtttcggactgcatcatgcnnnnnnnnnnnnnnnnnngaacaatctgaacgcgttcaatctggcggacgacgtgatcgaaccgttccgcgcctttgtcgactgggcggtcgtgaaattcgatctgtgcgaaaaagaccggctggaaaaagaagacaaacagcggctggtcgccgttttgacgcgcaactgttcctttgacggcgaagaaacgacgattttaaaggcggtggagcaaacggcgtattctttggtgaacgcttttcgggacagagaggcgcgctcgctcgtcctgcccgaattttcaaaagccccgttgttcgagtgaaaaaatggcggcgctgggggaaagatacatgcggatactggtctttttcgacctgccggtcaaaaccaaagccgaaagacggcgcgcgactcgattcagaaaagnnnnnnnnnnnnnnnnnnnnnnnnnnnnnnnnnnnnnnnnnnnnnnnnnnnnnnnnnnnnnnnnnnnnnnnnnnnnnnnnnnnnnnnnnnnnnnnnnnnnnnnnnnnnnnnnnnnnnnnnaaaaaacggctgaaatccttggttccggaggcggggagcgtccgcgttctgtcggtaacggaaaagcagtacgccgctatggacattctggtcggaacgccgaaaaaaacggaaaaaatc

SEQ ID NO: 999 - DNA, 5302 bp, synthetic construct
  misc_feature 1..5302: note = Synthetic
  source 1..5302: mol_type = other DNA
gaagttcccgcgtcgtcaaaaatttgcaggcgggcgtcgatccgaacggcgaggaggacggcaacagcgtggtcgcgtacacggtgaaaacgcgggaaacggtgacgcggaaactgaaccggctggatctgttgcgcaaacacggcgcggatatgagcgccgtttccggaaaaggcgaaacaattgccgatttcttgcgcgcggaaaacaagaacgtcatcacggacgaacggtattgggaattactgaaaaaagtaagcgcgggaaagtaatacttttgtcgtataaaattaggggacggctaccccgatacaagaccggatcgccggagccccactcgaaatttatcgattattatcgcttcctttccaattaaaacgcaaataatcgccctttcgataaaaaggatattgccataactgtttttatgggtcaagctgatattaaaattatttttgatagagggtgttatggaaaaaagaattttcggttttgatatcggtattgcgtcgctggggtgggcggtcgtcgatttcgacgatgcggcggatcctgaaaacaacatttatccgacggggaaaatcgtcaagtcgggcgtgcgttgcttccccgtggcggaaaacccgaaagacggcagttcattggcacaacccaggcgccagaaacgattgttgcgccgattgtgccgccgcaaagccagacgaatggcaggcatcaaaaatctgtttgttaccaacgggttaatcggaaaggacgctttgttcgatgaaaaaaacaacatttacaaggcgcgtgacaacgccgatgtttgggatttgcgcgtcagggctttgaccgaaaggctgacgacggttgattttatccgcgttttaacgcatttggcaaaacaccgcggctttaaatcctaccgcatcgctttggaaaaagaggacgctgaaagcggaaaagtgctggaagccgtcaaggcgaacagggctttgctggaaaacggcaaaactttggcgcaaatcattgtggaaaagggcggtcaaaagcgaaaccggaaagataaaaaaggcaatgcgacttatgccaattcgattccgcgcgatgaaatagaacgggaaacgcggctgattttcgaacgtcagcgggcgttcggtttggcggcggcgaatgaaaaactgcaacgggatttcgaacggatcgcttttcgttttcgaccgattgcgggagtcgacaagatgatcggcaagtgtcagtttgaaccggacgagccgcgcgcgccgaaaaacgctccgtccgccgaatttttcgtggcgtggacgaaaatcaacaactgccgtgttaaagacgaagacggcagatcgcgttttttgacgcaagaggaaaaggaaacggttttcaacctgttgaaagatcagaaggaaatcaaatattccgccttgcgcaaggcgctgttcgccaagcgtcccgatattaaattcgccgatgtcgaatacaatccgaagcccgtgtacgataaaaaaacgggtgaaatcaaagagccgcccacaccggaaaatttgaagtttttttctttgaaagggtggaacgaattaaagcgcgtcattgatgtttcggcgtatcccgttgaaacgctggataaaatcgcgaccgttatcgctacgcaaaaaaacgacgctgacatttccggcgaactgaaacagctcggtttgcccgattccgatatcgaaagactgcaagggctgcagttcaaggagtttattcgtctgtctttaaaggctttgtacaaaattctgcctgaaatgatgcgcggtaaaaaatacaacgaggcgtgcgacgccgtcggatacgatttcaaatcgacgggggaaagctttgccgcgcaaaagggaaaattcctgccgccgattcccgaatctttggcgacgaccgttccgacggtcaaccgcgcgatatcccagttccgcaaagtgtacaacgccttggcgcgtgaatacggaacgcccgatcagatcaacgtcgaattggcgcgcgacgtttataacgatcatgacgaacgcaaaaaaatcgaagcgcggcaaaaagagtacgctgaggaaaaggaaaaagccaaggctttggcgcaatccaaaacgggaattgaaaacatcggcggacgcgatttgttgaaattccgcctgtacgaacagcaggacggcaaatgcgtttattcgggcgaagctttggatttgcggcggttgacggaacaggattattgcgatgtcgatcacatcattccgtattcgcgttcgctggataattcgcaaagcaacaaagttctgtgtctgtcgcgtgaaaacaggcaaaaatcggataaaacgcctttggaatatattagcgatcccgtgaaacaggcggaatttatcgcccgcgtcaagtctatgaaaggattgaacaaagcgaaaaaggacaggttgttgacgcgcggttttgacgaacgcgaagttgaatttcgcgaccgcaacattaacgatacgcggtatatggcgcgctatgtcatgaaatatcttgacgactgcattgatttttcgcaaagcaaagcggcgattaaagaccgcgttcaatcccgtaacggggcgttgacggattttctgcgccaccaatggggattgcgcaaagaccgcgccgaaaacgaccggcaccatgcgcaggacgcgatcgttatcgcctgcgcgaccaacggttacacgcaatatctggcttgtctgtcgaaaatttttgaaaacaagcaggcttacgccaataaatacggcgaaccgtggtacaaagcgttcaaacagcacgtcaaacagccgtgggacggtttttatcaggacgttcaagcgtcgctggcggaagttttcgtatcccgtccgccgcgcaaaaacgcgacgggagaggcgcatcaggaaacgatccggacgctgaatcccgataaaccgcaatacagcgaaaaggacatcaaatcaggggtgaaaattcgcggcgggctggcgaacaacggcaatatgttgcgcgtcgacgtgttttccaagaaaaacgccaaaggaaaggaacagttctatctggttccgatttatctggcggacggaatcaagcccgaattgccgaacaaggcgattgcacagggaaaacctgaaagcgaatggatcgtcatggacgaaacgtacgcgtttaaattcagtctgtacaaagacgatttggtaaaagcgaaaggaaaagaattatatttcgggtattttgacgggtgtgatagggcgacgggaaattttcatattgaagcgcaagattcttctcaatattggaaagggttaggtccccgcaaccttgaatacatcaaaaaatatcaggtcgatccgctgggacgatatgtcgaggttaaatccgaaacccgcttgccgctgaacgccaaaaaaggtaaatcgtaatggcttggcgcgttgttcagattacttccgcctgcaaactgtccgttaaaaacaggcagttgttgtatgagccggcggacggcgaaaacgtcactttgccgttggaggatatcgccgtcgttattttggaaagcaggcatattttaatgacgtcgactttgctttccgaattggctgaatacgggatttgtctgttttcatgcgacgggacgcacacgccgaacggcgtctacacggctttcggcaatcattcccgccacagcgaagtcgcaaatttgcagatttcggtgtccgaaccgctgaaaaaacggctgtggcagaagattgtcaaagcgaaaatccgcaatcaagccgaagtcctgcgccgcgtcggcaaccgtttctgtgataaattggaagaaatagccaagaatattcaatccggagatacaacaaacggcgaggcgttcgcggcgggactgtattgggacaatctgtttgaaaatttcaaacgccacgacgccgacatcacaaacgcggcgctgaattacggttacgccattgtgcgcggcgccgtcgcccgcagtttggtcggggcggggttgttgccttgtttcgggttgcatcatgcgaacaacctgaacgcctttaatctggcggacgacgtgatcgaaccgtttcgcgcgtttgtcaattgggcggtcgtgaaattcgatttgtgcgaaaaagaccgtttggaaaaagaagacaaacaacggctggttgccgttttgacgcgcaactgttcttatgacggcgaagaaacgacgattttaaaagcggtggaacaaacggcgtattctcttgtgaacgcgtttcgggacagggaagcgcggccgcttgttttgccggaattttcaaaaaccccgctgtttgagtaaaaaaaatatggcggcgcagggggaaagatatatgcggatattggtctttttcgacttgccggtcaaaactaaagccgaaagacggcgagcgactcgattcagaaaggatctgatcgacgacggatacattatgttgcagctgtcggtctattcgcggatatgcaagggcgaagacaccgccgaaaaacacaaaaaacggctgaaaaccttggttcccgacgcgggaagcgtccgcgttttatcggtgacggaaaagcagtacgccgcgatggatattctggtcggcgttgcgaaaaaaacggaaaaaatctatgacccagagactacttttccttcgcctcaacctcatcatcaggccactcgaaagaatagagaatcgcctcgacctgtctgagatactgcctcttgtcatacttcggagcatacacgaagccgtcgagaacgatgatatcctttccgtcacggctatagaaggaatgtgaaacgaaaggaccgcccatgaaatcaccgaatacctcccacaatccgcgtgtctcggcgaactgacgtcccctgaaacggacaaacttagtctcaggagtagctatctcattagtaatcatataggtattgtcaaacattcccggcacgttctccttcaggaacttgtttctgtgcgcgataatgttctgctccgtgaaattctcattctctgaagcaggatacttgtaaacgaacactccctgtgtcgtgtactgcttgtcatcagaaatccagatgaaatcgtcagtcttcttccttaccctgtagccggtcgggaaatgaggggcaccgcctgtcatcgccttcacgacaggagcgatttctgcagcctcatatctcttggaattttcaatgatcctgtccctctcagcctgctcgatggcattgacaaccctctcgccgttctccttcaggagagtagccgcgtgaccttctgaccgcggattatcc

SEQ ID NO: 1000 - DNA, 23102 bp, synthetic construct
  source 1..23102: mol_type = other DNA
  misc_feature 1..23102: note = Synthetic
tgtgagatgatgggaggagtatatccctatcttttggagaaaaaatcttttgtaagctctcaatgcaagggagaggagcagagattttttgaaacgcttgagatgggaatgaatcttttcaaaaaagaattgcaaaacacttcagcagtcttcagtggagaagtggctttcaagctttatgatacttatggattccctcttgatcttactgctgatatgctcaaagatagtgggatagaggtagatgtggcagagtttgaatcttgtatgcaaaagcaaagagagttagccaaagcttcttggaaggggagtggtgatgaggcgagtggaggggagctaggcaaagtcgcttcacttccacaagagagtttaagtcgagcaggagtgggaagtgcggagagtgaaattgcaatgctctttgacaaagagggggtagaggtttcaagcctagtgggtgaagggtatgtaatgctagagaaaaatcctttttatgctcaaggagggggagctgtgggagatagtgggtggctatatgagggagagagcaagatagcagaaataaatgatactcgcaatttttttgggaaagaggtttgcaaagttattgctctaagcccactctcaactcatcaaaaagtgagtgcaagagtggatattgcacgacaacttgaaatcaaaaaacatcactcagccactcatcttctccatgctgtgctaagagaggtgctaggagagggcgtggcacaggcaggaagcttggtggaggaaaatcgcttaagatttgattttagtttccctagagctttgagtagtgaggagattgagagggttgagagagaagtcaatgctctcatcactcaaaccctcaaggctcaaattgaagaaatggggatagaagaagccaagagaaagggagcaatggcactctttggagaaaaatatggagagagagtgagagtggtgagctttggagatagaagctgtgagctttgtggaggattgcatattgaggatttgggaatgattggaagcttttttatcctcaaagagagtggggtgagcagtggggttagacgcattgaggcagtatgtggaaaggcaggatatgagtatgccctcaaagcccttagcacccttcaagaagccaaagaagctctaaaatctcaagatcttcttgcctcaatccacaaactccaagagcagattaaagagctaaaagaaaaaaacaaaaaactctctagcaattctaatgagctcaaagcagaagaaatcaatggggtaaaagtgattatctctttggtgcaaggagagagcaaggagatgattgataatctcaaaaacaaatacgaaaaagtcgtagcactccttatcagcgagaatgagggcaaaatcacaatcagtgcaggagtgaaaaacgcaccactcaaagcaggagtttgggtcaaagaaatagctcaaatcttggggggcaatggtggaggaagagatgactttgccacagcaggggggaaagattctagcaagattgctgaggcactagagaaagcaaaactttatgttagtcaaaatattataggataggataatgagcgtaggaattgtaggagttatgctttatatttccttgcttttgggatttatcggcttagtagcctttatctggggggtgaaaaatcatcaatttgatgatgagaaaaaaatgatgcaaggcgttctttatgatagtgtagaggatttgcaacttgcaaaagaaaaagaagataagttaaagggagaaaaaaatgattgatttagccattattggagtaggaacaacagggattgccacagcagtggaagccaaaagattgggagtgcaaaaaatcacgctttttgaaaagggcgaagagcattcaatgacaattagaaaattttataaagatggcaaaagagtagataaagactacaaaggacaagaggttgtgctaagtggaagtattgattttaaagatggagataaagaggggactttggctctctttgataaaatgattgcagatcatagtcttgagattaaatataaaagcgaaattgaatctgtgcaaaaaaatggagatatttttgttatccatacaagtggaggagagagctatgaggctaggtttgtagtcgtggctatcggcaaaatgggacagcccaataaaccaagctattctattcctttgcctatccgctctttggtaaatttcaatgccaatggtgtcaaagagggagaaaaactccttgtagtagggggaggaaactcagctgttgagtatgcttatgatttgtgcaatcattttgatacaacactcaattatcgccgaagtgagtttggaagaatcaacgataccaacgcacaagagcttaaaaaagccattgagagtggcaaactcaaaaccaagcttggagtggatatcgtggctttgagtgatgagggaggcaaagtgggagtagagtttgcagatggaagcaaagaggtttttgatagagcaatttatgctattggtggagcaacaccactagatttcttgcaaaagtgcaaactctctttagatgaaagccacactccaatcattgatgaaaattgtgagagcggtgtgaaaggcttgtttgtagcaggggacattgccctctcaagtggcggttctattgcgattggacttaaccacgcacacaaaattgcagaagaaatttcaaaaagattgtaagttttaagcaaaaatctagcattaaagctatataatcacaggtttaattctctataaaaggtttagatatggcaagaaaatgttttttgacaggtaaggggccaatggttggcaacaatgtaagtcacgcaaacaataaaaacaaaaaacgctcactccccaatcttagaagcgttagggtaagacttgaagatggaagcacagtgaaaatcaaagttgctgcttctactttgagaacaatgaaaaaacgctcataatctatgaggtgaagtgcctttgcttaaaaagatcaaaaaagcacttcattggaatgagagtgaggataaaaggcaaaatcctgagagtgatttgagtgcggctctttatgagcaattcaaatactttcgtttgcctcttttactgatacaaatctttcttttacttggaactttaggctatctttggcttgaggattatagtcttattgatgcattctttcaaacagcttatactttcacaaacacaggttttggctctcttaaagaagacaatttcaaacctctaacaatcattttcacaacgattataatgtttgcaggagctggggttatcgcttttagcgttgcaacggtggtcagtgtcatcaataatggaactttgataaaaatcattagggagaaaaaaatggtaaataaaatcgtaagattgaggaatcattatgtcgtgtgctatcacaatgaatacacaatcgagctatccaagcgttttagagaggcacaagtgccttttgtggtgattgacaatagcccaaactttgaagaagaagccaaaaaaaacaaatatccctactatatcacaagcgatccccatacagctgttgcatttttgagaactcatcttgcaagtgctaagggggttgtaactttttctaaaacccctgctgataatatcgctttgattgcctctgtgagaatctttgaaaaagagctagggcgtaagccttactatatcatcgcaagtgcagacacacaagaagatatggatagactcaaaaaactaggagcaaactctgtggtatctcccaccaaacttatggctcaaagagtgagtgcaatggcaatccgccctgatatggaaaacctcattgagcaatttgcttatcgtaaagatactccactagacttagaagaagtggtcgtgccaaagtatagctggatggtgctaaaaaaactcaaagatgtcaatttccgatcccttacaagagtttcagtagtgggaatcacccaaaaagatggcacttatatcacgatgccaacaggcgatgtgattgttcctagtgaatctaagcttttgatgattggcacaagtgaggggataagagaaaccaaacggcttatctctcgcaaagatatgcctgaagaaatcagagcagagcgagaaaaaaagaaagatagagagttgagatgaaaacttttgatatttttcctatcaaaggaggcgtgtgtgcccctagtggattttttgccgatggtgtgagtgcagggtttaagccaaatggggctttagatgtggcatttatctatatgcaaaagccttgcattcccacagcgattttcacaagcaatactttttgtgcctctccaatcaagcatttttatcaagaagtgcaaggcaaagagagtaattttgtgcttatcaatactaaaaatgccaacgcccttacaggcaaagaggggatagaggatatcaagctttatttgagtgcattgaaagagcgattccctcaagtgcaaaatcctattgcctcaagcacaggggtgattggcgtgaggcttgatacccaaaagcttatagactgcttccctcttttggatttgaatgctaggggagaggagagtgcaaagagggcgtctgaagcgattaggacgacagatttatttgccaaagagattgcactaagaatcgagctagaaaatggagaggtattccatatcggagcgatggctaagggagcaggaatgatagagccttcaatggcgacaatgctatgctttatcaccacagatgcccttatccctcaagaagatcaaaaagaattgcttcataaagttgtcaaaaccactttcaatgcaatcagtgtcgatggagatacaagcacaaatgattcactctttctctttgccaatggagtaagtggggcatacgataaagaagcatttgagagagggctagagatagtgatgaaaaaactagccactgatattgtgcgagatggtgagggggcaagtaagctagtgaggtttagagtaatgggtgcaaaaagtgaggaagaggcaatcaaagcaagtaaagccctctcaaactcacttctagtcaaaacagcactttttggctgtgatccaaactggggaagaatcgcctcaactatcggtgcaagtggagtagaggcaagtgaggagaagctaagtatttttataggcaatgtgtgtgtttatgagaggggtgtgatttgctttgatagtgagagagagggcagggcgtatgaagtgatgaaaaaggagagctttgtaatcacttgtgatttggggataggagagggggaatttagcacttatgcgtgtgatttggggcataagtatgtgcaaattaattcagattataggagttaagagtgagaaagatattgtctttgtgtatgtttggagctttgagtgtggcaaatgccttgacttttggaagtatgggaaatacttcagcagggcttggagatagtggtgtagctcttaggaaatcagcgtgggggatttactacaatcctgcacttctagcaagtgataatcgagggaagtttggatatagtctagggcttggaatggagcaaagaggacttggagatttgctccctgctcttatggactcaaataatggcagttttgatgtcgcctctttgtatcaaaaactaagtgatcaccccaacaactctttggcactttttagccaaaatggaatagtgattcaaatcacaggaggagtgaaagaagtcccaaagcttgatagtgagggaaatcccacagaagagatgatagaggtgaggagcaatattggagctttcacaatggcagcctttctttcagcttttggtgcagggacgattagctcaagtcttacgacaaatgaactcacagctcaagggggaatcgatgggcttgttttgctagaagtgcctgttggttgggggtggagatttgaagtaggggaaggggatttgagtattggtggagctgtgaagtatatgggagcttcaagtttggatattgctctaaatggaagtatcaatacttcaggtgagacttctttgaaatttaccaaaaactctccctctctcactccatcaagcagttttggaatcgatttgggattgctgtattcaatctatggctttagtgtaggagtagtggcaaaaaatatcaatgtccctacctttgagcttcaaaatgggacaaagtttagtatcaagccccaatttcgtgcaggacttgcttatgaatttgcagagtattttgccctcacgcttgatacagatttagctcccaatgaatttttgtttgatagctcttataaaactcaaatgattggtgggggattgctaatggatttcaaatatattgatttgcgttttgggcttatgggagatatggcaaataaatttgataatggtgtaatcctcacaggaggaatcaaccttttgggattccttgatgtagcaattcaagcctcaactgagatgtttagtctaaaaggttacaaaatccccaatgcccttgtgctaaaagtggggggaagtttcactttttaaaatcaattaagattttggtggcattatttccttgtatcttaaaacaaggagaaaaaatgctacacgaatacagagatgagatcgctcaccttaaggcaaatgacaagcactttgccaaaatctttgaggagcataacgccctagatcagaaaatcaaaaatatggagcaaggcattgaggttgccacaggtatggtcatcgatgagctaaaaaaagaaaaactcaaactcaaagatgaaatccattcaatgattttgaagtttaaaaacgcttaaaaaatggggaaaaatctctcccaaagggagaggaggggaattattctttgttgctacttgtaagtccaataatctgcaagattgaaataaagatattgaggaaatcaagataaagatcaatcgctgcatcaataggactctcatacattcctttgataatcttttgagtatcataagcaataaaaagactaaacaaaattgcacttccacctgcaatgacgatttggaatggtgaagagttaagaaagatattgatgattgagcaaactataacaacaatcaaagcaataaaaagcatttttcccatatttgccaaatcttttttagtcttaatcgcatacaaactcatcacaccaaaaataatcgttgtcattcccaaagcttgagcaactgcaccaacccctgctcttgagataacaaagccaagcaaaggcacaagcgtaatcccactaagagtagtaaatgcaaaaagcatcaaaagatttagccctgttttccctcttgaaaacattagccccaaaaatgctccaatctcagcgatgaaaaacgcccaacgataagtcaccacagtttcaaaaaacataaagcccaaaattgctccaagtgtccctagaagcaaacttcctgcaaaaaacttgtaagtagttttcacaaaacttacaagggcattgtcatttgccgctgcataatcataagatcgcgtatattctctgtcataaagactcattaaaactcctttagctaaaatgaaagtcaatcatacaatacttttgctctctatgtgttaatcaaaaaatttggattgatatttgctagagaaaatcacagaaaatttgaaaaagaggtgaagtgttgaaattgagggttgctatcaatggttttgggaggatggggagaagtattgcaagggtgcttttgcaaaaccctagctttgagcttgtagggataaatgatgtaagctcttgggaggttttgagctatcttttctcccacgataccactcatcgcaaactccctcacgccttaatcctagagggaaataccctctatgtcgataatgcccctatctctctatactctcactcaaaccctcaagagctagactttggcgaagttgatgtggtgattgaatcaagtgggagatttctcactcaagagcaaacctctcatcacttaagcaagggagcaaagcgtgtgattctctctgccccctcacttgatgatacgcccacatttgtgctaggggtcaatgccaaagattatcaaggagagcctatcatctccaatgcctcttgcaccaccaatgccctagccccaatctgcaaaatcattgatatgcatttggggattgagagtgggatacttagcacaattcactcctataccaatgatcaaaatctccttgacaacgcacataggagcgattttaggcgttcaagatgtgctggattaaatattatccccacaagcacaggttcagcaaaagcattacatagggttttgcccaacctcaaaggcaaaatgcacggacatagcctaagagtgcctgtggctgatgtgtcaatggtagatttagccctcaagattggcaaaaaaaccactcaagaggagctaaatgctctttttgaaagctatattcaaggagagatgagggggattttgggatttgatgaggagtttagagtctcaagcgatttcatcagcaatcccctaagtgcaatcattgccaaagatttgagctttgttttgcaagataatcatctaaaaattatggcttggtatgacaatgaatggggttatgccaatcgaattgtagaaatggcaaggtttatatgcgagtaattgccctgcttttatgctctcaaatgctgatttgggcgattcaatacaatgttacttcagcaagtaatcggcgttcaaacaatacatatacccaagagtttgatccccaagttacacccaaaaaaacttatggtagaagctcttcttctcaatctctacccataaaaatccaatctgctccaagcacacagacaagaagtcagcaagtgggtgtgcaagttacccctgctccctactcaccccaagctcctagagtgagtgtgcctacacaagtctcacgctcaagctctcaagaaatgcaaaaaatctatggctcatcttcccctacaactcccacccaaaatctaggggtgcaggtcgtccctccacgctctcaacctcaaagcactcaagcccctcaaagtgtcgatgtgagagtgtatcctgccactattggcaatcagagcaaaactcctgagcatcatctcaaggtcgatgtgggtaaatctcgccctatcacgcaagatatgatgttttatcctgctcctatgcaaaagatgcaaatccctgtgaggaaaaagcctcaagtgcaagtctctcaacctgcccctcaacctgtctatcaagatgagtatgatgatgaagattctgctccactttttatcagaaatcgcaatggtgtgatgctaggagcagggattggtggggcattcaatcgattgtgggtagggggaagtgatgggaatgaaaagttttatagcaataattttacctattacttcagacttggctatcagcactattttactccttatcttggattgcgatcttatgtgcatttgggggattggagctatgagattaatgatagggcaaatatcggtggaagagaagtagaaatcacttcagtgagtaatctgaattatagtggatatattgaattactttatgattttgtggtgctagaaaatcatagctttggaatctttgggggatttggagtgggggtgggaagctatgagtttagcaatgatgggacagagagcttgagtgattattttgcaatgcctatgatttcagcaggatttgcctatacgctctacctcaataaccgctttgaatttgaagtcaaagcccccttgcgacaaggagtgatagaaacctcgtggagagcagagttttctacttggatgatagggttttcttatacttatgtgttctaggatagcaagttacataaggtagcaatacattaacattttttatccaatctctcataaaactgcaaaaacttagataagataatcacttatacatactaaaaatataggaatgaaaaaatgattcggactttgggtatagatattggaatttcaagtatcggctgggcagtgattgagggaaaaatggaaaatggtaatcttgagtcaaaaaagattattaagagtggagtaagaatatttagaacagcagagaatccaaaagatggaaaatctttagctttaccaagaagagaggcgagaagcagtcgaagacgcaatgcaagaaaaaagggaaggattttgcaggttaaatcttatctctcacaaatactaaagatacctcttgaggaaatgcttggaggagagaagctgtcccctatgtttcagacaagcaaggactttgtctctccttgggagcttagaagtgaggcactttgtcgctgtcttgctccaagagagttggcaagagtgattttgcatattgctaaacgcagaggatatgatgacatcacctatgggcttgatgacaaagaagggggaaaggtgattaaagcaatccaagaaaatcaagcaatgctagtgcaaaaaggatacaaaacaatcggagagatgatgtatcaaagctactatcaaaagccacgagagggggtggtggggcaaatggagagcgtgagaaatcaagatggggattataagagatgtgtgggaagaagtgagctaagagaagagcttgagataattttggatacccaaaagaaacttggcaacccttatgtcaatgatgacttcaaaagaatgcttttaggagataagagtgcaatcaagaaaaaggaagctgaagggcttgtattttttcaacgccctcttaaaagctttgaggacaagataggaaaatgtcagtttttcaaaaatgaaaatcgctcttgcaaagattctccaagtgcagagaggtttgtcgctcttacaaaaatcatcaatactcttgcatacatcaccaatacttgtggaatcttgtgggaagacaaaagggctatcatctctcaaatccttgctaaagctatggagaaaaagagtggtgtgagctatgcggatttgagaaaaatcctaaatttacctcaaacttttgctttcaaagagctagattacagcaaagataaggcagaaaatgcaaaattttttgagttgaaatctactcatgaactactaaaagcaaatcccaatatcccacttcaaagacaagacaaaatcgctgaaattttgggagaagagaaaaattgggaaagaatccaagcaaagttggaaaaagaaagtttctctgctgaagagataacaagaatcaaagaagcaaatttgaaattctccaagcaccttaatctttctctaaaggcactctattttctcctcccactaatggaagaggggaaacgctatgatgaagctgtagagattttacaaaagcaaggagatttgcctatcaagaaatcagaaaaaagtcatttacttccaccactccaagagcttgcaaaagaagatagctactttgatatagccaatcctgttgtcaatcgtgcattgagtgagtttagaaagattgtcaatgcactcatagagcaatatggaggatttcattttttcaatattgagcttacacggcaagttgggcgaagctttttagagagagttaagataaaaaaagagcaagagagcaataaggatttaaatctccaagccttaagcttagtcaaagagtatggattgagtgaaaatgccaagaatattcttaagctcaagctatggattttacaaggagagagatgtatttatagtggtaaaaaaatcacaaaagagcatttgagagatgaagcttctcttgatatagatcatatcttcccacttagcagaagtcttgatgattctcaagcaaacaaagttttatgtctaaaaagtgaaaacgcacaaaagaaaaatagaactccttatgagtatttgggagaagatgagacaaaatggcaggagtttgtcgcaagggtatttagcacaaagtttgacagaaacaagaaaggacgacttatctctaaaaatttcaaagatagaaatgtgggagagagagcagagtttttggctagaaatctagtggatacaggatatatctcaagagtggtaagtcgctatgtggaagagaacctagagtttttgcctcttgagggcagagcaagaagagtgaggattgtatcaggctctttgacaacagcgatgagggcgtattgggggataagtggcaagagtagagaacatcatcttcatcacgcacaagatgcaatcattatctcttgtatcaatgatggcacgatacaaaagtttagcaattatcttaaagaaaaagaattgagctataaagatttagaatacaaagtccaacagcttaatgaagcagaatacaagacaaaactagcattgcgttatcctatgggagatttttcaaaaaacattttagagagcatttcagagatttttgtatcccacgctccatcacacaaggtaacaggggcattgcataaggagactatctatccaagagaacatttttatcaaagctttggaggagaagagggggtaaaaaaggctattgagtttggcaaagtcagagagattaatggcgggcttgtagaaaatggagaaatggtgagagtagatgttttcaaaaataaagccaagggaggtttttatgcagtgccaatctacacttatgattttgcaataggaagacttccaaacaaggctattgtcacgggcaagaatggaaatattatcaaggattggctagagatgagcgatgagtatgagttttgcttctctttatttaaaaacgattatgtcaaaatccaagcaaaaggtatgcaaaaccccataatagcgatttatacagggacaggagtggcaacagcaagtatgaatttttatcatcatagtgggtttgagtttgcttcagaagatgagagaaagttttttacagatatagataaaaagacacagattccacaattttctcgaacaaattgtggaatccaaactttaaaagtctttcagaaagtccaagtctctcctttgggagagataaaagagtgcaaaccttccaagcgtcagacaattaggctcaaaacctctccaaaaaatgtttgatgaatcttttagagtgcttttcttaagcacccctgctaagctctcccatagaagcaaaaatcttatcatctcctctcaagagagaggagaagtttcccttcccctcaaagatatctctacaatcattattgatacaccccaaatcacgcttagctctagtgtgctaaatgcaatagcaaaatacaaaattttgctttttgtctgtgatgaatctcatctgccaagtgggaattttttgccctatttgtctcactatcgcaactctcaaatactgcaacatcaaatcaatctaagcaaacaaagaaagtcggttttgtggcaaaagattatcaaagcaaaaatctccaatcaatcccaactcttaaaacttcaaaatcaaacccaagtagccaaaaaactagaagcacttagtaaaagcgttcatctcaatgatgcctcaaacaacgaagccaaagcctcaatgctctattttcctgctttatttgggaagggatttgcaaggaatgagaatcaccccataaactcagctctaaactatggctatgctattgtaagaagcgtggtggtgagaaatattgtaggttcaggacttctcccctcactcggcatctttcacgccaatcaatttaacccttttaatcttgctgatgatttgatagagccttatcgcccttatgtagataacaaggttttgtctttggatttgggagatgaacttgagcttcatcatagattggagcttgtcaatcttttgcatacttgcgtggctttggaggggaaaatctatcctctttatcgtgcaatcactcgaagcatttggagcttatcacgctatatctgccaaattgatgatgaggtgagtttgccaattttagatgaggtaagcaatggaagagaggtatatgagagtattagtgatgtttgatatgcccacaaagacaaaagaggatagaaaagcgaacacaaaatttagacaaaacttaatcaaagaagggtattttatgcttcaattctctgtctatgtcagagtatgcaagggattgaagagtgcaaataattatttggagagattggagctgattttgccaaagaagggacatatcagagcgatgatgatcacagaaagacaatttgacaatatgaagctcttgcttgggaaagaaagtgagacagaaaaagctcgtaagccccaacagcttacacttttttagattcggttttttggggatgctaggcagttaccccacagagataccgaaaaactctttattttagccacttcaaaaatctatatttcgacattatatctattctctaatccccttgtcaagagatttttcaaagaatctattttagcatagatagatttttgaagtggctaaaacatttacactgcaattctaacaaagaattgtattttagcatagatagatttttgaagtggctaaaactcattcactgatagtttcccatctgtggttattttagcatagatagatttttgaagtggctaaaacggcgtttttctcacgctttaatacattgttattttagcatagatagatttttgaagtggctaaaacagggttcgccctttgtggtgggggtgggaaattttagcatagatagatttttgaagtggctaaaacaaatctctcatttatcgcacttaatagagcattttagcatagatagatttttgaagtggctaaaacaccctacaacaagtaatactccccacaccaattttagcatagatagatttttgaagtggctaaaacttgattaaaagatgggcgtcagtccgccccattttagcatagatagatttttgaagtggctaaaaccacgaggctctgattctatcacttcttttgattttagcatagatagatttttgaagtggctaaaacattggtgtgtatctcccacaaaaactttttattttagcatagatagatttttgaagtggctaaaactagagatagggtagtagtagataataataaattttagcatagatagatttttgaagtggctaaaacaatatcttagaccccctcaacttcaagacaattttagcatagatagatttttgaagtggctaaaacagcattctcaatactctttttatagagatattttagcatagatagatttttgaagtggctaaaaccttgctactcctcacaatgccaaagctagaattttagcatagatagatttttgaagtggctaaaacaatacaaagctcatttagagagaatacacgattttagcatagatagatttttgaagtggctaaaaccgtcaagttgaggtgcagttaatagctatgattttagcatagatagatttttgaagtggctaaaactttttgtgtgaatatgctcttataaccgagattttagcatagatagatttttgaagtggctaaaacagcgataatggtaatccgttattctgtttaattttagcatagatagatttttgaagtggctaaaactatggttatcgtcgctataaatgcaggataattttagcatagatagatttttgaagtggctaaaactacaaaatagcaccctatttgagatttaagattttagcatagatagatttttgaagtggctaaaacatgattgggtgcaaatcattatggtagttgattttagcatagatagatttttgaagtggctaaaacctatacctaaacaccctagattctctatatattttagcatagatagatttttgaagtggctaaaacaacgcccttgccgtctgttccaaaagtggaattttagcatagatagatttttgaagtggctaaaactttggataaattattgtttcgtgtgtttcaattttagcatagatagatttttgaagtggctaaaacactacaacaagatgtcagagaagctcttaaattttagcatagatagatttttgaagtggctaaaactgagcttcgtcgctcctcaaaacaaggctaattttagcatagatagatttttgaagtggctaaaactcctataaggcactcctctttgttaaaaagattttagcatagatagatttttgaagcttttggtattcttttttctagttcttgcattttggcatagacaaggttttcaaataagcctacccccccccccccttttttttttatgtgagggttatacaggcaagactcggatttgaggattgaggtgttcttgaagtgtgttctcgattgcatagagtgtgcctgtgctagcagaagcacatccatgacacgctcccatatagcgaatgaaaacatcagtatatccatcagagctgttttgaatgtcgatgatttccaaatcccctccatccatcattagcattgggcggatatgctcatcaatcgttctatcaatcgcttttgttttttgtgcgattgtcatctctgagaatggaagttctccgatttgagttttttgagccttgtctttgagggcttcagcttccatttcaaggcgtgtatctctaagaatatctactagataataatccctcttctcatgcccccctggtttgacacagcttttacaaaatgcccctgctttggtgtagtttgtgatttcttccacggtttttaagtcgttgattttgataacttctttgatcgtgcttaggctcactcttgcacactcacacacaatgatttcatcttcaaaatcttccatatctttgcctagatagattgaagcagcctttttgatgacatcataagccattacagagcagtgcattttttgccctggcacagcaggagtatcaggatcatctctaagagctttttctacatcaatatttgtgatttttactgcatcttgcacttttttgccgatacatagctccaccatcatatcactactagcaatcgctgtcccacagccaaagcttttgaatcttccttgaatgattgtatcattctcatcaactagccaatacagccttacagcatctccacaagattcagccccatagtccgctacgataagcttagcattgtgagcttttgcatcttcttctgtgaggactcctagatgagtaggattatccattctttgagcaactttgtttgagtaggcatcccacaatgccccaccgataagatcattttttgccattgtttatcctttagtaagttgatgaaatttctctaagtcttttaattgatttgttaaacacttcaatcacataatcaatctctgcttcagtattaaatcgtgaaagagagaatctaatcgctgtatgagcaagttctttgtctgccccaatcgctgccattacagggttggcttccaaatcctcacttgcacacgcacttcctgtggaggctgcaatccctgctttgttgagatcccatagcattgcctctccctcaatccctctcacacttgtaagaattgtattggggacttttagctcttttttgcctactactaggatttcttcattttgcaaaatcgcatcttctagcttatcccttaggcgtctaacctctgtatcttcatagattagccccttttgagcgagtgccatagcttctcccattcctacgatataaggcacattgagtgtcccacttcttcttcctcccatatgctcccctccgtggaagagtggagtgagtttcactccttttctaatatagagtcccccaatccctttggggccgtggaatttgtgagctgagaagctaaggaaatctacttttgccttgataacatctacggggatctttccgatagcttgaacggcgtctgtatgaaatagcacacctctctctttgcaaacctctccaatctcctcaattgggaaaatcactcctgtttcattatttgcccacattacgcttactaatgcagttttatctgtgattgcttctctcacttgagaggctgtaactctaatatcctcattgacaggaagataagttacctctactcccaaactctccaaaaacgcacaagtgcttcttacagcagggtgttcaacctctgtggtgatgatatggtttttgcctttacccaaaatctcatcaaaatacactcccttaagcacccaattgtttgattcagtagagcaagaagtaacgatgacatcatcttcatcttttgctccaattcctgcataaagtttgtcgattgcctcagagattgcagggtgagtctctgtcccaaatttatgcaatgagcttggattaccatatttctctgtgagatagggttgcataagctctagcacctttgggtcaatcattgtcgttgcattattatctaaatacgcttgcattttctatcctttatttctcagaaaatttttatttgccataaaaacttcaagtgggggcgttatatcacaaaaaaacaatgaaaaatcaaaaaattacaaaatttccaaaagttttgccttggttgtatcaaattcccacaattcttgctcatcttgtttgagaaaatcctctatccactcttttttgccgatagcttcatcaagctcaaaatcacttcctgactgataagctccgattcggataagcacctcgttttctttgagcattgaataaaggcgtctaaatttttgagaagccctcttttgctcactatctgtaatctcattgcttacccttgaggcagagttgatgatattgataggtgggtagattccaaagtctgtcatctctcgacttagcacgatatgtccatctaatatacttcggctttgatcagctatgggatcgctgagatcatctccctcaacaagcacggtgaaaaaggctgtgattgctcctttgccctcctttttccctgctctctccataagttgaggcaagagggtgagagtggagggtggataaccttttgtagtaggtggctcacctagggctagtcctatctctctttgagccattgcaaagcgtgtgagagaatccatcataaaaagcacatcatatccctcatcttgaaaatattcagcaatcgccatcgcactaaaagccccatattttctcatcaatggagaatcatcgcttgtagccaccaccaaaatcgtatcgctcaaatctcctttgagatttttgtggataaactctggcacttctcttcctctctctccaatgagggcgatgactttaataggtgcttttgctcctcgcacaatcattcccataagagtagatttccccacgccacttcctgcaaagattcctagcttttgtcctttccctgctgtgagaagcccatcaatacttttcacccctacactaaagacttcatcgatgattcccctctgcattgcacttgtagggggtttgatgataggagtgtgagtggtgtggataaaaggaggtttgccatcaagtggctctcctagagggttaatcactcgccctagcaagtcttttcccacagggatttgcaatccacttttattgagatagactttatctccacttttatgcccttctacgaaagaaaaaggagtgatagaaaaagattgattatgtgatgtggtaacgatacccaaacttttttctccaagctcattatggatttctaccacatcgcccacacttggatttagcccctctccgacaagaagggtaggggtaacgctagagagtatcccaaatgtaggagagaggtgtgagggggatttgagtttttggcgtatttgttcaaagggcataatacttccttatttatatataatttttgctcttattttaaaatgagaaaaccaaaatccaaaattttttcttggttttaaaattatttttgttagaattagcaaattatacttcaatctactattttaagggaagaatatgagtttaaagacacaacgcgttaatgacgctaatgctattgcaagtagcacaatttctgcagagcttgtagataagaaatctcaagcaatcacacagcaatttgccaagaatgtaaatattcacggctttagaaagggtaaggctcctgtaagtattgttaagcaaagatatgcgaaacaaattcagcaagaagtcgagcaagaggcagtaagagagagtttccaacaagcactcaaagatcttaagatcgagcaaaaagatgttttggggaatcccgcgattacaaaatttgagagaaaaggtgaggagattgatgtagagttcaaaatctctctagctccaaaagtggatctctctaaactcaagtcttgtgtgcctgaagtgaaagtcaaagaaccaagtcttaaagagattgatgagcgacttgatgaaatcgcaaaatctcaaactccacttgtagaagccaaagcaacagcaaaactagctgagggcgatacagcaaatatcgactttgaagggtttatcggagataaagcatttgagggaggaaaggctgaaggttttgatctgcttattggaagcaaacaattcatcgcaggttttgaagatcaacttatcggtatgaaaaagggagaggagaaagatatcaaggtaactttcccacaagattatcaagccaaagatttggcagggaaagaagctacattcaaaatcaagcttaatgcaattaaagtcaaaggagagagtaagctagatgatgagtttgcaaagaaaatcctcaatcaagctgacgcaactcttcaaactctcaaagatcaaatcaagctccaactccaaaatgaagcaagagtaaaactctacaatgaagagcttaagccaaagctagtggataatattttggaaactattaagtttgatttgcctgatttgattgtagagcaagagatgaatattttgctcaacaactatgctagaactctcactcaagaagagtttgagaaattccaaaatgacagcaaagccattgaagaaaaaagaaaagagctagagagtgaggctcaaaagagtgtgagaatcacatttattgtcgatagtgcttctaaagaatacggagtgcaagtgcaagataatgaagtgatccaagcactttactatgaggcgatgatggcaggacaaaaccctaaggcgactttggagttttatcaaaagcaaaatctcttacctgctgtaaaaatggcaatgctagaggatagaatcctcacaatgctcctagatgagaaaaacaacacttcaagtgcttcaaaaggctctgagaaggctgagaagccaaaaacaacaaaagccacaaaagagccaaaagagggagaagaaaaacccaaaaaagctcctgctaagaaaacaacagcaaaaaaggaagataaataatgagctatatcccttatgtgattgaaaaaacagggagaggagagaggagttatgatatttactctcgcctcctcaaagatcgcatcattttgcttagtggggagattcacgatgaacttgcttcctcaatcgtagctcaacttcttttcctagaagctgaagatcctcaaaaagatatttatctctatatcaactcccctggtggagtgattacaagtggaatgagtatttatgatacgatgaactatgtgcgtcctgaagtttgcacgatttgtatcggacaagctgcttctatgggagcatttttgcttagctgtggagcaaagggaaaaagattttcacttcccaatagtcgcattatgattcatcaacctcttggaggggcaaaaggacaagccactgatattgctatccaagcccaagagattttgcgactaaaagctacacttaatgagattttggcaagtaatacagggcaagatatttcaaaaattgctcaagatacagagagagatttttttatgagtgccaaagaagctcaagagtatggaatcattgataaggtattagaaaaaaatcaagtaggtgagtgatggaagataaaggtgtcataaattttagtgggggagttaaaaagggagataaggttgaggcactttctgccaagacaacaaaaatcgcaagagatgttatctctcagcttgaaaagcaagatattcctatttttcctgatagttttgagagtgtgtttgagcaaatcattgctgatgagagtgaggagtttaagcacttggttgagcaaaaagcaggaattgctctaagccacaaagatcgtttgctcaactttgaatcagaggcaaaaagtgggattaaaaatgtgcgagatgttttagaaatcacaaaagagatttatcaaagtgtcgtatttgcccacaatgccctcaaaagaaaagctgaagagatttctaggattgaaaatcctgtggcatttaagagtgctattgggttgtgttttcaagagtttgacaacttacagcacacaatggaaactcaaattgtagagatgaagagggcatttgaaaaaatcgttgtcaatattgaaaatgtcaataaaaacgccatttatgatacgcaatatggagtttataacaaaaaatacttcctctctgtctgtgaaaaagaaaaaaagattttagatcagattggttgctcttatgcatttgtggcttatagtctctctaagagatttttagagagtctcaaagacaaggattttgtaagagtatcacttaaaacaatgtcaaagattttgagtgagcatatcaataatgatgagattttgtgctactttggaagtggaaaatttgtcgtgctatataaatacatagatagtgaaaaagtgctagaaaaagtcaaaaaaatctctcatcttgccaaagaaactaatctattttttgagggagagcaaacttcattggagttttgttctggagtgtatgtcgtcaatgaatctagtgagctaatagatgaaatctcctatgctattagctcttgtgaagaagcatttgatcatcaagctgattgcgaggtgtatcagcaagttacttctccaagtcaagaagaagttcagagtggagagggtgagtgatactccctatcctctcttaccccaatcctcaactcaaacaacgctctagtgaggtt

SEQ ID NO: 1001 - DNA, 23081 bp, synthetic construct
  source 1..23081: mol_type = other DNA
  misc_feature 1..23081: note = Synthetic
cctcaatcacaaagtcagcatcttctgggataaagatgggattggtgatggattggacaagttgaggttttctctctctaatgattccatatagtgcgagttcaaaaactccataaggcatcggagcttgcccacaccatgtatagagaggatctccacctagtgcgatactcacaggcatcttttgtctagcttttttgtattgatggaagaagtgattggaatctttgtggatttgccaatgaagtcctaggcgtcgatcatcataaatttggaggcgatacattccaagatttttgagttccccatctaggctttgggtatagacctgtcccattgtgataaatgctccaccatcaagttcccaagtcttgagcgcaggtaagttaaaaagagagggattgagattgatgtttgcttgacatgttccttttttgtggggatggagcttggggattgcatgacgcagtgtaaagagctctttggcttttgtaagtttttgaacaagtgttttggggggagtgagcttgaggaggttttgaatctgcccagcaatctcttctggtgatttttgaacaatcaaacgcaagagatcaaaggagccaaagatattggtcaaaactggtgtttgaaatatatgctctcctcgttttgggtgggtaaaaagaagtgctttggcattaggttttttgacttcgatgtaggagagatgaggaatctcaagatcgacatctagtggtgtgtcgatgactttaagaagattatgtttttgggctagagaaatgaagtgctgcatgataacctcaatttgatttttgaggtcgtattgtatcaaagccccccttccccctagaagctagtttagaaagcaaaaccgattgtgccaccaaggttgagcatctcagcatgatgctttccgcttgaagcagggattttgagatcaggtttttgccagcttccctcaaagccaatcaccaataaagaaaacaaagggacttcccatctgacaccaaagttgatcgcataagtttccttgatcgagcttccactgatgaaaccacctttaaatgttgaataactcgctccaacaaaaggtgtgagtttgatgaaggggatgcgatatccaagcactcctccatattgaatattgtggatggattcttttgaattcacaaaggaacttctaagatagtcatacttgacatgtggagcgatcataaatcccgcaactccaagccaaagtcttgcatatgcaccaggactaaaagtattgtcattattaaaagaggtagatttatcttcaatctcacctttgactttactgtagctgagagttgctcccacttctggagagatggtcaagatccccaaatcaattgcaaaaatagagctcaatgaaagccccaaagccaaaataatttttttcatctatgatcctcctttgacggatagtcgaatttgcatgtgcaaaaacgctggcattttatcggattttttctttattggttaagatagggcagaatccctgcccgaaaaaatgatgatagttcttgaggggatgagatgcaaaaatatttcaatcgtgagttatcttgggtgaagtttaatgcccgtgttttagatcaaagcacaaaagaggatctacctctgcttgaacgcttgaaattcttggcaatttatggagtgaatctggatgagttttatatgatccgtgttgctggattgaaaaaactctacaacaagggaatctccaaagtgggcgatgatgggatgagtcctattcagcagcttgatgctattgagaagatgcttagaagacaaaaaaaggatttggagaaaagtttcttccatctcaaaaatttgctctcacaagaaaatttatttatcctcaattatgatgagctaaaccaagaagatcaagcaaaatctaaagattattttatccacaacctttatccgatgattgttcctgtcgtgattgatgcgatccatccattccctcatttcaataatctaagttttggcttggtgattaagatgcaaaacatcaaaaatcctcaagagatttcatttgccctcattcggattccaagatttttccctagatttgttgaggtgagagatggagtctttgtgacttgtgaaagtatcgtaggtgagtttgcaaatctcatttttgaaggatttaagatcctaaattggtgtccctttcgtatcacaagaaatgcggattttgagatccaagaagaagaagcggatgactttatcgagcttttgagtgagggcttgaaggctagaagaagaggagaaatcgtgcgccttcaagtggggcgcaaccaagatgaaagcttgcttgagtttttgatgtcgcatttgcccaaggtggatgtgtatcgatatgatcttcctctcaatcttggagcattatggcagattgtgtctcatccaaactttgcccatctcttgcatccttattttgtgccaaagcttccagattttttgagtgaagagggcaatctatttgagcttctaagagagcaggatgttatactgtttcatccctatgaaagctttgatcctgttgtgcgatttattcagcgtgcaagtaaggatcctgatgtactttcaatcaaaatgacactctatcgcgtaggaaaaaactctccaattgttcaagccttgattgaagcagcagcacataagcaagtcaatgtccttgtggagctcaaagcgagatttgatgaagaaaataatcttgagtgggtgcgggctttggaagaggcgggtgcacatgtgatttatggagcctctggattgaaagttcatgcaaagattgctttgattttgagaagagaacaagacagaatcaagggatatgtgcatgtagggagtggaaactacaatatcaaaagtgcaaaaacttacacagatgtgagtttgctaagttcaagggaagatttgatctcagatgcgattaaatttttccatgcactctcggctggattggccaaaaaaacatgcttgcaaagtatttatatggcacctgcacagatcaaacctaagattcttgctctaattgatggagagagagagaagggtgagcagggcaagattattatgaaaatgaatgctttggttgattctgagattgtggatgcactctatcgggcatcacaagagggggtgaagatttggctcattgtgagggggatttgcacgctgcgtccaagagtagaggggctctctagcaatatcagagtgatctctcttcttgggcgatatttggagcatgcacggatttatttttttgggcatggagggctttatgtggcgagtgcagatatgatgcccagaaatcttcagagacgcatcgagcttttgatcccgatcaaaaaccctatagattctcaaaatctattgaattttttagaacttcaacttgaagatagcaagggggcatatgagctgatggaatgtggagaatatcagcagattttgggagacggatttgattctcaagaagaatgtcaaaaactaaattttaaagaagcttgaagatgtttttgaactaaaattatggaaaatttcggagaggatttgtgtattcgatcataaaaaatgtgctttttagatttgatcccgaacttgatcatcgcgttgttgagttttgtttaagacatattgctccactgcccattgtgagcgattggatggctagtcagttttgttatttggatgaggctttgggcgttgaagttgaggggttgaagtttgccaatcctgtgggtttggctgcggggtttgacaaaaatgccacgatgattgagggattgagtttgatggggtttggatttgtggagcttggcagtatcacattaactcctcaaagtggaaatccaaagccaagaatcttccgctttgtgcaagaagagagcttgcagaatgctatgggattcaataatgatggatcaaggatgattgctcaaaggattgccaaactctatccctatagaaaccccctagtgatcaatcttggaaaaaacaaagatgccacagatgcgctcaaaaattatgaagagaatctcaaggtttttaaagaattgggtgatgcttatgtgttcaatatctcatctcccaatacaccaaatttgcgtgatcttcaaaatgagcaatttgtcaaggaattatttgtgatggccagagaacatactcaaaagcctttgtttgtgaagatttgtccagataatgcaattgatgcaacacttagagtatgtgagagtgcattgagcggaggagcgagtgggattatcgcgaccaatacaacgacagattattcacttttgcagaatcccaaagagattgggggcatcagtggaaaggcattgcgcaataagagtcgtgaggtcttttatgagatctcaaaagaattttttggcaaggcgactttgatctcttctggagggatctttgatggtgaagaggcctatagtcgcatcaaaatgggtgcttcacttgtagagatttattcagcattgatctttgagggtccaagcgtatgcaagagagtcaataaagatcttcaaattttgttgcgtgctgatggattcaaaaatatttcagaagcgattggagtggatatcaaatgaaaaagattttgatggtatttttggtgattggaagtgtgcttagtgcacaagatgtatttgtggatgtagaaagtgccaaaacacaatctgcgacacaagagcaaaaaatcaaacaagatgaggataaagaagtggaagaaaaatcattgctcccaaattatttttcaaagacactgaagaatggtctagaggtttatgtgatccctattgctaaccaaagcggggtgattgaaacaaatgtattttataaagtgggaagtcgcaacgaagtgatgggaaaaagtggtcttgcgcatatgcttgagcatctcaatttcaaatcgactaagaatcttaaagcaggtgaatttgatgagattgtgaagaagtttggtggagtgaccaatgcatcgacaagttttgactacacgcgttatttcatcaaatcaagtgcccaaaatctctccaaatctttagaactctttgcagagttgatgcaaaaccttacgctcagcaatgaagaatttcaaccagagcgtgatgtagtcgcagaagagagaagatggcggacagataattctccgattggatatttgtatttccgcttctttaatacagcctacatatatcatccctatcattggactcctatagggtttatggatgatattaaaaattggaagattgaggacattcgggaatttcacaagatttattatcagcccaaaaatgctgtaattgttgtagccggagatgttgagccagaagttgtatttgatcaagcccaaaagtattttggatcgattgaaaatacagatgatgcgattcctgagctttatactattgagccagagcaagatggcttaagacatattgaggtcaaaaaagattctcaaattgagtattttgctctaggctttaagatcccaaatttcaaacaaaaagatcaagtcgccttgagtgtgttgggtgagcttctaagcagtggaaagagtagcttgctctacaaagaacttgtagataaaaagcaaattgcatcagaaatctatgcctatccgatggatttgagagatgaggggatgtttttgatcattgctgcaggtagcgatggagtcaaagctgaaacaattcaaaaagaagtccaaaaagttcttcaagacatcaaaaaagggaaaatcagtcaagctgacttggataaagtgattttaaacacaagagctagcttcatctatcgcctagaagatgcctcaagtgtggcatctctttttggagaatatcttgccaagggtgatctagagccacttttgaattatgagaaaaatcttcaaaatcttaagattgaggatttgatcaatgtggctcaaaagtattttgtcgattctcgagcaacttcagcaattctgaggaaataatatgattttaggcgcaatgagtgctttgatcactcccttcaaaaatggcaaagtcgattttctctcttatgagagaatgatccaacggcaagcaaaatatgggatggatgcttgtgtccctgtgggcacgactggagaatcagcgactttgagccacaaagagcatatggaatgcatagaaattgctgtgagtgtatgcaaaagtaatcatatgaaagttctagcaggtgctggaagtaattcgaccaaagaggcaatcgagctagcccagtttgctcaaacaagtggcgctgatgggatcttgtgcgttgctccttattacaacaaaccaacgcaagcagggctttttgagcattataaggctgttgcagattctgtggagattcctttgatgttgtataatgttccaggcagaacaggcgtcaatatcgaggtttcaacggtcttgaaactcttgaaggaagtgaaaaatatctatgggatcaaagaagcaacagggaatatcgagaatatcgtagcacttcatgcgatgaatccagagtgtgttatcgcaagtggagatgatgtgatcaattacccgattctctcaagtggtgggagtgctgtgatttctgtgacagggaatttattacctgataaaatttcttatctaacacattgtgcgacagagggaaattataatgaggcacggaaagtcaatgaagagctttatgagatcaataaagtcttgttttgcgagacaaatcctgtgccaatcaaaacggcgatgtatttgtctggactgattgagagtttggagtttcgtctgcctctcgtctctctcaagcaggaaaatttgtcaatgttagaaaaaactttagagcaatatgaggtgttacaatgagtacaatgaagggaaaaactttagtgatcagtggggcgactagagggattggtaaggcgattttgtatcgctttgcgcaagagggaatcaatgtcgcttttacatacaacaaaaacgaagaagaagctcaaaagattgcatcggatgtagagagtcgctttgggatcaaggctcgatattatcctttgaatgtattggagcctgagcaatacactccactttttgctgagattgataaagattttgatcgaattgacttctttgtcagcaatgccattatctatggacgcagtgttgtaggagggtttgcaccttttatgcgtctgaagccaaagggattgaacaatatctatacagcgactgttttggcatttgtggttggagctcaagaggcagcaaagcgtatgaaagaagtgggtggtggatctatcgtctctctcagttcgacaggaaatcttgtttatatgcccaattatgcaggccatggcaatagtaagaatgctgtagagacgatggtgaaatatgcagcgatggaattaggtgagtttggaatccgcgtgaatgcagtcagtggaggaccaattgatacggatgccttgagagcatttcctgattatgatgaggtcaaagccaaagtcgaggcagaatcacccttgaagagaatgggaaatccgaacgatttggctggtgcttgctatttcctttgtgatgattctcagagtggatggctgactgggcagacgattatcattgatggtgggacgactttcaagtgatgtaagatttgaacgatgaaaaatgtccccaatattttgaccatttgccgtatttttatggcgattttggtgatggctatcatcttgtatgcagatatgacaagtcagcttgtgcgctttgtagcgtgtggtatctttttgctagcatctgtgactgatttttttgatggatttatcgcaaggcgttatggggcgcaaagtcgctttggtgaggtatttgatccattggcagataagatgctggttttgggtgcatttattgcattgcttgtgagtgggcttgcctctccttgggctgtatttttgatttttagtcgtgagttttttatcactggactccgtgcagttgtggctacacatcatgtgaatatctcagctgatttgttgggcaaaattaaatcagtggcacagtattgggcgattggatgtttgatcttgcaggttttgccccatttttggaatcagctttttctatggcttgctgtgctattgacgatcatctctggcatcaattatgtcagaagttattttagagcttttcaatgagtttgctagctgcgctgatcgcgctatcttttttgattttttttcatgagcttgggcatttcttggctgctcgattttttggtgtcaaggtagaggtctttagcatcgggtttggaaagaagattatcaaaaaaacatacggggatacagaatacgccctctcttggatccctcttggtggatatgtcaagatgaaggggcagagcgatagtgatccattgagccaaaatcaagatcccgatagctatacatccaaatcccctcttcagcggatcgtgatcttgctggctggccctctttttaatattttgctagctcttttgatctatgtggggatggcgtatggggatcgcgaggttttgctaccaagtattggtgaggtgcagacaggtatgccagctcaaagtgctgggatcatggcaggggatagagtgttgcgtatcaatggtgtggaagtgaagtcttggtttgatatggcagagaaagtgatggaagcacaagggcgcttgacactaatgatccaaagaggtgatgagaatcttgaggtaggcgtgattcctaaaatgatcgagagagaaaatgtctttggtgaaaaggtgagtgtctctgtcattgggatcagaccttccggagagattggggtgatgcattatggggtttgggatgctctaaggcttggagcgagtcagacgctctcaagtagtacattgatcattcaaggtgtgcagaagttgatctctggagtggttcctacaagtgaagtgggaggagtgatttcaatcgtgcaggtgatggataaggcacaagagagtggcttagtccagtttctagctcttgtggcactcatttccatcaatcttggcattctcaatctcttgcctattcctgctcttgatgggggacatattttgttcaatctctatgagcttgtgaccaaacggactccaagtgaaagcgtgctgtattacttgacacttatggggtgggctatattgtttgcccttatgtttttgggactttataacgatatcaatcgcattgttggaggataaaatggcaaatcatcttcaagaagtcattgcacgcatcgaaaaagctcgcatcgcatactctcgtcatcagatcatcaaacttgtcgcgatttccaaatactgggaagattctcagatcatcgatctttatcaatctggtcaaagagcctttggagaaaacaaagtccaagatttgaagcgcaaggctttggatttggatagatatccacttgagtggcatttcgtaggaaaccttcaagaaaacaagatcaatacactgatttctctcaagccagccttgatacattcaatcgatagtctaaagattgccaaagctcttcaaatgcgtctggagcgtgaagggttgagacaaaaagctcttatgcaaatcaactcagccaaagaagaaaccaaaggaggagtagcaccagaagaagcctatgagctctatcataggatccaagaagaatgccccaatctcatcatggaaggtgtgatgacgatcggtgcgcacacagaagatccaaacaagatcaaagagagctttgaaaccactcaaaaaatctatgaaacactcccaaatgccaaaatactttctatgggaatgagcagggattttgagcttgctatcgcctgtggagccaatcttttgcgtatcggctcagcactgatgggatagactttatttcatctattgattgggtgtattgggggtgatttggagaaaatggagcaagcgatgaaaatcaaaactttaggtgtggatattgggattgcaagtattggatgggctgtggttgagggggaatatatagatggaaatcttaaaaatgagcagatcatagatagtggagtgaggatttttacaaaagcagaaaatccaaaaaccaaagaatctttagcactccctaggagaaatgcaagaagtgcaaggcgtagaaatgcacgcaggagagcaagagtgcaacaagtcaagtcctatctttgccaaactctagggctagattctaaagacttcatccaagagggaaacctagccccaatctttcaaacctccaaagacttcctctctccttgggagcttagagagagggcattgtatcgagtgctagatagagaggagtttgcaagagtgatactccatatcgccaaacgcaggggatatgatgatattacttatggaatcgagggcaaagatgatgatggaaaaatcaaaaaagcaatcaaagaaaacaatgctctactcatagaatcaaagtctcaaaccattggagagatgatgtttaagcaatattattctcaatctctcaatgttcgcaataaaaaggagaattacaatcgctgtgtgggtagaagtgagcttagagatgagctagaaaagatttttgcaacccaacagaaactaggcaatccctatatcacccaagactttatccataagcttctaggaaatccaaatgcagagagcaaacaagtcaaagaggggttaatcttctatcaacgcccactcaaaggattccaagataaaatcggaagatgtcagcatatcaagggagagtctcaagcatatagagcgtgcaaaaatgctccaagtgcagaagagtttgtcgccattacaaaaatcatcaattttttagcgaatcttaaaaatctctatggagatgtatcgctctccccaaaagagggcatccaaaaaattatgctagaagcccaaaagaataaaaaggggctgacttactccaagctaaaggctttgctagatttgcctagtgattttgagtttgcagggcttgattatagtggggagaaaagtcctgagggtgcagtgtttctctctttgcctagcacatttgagctaagcaaaatcatagcagagagagaaatgcaagataagatcgcagatattttaggagcaaataaagactgggaaattattctaaaagagtttaaaaaacttgatttatctcaagatcaaatccaagcgatcaaagatgcaaagcttagtttctctaaacacatcaacctcagtcttgaagccctttatcacatcctacccttaatgagagagggaaaaagatatgatgaggcggtgcaaatcttacaagagcaaggaatctttagcaaacctcagaacaaaaacctacagcttctccctccattaagcgagcttgtcaaagaagacagctattttgacatccccaatcctgtgcttaagagggcattgagtgagtttagaaaagtgatcaatgcacttttggagaaatatggaggttttcattatttcaatattgagctagctagagatgtgtcaaatggaaaaaagcgtagaaatgagcttgagcgaatcaataaagagaatcaaaaagagaatgatgaagctacaacattgcttcgaactctagggattcccaatacttccaaaaatcgcctaaagtgcaagctctggagacagcaaggagagcagtgtctatatagtggagttaacatcaccgcagatcatcttagagatgaaaaacttttgcaaatcgatcatgcacttcctcttagtcgaagcctagatgattcgcaaagcaacaaagtgctttgcctaacctcaagtaatcaaaataaactagatcaaactccctatgagtggttaggaggtgatgagaaaaaatggaatgcatatgtagggcgcgtgtatgcaagtaagttttcttctagcaaaaagcgcaaactcactcttaaaaatttcaaaaccaaaactacagatgattttcttgcacgcaatcttgtcgatacgggttatatcggtagagtagtcaaagaatatgtcaagacttctctttcttttctcccacttcctgatggcaaaaaagaatatattcgtatcatctcaggatctatgacttcagcaatgcgaagttattggggtatccaagataagaacagagatcatcatctacaccacgctcaagatgcgatcattatcgcctgtatccaaccaaatatgatccaaaaatacactaaatatctccaagacaaagaaacccataagcttaaatctagcgagaaagcccagcttttaaaagagggggattataaaaccaaattgactctaaggtggtcaatgtctaattttggggaaaagatgcaagaatcgattcaaaaaatcatcgtctctcatagtgtgtcttataaggtgacgggagctttgcatgaagaaaccgtgaggaaaaaagagttttattataaatctttcggaggtgaagagggagtgaaaaaagctttagagtttggaaaaatccgagcagtcaatcatgggattgtagataatggagcaatggtgcgcgtggatattttcaaaagtaaggataaggggagtttctatgctgtgcctatttatacttatgattttgcgattggaaaacttcccaatagagcaattgttcaggggaaaagtaatggagtgttaaaagactggatagaaatggatgaaaattacgaattctgtttttcactttttaagaatgattgcattagaatccaaactaaagaaatgcaggaacctgctttggtgatctataaaagtacagatgctagcaatgcaacaataaaaatagaacacctgagtaaatactcatgcacccaagatgagaaaattttatttaaactcaaagataataaattaccaatgcagggaaaacaagggatttggggtctaaaacttttccaaaaagtcaagctctctccattgggagaggtgatagagtgcaaaccaagaaatcgccaacctatctctctcaaaagtactcccaaaaatgtttgatgaagcattccgcacactttttatgagtaagcctgctaagctttctcataaaaataatagtttgatcatccatcatgacacagaagtgtctatccctctaagagatattcatacagtgattattgatactccccaaatcactctgacagcttcattgatgaaagagaagtttatgagagtgctagtgatgtttgatatgcccaccaaaacaaagcaagataggaaagcaagcacgaaatttcgctcaatgcttttaaaagaaggatactttatgcttcaattttctgtctatgtaagaatttgtaaggggatcaaaagtgccaatacttatcttgaaagacttcatctctatctgccaaaaaagggacatatcagagcattgattctgacagagaagcaatttgatcatatgaggattttgatcggagaatattcagaagtagagaaagctcgaaagcctactcagcttactctattttagatcggtttttaggagatgctaagcagttaccccacagagaaccgaaaaactctttattttagccacttcaaaaatctgtattttgggattatatattttcttcaatccccttgtcaagggcgttttagcgaagtctattttaacatagacagatttttgaagtggctaaaacgtctttgaaactgatgttgaaattaaagaaattttaacatagacagatttttgaagtggctaaaacaaagaatgcgattgactttatggaattctcattttaacatagacagatttttgaagtggctaaaacggcaaaagtggattattctattttgcaaattttaacatagacagatttttgaagtgagactatcgcaaaatccttgaagcattcgcaagtgctagaagcgaaacacctacatcgccaaagacagcttcccacatcccagccactccaaacactcctaaaatgataaatacccccttgatacctagtgccaaagcaatgttttgagctgtaattgcacgcgtcttttgggcgatattgatggctatgatgagtttatccaagtcatcattggtcaaaatcacatcagaggtttccttgcttagatcactccctcctaagcccatagagatcccgacatcagcacttgagagcactggagcatcattgatcccatctcctacaaaggctgatttttcttgtttgtgcgattgaaaaagggtgagcttatcttgaggaagaagtccgccataggctttggagatcccaagctcttgggcgactttttggacatttgcttgctgatctccgctcaaaatcatcgtctcaattcccataccgtggagtttttggatacaggctttggcattgggtttgggagcatctctgagtgtgatgtatccgatacattcagatcctagtgcgacatagacaagcgtttcttgggtgtggatttggggatattggatgccaaatgtatctagcaatgctttattgcctacaaggatgcgatttccacagcattgggcatccatacctttacccgcgatctgatcgtgagaaattggcgtgtgtgtgatggagagattttgggcttgtttttggagggattttgcgatggggtgacttgagagatgttctgcacacatggcaaatccaagaatctcttccttggaatatgagctaagtgagatgatctgatcaacttcaaattctccatttgtcaatgtccctgtcttatcaaaggcgatcattttgagctgtgctagcgcttcaaggaaattggctcctttgatcaaaatacccttcttgcttgctccaccgatccctccaaagtatcccaaaggagtgctcaaaacaagagcacatgggcagctcaccataagcacaaccaaagccctatagatccattcatcccatgtgccatatcccaaaagtggtggaagaatcgcgataagaaaagatagcgcaaacacacagggtgtgtaaatcttggcaaatgaggtgattctcttctcgctttgagatttttgtgtgctggcttgttcgatgagagtgatgatctgtgagatcccactttgatcataggttttggtgattttgacttccaaaacgcccaaaagattgatactcccaccaaacacttcatcatctggatgacaaaagcgaggcattgattctccattgagcattttttcttcaagctcgctttcacctttgatgatgactccatcgcttgggatcttttctccagccttgatgatgacgatgtcatcgatttgtaactcccatggaaatactttgaggagtgtgccatcagattgctttttccaagcataagatgggcttagatcgatgagggattggatatttttgcgacttttgcgcacagcaagattctcaaaaaactctccgatacgataaaacagcatcacagcgacagcctcaaagtctgcaccgatgaaaaatgcggcaattgtggcaaaaaacatcaagaaattttcatcaaaaaattctttgttttttaggcgtttatatgctcctttgaatacagggatcccagcgatgagatagattccataaagcagtatttgagataggggagaagtcaagatgaaggctagggcaaagcatccaagaagagaaaagagaaaaaacaattcaactttggttgatggctctttgcttgcttctcgccattccaaaatctctatatttttttctacttctttgatggtttgtttagtgcgctccagatcttgtgtatccaaaaaaattgccccatttgcaaagtcgatcatgacatcttggatgaagggttgtttttgaagttctttttgaagagattgcgcacaatttggacaatctaggttgaggattttgtatttcttcatctatttcctttgcacaatgggctatgtttttgtgaatgaaaatcatctggatggataaataccacaactcctgttatttttctttgaggcgttggacagatgctccaagagagcgtagtttctcttctagtccttcatatccgcgatctagatggtagattctgtgtatttgtgtgcaatcttgagcgacaagtcctgcaaggatgagggctgaagaggctcttagatctgttgccatcacatctgctcctttgagctcttcttctccaatgattgtcgctgtgtgccctttgagtgtgatatttgctcccattctttgaagctcattgacatgcataaagcgattttcaaataatctctcttcaatcgttgaagtgccctcacaaaccaaggctagagccataaattgtgcttgcatatctgttggaaatcctggatattctgtcgtgatgagctcaaatgccttgcgttttgtagcaggaagaagagtgagtgaatcttgagagatttcaaagccaaagccaatctcttcaagcttatctgtgatcgcttcaagatggtgggggatcacatggtggagggtgatggaagagttggtgatcgcaccagcacaaagataggtcccagcctcgattcgatctgcaatcacgcaaatatcttgcatatccaaaagttccccatcacttccttggatttcaagctcactagtcccaatcccctcgatctctaccccagcatcctttaaaatctcacagagctgcactacttctggttctttggcggcattgatgatctttgttttacctttggcaagtgctgctgccatgagaagattttctgtgcctgtgactgtgattttgtcaaacataatgttggcacctctaagcccttgtggagctgtcgcgacgatgtagccatgttgaatctcaatctgagcccccattttctctagtgctttgatgtggagatctacgggcctagctccgatagcgcatcctccaggcaaagagacttcacagtgtctaaagcgcgccaaaagtggtcccaaaacaaggatagatgcgcgcatcttgcgcacgatatcatagtttgctctagtctcatggacgctagaagtatcgatatggatttggttgttttggatgtgctgatagcttgctccaaggatttctagaagttttagcaaagtattgacatctgcgacattggggagattggagatggtgatcggatttttgctcaaaagagtggctgtgaggatggggagtgctgagtttttggcaccagagatattgatacttccgctaagttttggtgtgtggtgaattttaagaaagtccattgtgatcctttgttagaaattgatggagggctttgtattcttctttgctaaaaaaacgcgtttttccgcaagggagggcattgagtgaggcaaatccatagctaatccttctaagatcaagcacctcacgcccaaaatgagcaaaaaatcgcctcagctctcgatttttcccctctgtgatagagactttgatcttggaataattgcgtgagtttttgataatcgtaaaatcagcaaaaggagagaagttcatggaagtgatggtgctgtgggtatgagctccagcgcgtgcatcttctagctctaatccattttccatagcttcttgcattttttgagtaatggagccattgagcttgagaagatagacgcgctctagattgctttgcataagtttgcttacaacctctttgctatcacttaggatcaaaagcccctcagatgcataatcaagacgcccaacaggcagaaaatgggagaattgagagcttagagagtgatagatcgttttgcgtccgcgatcatcttttttgctgacaagttctcctttgggtttgtgatagatgatgagagtgaagtgatcatcttttttggggcgaagctgtttcccatcgataaaaactctttgatcttctttgaggatagaagtgggggttgccttctttttctcgatattgacacggccttgtgcgatgagggcatctgcttcgcgcctagagtatttgctgtgatgggagatgaatttgtttagtctcataaatctctccattgcattgtattgagtgtggttttgatcgagctgtgaaccttgaggggtgttgagaagatatagcactcatcttgatcttgcaagatgattttgaactcccgctctccttgatggctttgagcaagtgtagcgatctgttctagaaggctttcttgggcatcaagaggcaaaataagagcaatgggggtagtagaatcctctgtggtttcagcaggtttttcgtctttgtgttctctcttttttgtggttgttttgacttctttggcttcttctagggagagaatctcaagaaggcgtaaggagggcttatcttctttgtattcgactttgcatttgatggctaggggtttttctttgtcttctcgttgttctaaatcattgagagtttgctcaaaaatcatcagatcaaattttccagaataatcaaggagggataggatcccatagggtttgcctgattttttgctgatttttctttggatgtcaagaatcttcccaactagcaggacacttgatccatctccatatttttcaagttcagcgcttttggccacttttttgatctcattgatttcttttttgaagctatcgaggggatggccagagatatagatccccatacattcatattcattttccaacaaaaccaattcatcatcttcatttatatctgagaaatgaagagaaatggtggagggttcgttttctagctcaccaaaaagagagttagccatcatagcattggctttgtctttgttgcgcccagcctcacaaattgcatcaatatgtgtgagcatacatttgcgactatagcctaacccatcaagacttccagacttgatcaggggttctaggacgcgctttgagatcttgctccagtcaatgcgcgcgataaaatcttctaggtttttaaactccccatttgtgattcgctcctcgataattgcctcaatcggaccatctccaacacccttgatcgcacttaagccaaatacaatcttgcgctcaccatcaaattcattgacaccaaaatcatgctcagagatattgatatgtggagggatgacatcaatctccatcgccttgacttcatcaagatagtgtgcaacagcctcaatcttacttgtctcgcttgtaagcatcgctgccataaactcatgtttgtaataagttttgagataggcagtttggaatgtgatcatggcataggctgcagagtgagatttgttgaatccatagccagcaaatttcacgataagctcccaaagttcctcagccttagagcgatcaaatcctttttgttctgctccatttgcaaaagtatctttgaggcgatccatctcttctttgatctttttccccattgctcggcgcactaggtctgctccaccaaggctaaatcctccaatggtttgaacaatctgcatcacttgctcttgatagacgatgacaccataggtgggtttgaggatgggttcaagttcgggaaacatataagtgatgggtttgcgtccatgtttgcgatcgatgaagtcatcaagcatacctgattccatcggtcctggacgatagagagccaaaaccgcgatcacatcttcaaatgtcgttggtttcaggcgtttattgagatcttgcatacctcctgattcgatttggaataatcccaaagtatctccgctctgcatcgtttcatagacttttggatcctcgatattgacacgcaagaaatcgatctctttgttgtaacgctttttgatgagcttgagtgcatcatcgattactgtgagggttttgagtcccaagaaatcaaatttgatgagatcaacaggttcaagccacttcatagaatactgggtgactgtggctcctcctaggcgctcacttgtataaagtggggttttgtgccagagttctttttcagaatcgatcactacagccgcggcgtgagttccggcattgcgtttgagattttcaagtttgagtgaaaaatcccatattttggcagctaattcatttttttcaatgagttctttgatctttggctctttatcataagccattttaagagtgattcccaaatcatctgggatgagtttggccatcgcatcagcttcattgtagggcatatcaaatacccttgccacatcgcgaatcacccctttggctttgagttcaccaaaggtgatcacttgtgcgacattgaatttcccatagcgctgtgtgacatattcgatgatctcccctcgtcgtctctggcaaaaatccatatcgatatcaggcatgctgacgcgctctggattcaaaaaacgctcaaagagtagatcgtatttgagtggatcgatattggtgatcttgagacaaaaagccacaagactacccgcagcacttccacgccctggtccgactgggattccattgcgtttggcaaaattgacaaaatcccacacaatgagcatataacctgggaaattcatcttggtaatgatttcaatctcttgattgaggcgttcttgataggttgcgtgtagttcttggggaatgatttctagacgctctttaagtccttcttgacatttataagcaaaataatctgcatcgcttgaaatcccatgtaatccctcttgctgtgcatattcttgggtgaatctaaaagtcggtggtgttgcgggtgtgaatttgagtttttgttctccgctgtttttatcgataatgtctgtgtttttgagagggaggatgaggttgcatttatctgcaatctcttgggtgtggcgcagagcttcagggatatcagcaaagatttttgccatctcttctggggatttgacaaagaattcatgcacggtgtgattgaggcgattggggtcattcatcgtgcgtccagttgcgacacacatcgcgacatcttgggcttgtgcatcttctttaagtgtgtagtgtgtgtcatttgtagcgacaagcttgatccctgtctcaagtgagagtttgatcaataaatcatcgatatagagctgtttgtcgatcccatgtctcataatctcgatgtaaaaatcatcaccaaaaatatcttgatattccaatgccgcttctttggcagcttcatatccctgtggattgtagggttttttaaactttttgttactactatcgcgatagatgggattggtagaatctaggtgatagcttatttctccagcaagacaagctgaggagcagataagccctttgctatgttctcttaggagttttttgttgattcttgcataataataaaatccatcaatgaaggctctagagcttagatacataaggttttgataaccctcataatccttggcataaagacagagatgaaatcgtgctttggagcttttatcactcaaattttcatgattgtgaagataggtttcaatcccaataattggcttgatgccttcctcaagcatggttttataaaactccattgctccaaacatattgccatgatctgtcatggcaacgctactcatacctagctctttgatttttttggccaagattttgattttgttggctccatcaaggagagaatattctgtgtgtaagtgcaaatgtgtaaagctcatgatattccaattatttggggtggtttttggtatggattataatctaaaagcatcgcaaacaaggaatcaatgcgtttaaaagtggctagaggctggagttgagccaccctgaggtgaataagacaaaaataaaacaatcaggcagatgcttggattaccatccaagcatacgagtggtgcctctactgttgctattgatgatgcgatagttttggcatgaagtttcaaagccattttgacaggcaaaagcaaagagttccattgcgcgcagtttgtcttgcaaaactccacgaccattgtcatagagcactccaaggttgttgcacgcacttagcacgccattttgacaggcaagatcgaaatacttggctgcattgtaatagttgaggggagcacctgcttcacctgtagaatagagatagccaagattagcacatcccaccatatcgccttgtgagcaagcgatgtagttcatatctagtgctcccaaacgatccttatcgactccatacacattgtaggtattgctcataagccctaagttgtaacatcctagttcgcttcccaaattacatgctttgttgtaggcattgagggattggtagtagtttttgggagttccgacaccattggcatacatccatccagcattggtgcatccgatattatctcctccctcacatccgacaagataatattggagtgccttctctttgtccatttgcactcccacaccatcatcataagcaatggctagattggtgcaagctacagcatccccaccagagcaggcttcttgataatatcctactgctttttgttgatcattgatggtgccctgaccatacatatgcataagtcctgcaccaaaacatccagcaggatttccttcattgcaagattgtgagaaaagtttgagtgcttgctccatatccccttttttggctagagcgattgctgcattgagagtgggttgagcttggaatttatcgcgtgcgaagttgtcagcataagtaggtgctatatcacgcgtgacattgggtgtaggtgcgtttgggggaagagccgtagaggggtctctctgtcttgatgcgcttggagcttgggcgatttgctgtgaggtttgaggagtcgcctgaggttgctgtggtgccccttgagcaggttgcatcccattcccttgagctccatagaggagccctatgcccaaaatcatacttcctaaaactttattcaacatttccctacgctccttcttcggatttggcaaggtagaagcaaaagtagttccatttagtgcaatgcatcattgagcttgatttctcgattgcttctaaaggcgatcattgcacctgttttggaatcttgacggaagtggattccattttttttgcttagctcgcgtcctttgt

SEQ ID NO: 1002 - DNA, 23075 bp, synthetic construct
  misc_feature 1..23075: note = Synthetic
  source 1..23075: mol_type = other DNA
catcaaaagcggcaaggtcttcatcgacaatcagacttgcacagaaattgataacatcgtcgtgaatgaacgccaagttcttgcagactgcggaatcttgatcgtggtagcatgtatcaacaaagcagaacaaaaacttctcaaagacacccaaatcactacgcttggcatcctcaatcccaaagaggaaaaggcctatgcaaaagagctagaaacattgctggggatgcatctcaagaatctcaaacccgaagtaataggcaatgccaaattgctggaaaatgatctgcgcaatatgttaagaaaagtgcttttcaaaaaaaccaagaaatatcccaccatcataatccatacttttctgaggtgattcatggattgcatagattttggccaaattgccaaaaaagtattagatgatgaggcgcaagaactcttaagcatcgataccacaaggattgattttcctcacattgtaaaaacaatcttgcagatgtctggcaagctcatcgtcactggtgtgggaaagagcgggcttattggagcaaaaatcgcagcaacacttgcaagcactggcactccgagctttttcatccatcccaccgatgccatgcacggggatttagggatgattggcaaggaggatgtaatccttgccattagctatagtggtgagagtgatgaactcatctctatcctccctcatctcaagcaccaaagccatgcaatcatcacgatgagcaaggatgcacaaagctcgctttctaaaatgggagatttcttcatccccattgctgtgagcaaagaagcctgccccatcaatgctgcacccacaagctccaccaccctcaccctggcccttggagacgcattggcagtttgtctcatgcatgcacgagacttttccaaacaagactttgcatatttccatcctggaggaagcctagggaaaagattatttgtcaaagtcaaagatttgatgcagacccaaaacctccccctcatcccaccagagatgccattaaaggaggccattatcaaaatgagtgaatcgaggttgggaagcgctatcttaatcgaggatgatagactctatggggtactaagtgatggggatcttcgccgcgccatgatgcaaaaagacttcaacctagagtctcctgccaagcgctatgccaccctatcgccaaaatattgtgacaatccactcctactagcttgtgaggcgctggaattcattgaagaaaataaaatccaattactcatcattacagaccctgccaaacatatcctaggggcaatccatctgcacaccttgattagcgctggcatcaaggcataaaaagaagccagatagcctagagaagtaatccaaaaagcacactccaaaacataaagccaaaaaagccttagcaagtcagtcccaagccaggaaatcgaggtattggagaaactagaggccgacagactcaaacaaggccctgaaatcagaaaagcctaaaattccaaaacccccaagatttcccccaaaaacaaaaaaaagcccaaaagcccagcttttttcaaggatcatcccgcaagctttttggtatccagcataatcatcaattcctcattggtctgtattgcaaaaacagcaatcttgctatcgcttgtgctaatgagctctgaactctttttgttttcctcttcattgattttgacacccatgtatgcaagctctttgcagatctgagagcggaaataagaggaattttctcctacccctgcagtaaatataattccatcgataccctttaagctcacgccaagtcttgcaatctcttctgcgatgcgaaaaatcataaagctaagcgcacgcgctgctccttcatgagtatccttatgacattccaaagtataaatattagaactaaactctgagagcccactcacccctgatttgtagtataaaaaatctcggatgtcatctagctcatagcccttattctctatcaaatacagcaagatccccggatccatcgaccctgcgcgcgtccccatgggcacgccctctaacgcagtgaaccccatggtcgtcatcacagattttcccccaaaaatcgcacaaagcgatgcgcccgaaccaatatgggctacaacaagctttttttctgccatgtcgggataatcttcacgcattctatgcacaatatacgcataagatgtcccatgcatcccatacctcctcacaccctcttgatagagctcataggggatggcatacatggtggcattgccctgcatggtttgatgaaatgctgtatcaaaaaccgctacttgccaaagatctggaaacatctgtcttatcaatttcatgacacgtaaattatgaggttggtggaggggagcaagaggaacaagagcttcaatatcagcaattaccctatcatctagcagcgcgctctgatgaaattttgttcccccatgcacgacgcgatgcccacaggccttaagtctatattctttgaaggtatcaaaaatccactggagcaaatactctatcaccagcgcgtgattatgcgactgcaactccccccattgatgctcgccaatcacctcacctttggcatccttggccttaaaacttggggcaatgtcaatcccttgaacctgtcctgcagcaatcacactcccatcatcatgaaaaatcttgaactttaaactcgaacttcccgcattaatcactaaaatcatctcttccattggatttccttatcgttggtttgtgggttattgacttgtgagcactgctagtgctgaagaagccacgcgcgcttgtgcatcatctgctcttgaagtcaggataatggggacctttgcccccagtacaatgcctgccacctttgcatgcgctagatataccaatgctttaaataaaatattgccagactcaatatgaggcacgatcaaaatatcaggatctccacacacaggagaatcaatttttttaatcttagcagccgcggctgagatcgcattatcaaatgctagaggtccataacacacaacatcttctaattcttcttgggctcttttagcaatttctgcagcctccatggagcttggtattttttcatagggcatttctactgcgcttaatatcgccactttaggagttttaatcccaattttttttgccaaaaccacgctattgtgcaaaatgctgtatttggcccttgcatctggggcgatgttgatagctgcatccgagacaataagagccttatgataggcaggcacatccattacaaacgcatgagaaacatgatgctctgtgcgcaatcctgcttcttttttgaataccgcactcataatatcattggtatgcaaattgcccttcatcaatgccttaacagcacccttgctagcaagggctactgcagcatttgcggcctcaatatccgaccccgcctcaaggatctcaaacaaagagatgtctttgccaagctccttggcagcctgggcaatcttttgtgattctcccaccaaaataggctcaatcaagcccgcttcaaaagactcaaccacaccccccaagcttgtaatatctgttggctgggccacagcgaccttgatcctgccttttttcttagcatgcgccaaaatatctccaaatacactagattctctacctttttgtttttgcatttcgatcccctttcatcaattttgatgatttagttttttaagatttctattactttctgacagaaatcttgtgaaaattttagcaaaaaatacttttgatctcagttttgttgcatttttttaataccataattcttctttgattttctttgttgcattaatgataaatgggcacaattgaagcaatattaaatcattttaggactatgaaaatgaaacatcttttaggcatcggaatcgcagggaattttgccaatcatttggagcaggcaggagaagcagacggcttttgtaacatcgccatcgatgatgaagatggaccaaagggaatttttcctttttatatcccaggtcatgagagattggggcgggattgttttgacaatcatcaattggtgctgcctcaagaccctagcctcaatgtacaagcagaatcagaagtggggctagaatgtgagattatctatgagggtgatgaggtagtggacttgcatcccaaatttttcatggcatttaatgatgcatctgtgcgcaacgacaaaaaagctacaaaaatctctcaaaaaaagaatttttcacctggctgcaagggctatggcagcaagattcccatcgacaaatttgaaagtgggggcatatgcgatcatttctccatcgcttcttttatagagattgatggggcggtgcatgcttatggagaatgctctccactcacgggatatagctatttttacaagcgcctcatttgttggctggtaaataagctcaacaaccaaaaagatgaattcatcctagaaagcttcaaagacctagtcttcaaacaccaaaagccaaaaacctgcatcattgcaatcggtgccaccaaatatacagaattgggggaaaagcggtttttacatgatggggataaaatttttatcgcggtgttccataatcaaaaatacacccagcagcaaattcagaacttctttgctagcaaagaattcccaaaagatgaggggaatctctcttttattgtgcaagaagtggtaaaaaactagtataatgcacggaaaaattaaggagctctaaatggcagacgtaaatattacccctgaaagcatcatggaaaaactaaaagagaagggggcgaagctttcttgtccttcttgtcatggcaaagatatcggaattgcacctggtttcacaaatatattattgcaaaataaaatcgatggaagccttagtgtaaatggccctcatgtccctgcaatttacacagtttgcaataaatgcggatccatgaatcctcatgccgtagcagtgctaggaatcctaaaccagcaataatactactcctggcttttttgtaaagctgggcactccaaatccactacttctacttttcaaaagtttctcgcttcataaattttctcagattttttaaagttttgtttttcgtctttacaagttctccaaatcttagcagaactattttgcaaaattttcagactggattttgcgggttttttcgggcaaagggatttcttgaagtgagattttcaaaaattcatcccgactcaaaagctcactaaattccaaaaatttccacgatgcaacaaattccctctaaaaattagagttttttaccgcgagtgtattcgatgaggccctggatattttgcacatgatttggcagggtcaattgtgcaatctcaaatactttcaaacaaataaacgcatcgctaagagcacgatgctgcttgtcaattccaatccccaaaaaagcattcaaatgacccagggaatagcgcgcagacaaaatcccccttctggccaattccacagtgcataaccgcggatttagcaaataaggctcgttgtatctaagcagtcgatcgctaataaatccataatcaaacacaacattatgcgccacaaacacactgtttcccaaaaacttgcgaaatctttgcagaacctcccgctcactgggcgcatcggcaagcatccccgcatcaatccctgtgagctcagtgatattttctggcacagattgactaaatacaagtgtctcaaaggtatcaataatttctcccccatgatatttgattgcgccaatttctatgatgctagagtgattaggcttagatcctgtggtctcgatatctacgaaacaaaatacaccatctttgatgtctttttgcaaggtgccaagctcaagcctatccccactctcctcaatccataggccacaatcccgcaataattccaaaatcagatcctcatcaaaaacccccaaaatctcacccatgtaggggaaaaatttctccctttcaatagaatctttttggaactttgcataaacttttttatacattatcgcaaagaatccacggcttttttataatcactttggttgaaaatatagctacctgccaccaccacatctaccccgctttctttaagcaaagaaatatttttttcattcactccgccatctacctcaataaggcatttaggattgtattcttgaatcctatgatgcagcatttttgctttcttgcacacacttgggatgaatttctgtccaccaaatcctggattcacgctcataagcaataccatgtcaatatcttctaaaatatatttcagatcttgttcgctgctatggggatttagcaccacacaggggcgtatgccatgtttcctgatactctcaatcacgcggtgcagatgcttgacctcctcgatatgcacactcataaattctggcttcaagggcgcaaataactccacaaaaaaactaacattctccaccatcagatgcacatctaggggtttagaggcatattttgcaatctgctccaacacaaccggaccaaaggtgagatttggcacaaaatgcccatccatcacatcaatgtgcaaaaaatccgcccccgcatcacaaagggcccggatctcctctcccagcctcataaaattggcagacaaaagacttggtgcaaccagcattgctcctccaaaaaacccaaaatcactcagggcgtataatacaataagatataataaaatccaaaaaaaatggaggtagaaaatgcagcaaatctttgatactctcaaacacatcgctttagaaattcatgcccttttacaagattctaacaccacttatttggagagcacaaattccacaggagacgtgcaactccaagttgatgtcatagccgataaactcattgaagagagattgctcgcactgcctagcgtgcgcggagtggcaagcgaagaaaaaccaaatgccatagaaaaagcagaaggagagtttttgattgcctatgatcccctagatggctcttcgcttgtagatagcaatcttagcattggttcaatttttggaatctatgcacaggatttccaaggcaaaaatctcattgctagcgcctacatcatctatgggccgcgcacagagatcgtgttcgcacacaaaaacatctcctatcaaagctacaatggcaagcaatggatccaaaaacccactcccaaactccaaacaaaaggcaagattagcgcaactggtggcacgcagaaacattggagcaaggagcataaggccttgatagaatctttttttgctgcggggtatcgcctgcgatattctggtgggatggtgccagatttgcatcagatcctcatcaaaggtggggggatctttagctatcctgctacaagtgatgcgcccaagggaaaattgcgcaagctttttgaagtttttccttttgcatatatttatgagctttgcgggggagaggccataggagaaaatggagtgcgtttgttggatctgccctgtgcgcatttgcacgataccacaccttgctattttggcagtcttgaagaaattgcattatttaaggagaaaaaatgagtgaaaatcctgcaaaagatacctttgcattgcagctagatcaagcattgcaggacttgcaaaaatgccaaaaagagaggaactacgactcctgtctgaagtgtgaaaaattttttgaatgccctgtgcgcaaaagctatgtcagcgcagtgtataaaagcatgaacaaaggagagcaaggggggtttgaattttgatatggatcgacatcacagatcccaaatatgtattattttttcgctccctcattcccctgcttaagagcctagattctgtagttgttaccactagaaaaagcagggattatgaagagtgccatgccttgctagagctgtttcagattccatccatttgcattggcaattacgggggcaatgagatttttgacaaactagaagcaaggctaaaacgtcaagagggatttttggagcttttcaaacgcatcggaaggccgaatctttttatcactggagtgagcgtggaggggacacaaactgcatttggcctaggcatccccatcattcaattttctgatactccactagcaagtgataattttgatttatcaaaaatcacggttgtagccaagcttaccctgcctctaagcagtctcatcttccgcccctttgtcgtccctgagatttgctatagtgcgctaggagtggagccaaaaaacatcattgcctatccttttattgatgtggcactctggctcaaagacctgcctcaaggagaagattttcgcaagcgctatcacctccccaccacgcgccctacaatcttgctgagagaggaagaatacaaagcccattatgtcagaacaaaacttcccataatctatgaaagcattcctcttttaaatgaacttgatgcaaatttggtgatcatgccccgctatggaagcgcggaacttcatagacagttttcttctctcaaaaatctcacaatcttagaagaaaaactcccaccccaagacttttatccctttatcgacatcctcataggaggtggaggaacgatgaatctagaatcctgctatcttggtatccccacgatctctactcgatctctttttttgtttcatgataaatatcttttggaccatcatctcatgcaacatcacacagattcccaagcgctctatcatcaagtaaaagcctggattgcacaagagacaaagcgcaagaatcagagggaattttttgaatcttctcctgcaaactttcaagaaatctttgcaattatccaggagagatattacaaacatcaaaaatagttaaggactggcgaacaatttttttgactagattttttgggttttggtaatgatttaggagtaaattggtaacaactcaataccaaaaaagcatgcaatgaagccatgtagccccattctcatgggcttttctttaagaaaaaacgataaaatccagcaataatcgagtcaaaaaagaggagcgcaaatgaaaaaaattctattgagtctgttgctgtttcttgggatgatgcatttggctcatgctagattttttatcggcagcaatggaggatttgggtttggatttggaacaaaatcgatccaaaacttggtctatagttctgagttgggatatcaatttttttttgaacccaaagagcgtgtaggaatgcgtgtatttgggcaattggggtataacaatctgctcacctcagattctgtcatcgccacgacgcagcctgcattgggattagacatgctttttgagggcaccaaggaagatcatttttttgcctttggggtatttggcgggatacaagctggaatcaactccgccctccccatgagtcgcaaggccctggcacggctagcaggccttagtcctagcgatcctgtgccactgtatcgactcaactttttgataaagggaaggattggcatgagctttatttttgtggagcatcacagggtggaattctttgcgctcattcccattgcaccacgatccatcaacgccaaaaaagactacatcccccaaacctataatttcatgatgggttataaatttgtcttttgaaaacacttgcacaaaaacccaaaaagcaattcaagccctccatttgaaaagccaaaaaagccgcttcaagaacccaaacaaatagccaatctttggccaggagccttgagggaaaaattagtttttttcctctcgcaaaaacccttcttccaaagtaacaaaggcaattttggatgatgacaaaaaccacactcctgcaattcaagaaaatgccccctcttttttctctccaagataacgagggaagggagcaaacatctcttttgcaagaccacttggagtaaattcttaaaaatccctaattaaaacgaaagtgctaagatttttccaaacaaagtaggagcaaacagtgataagaactttgggaatcgacattgggattgcaagtattggttgggctgtgattgaaggagaatatacagacaaggggctggaaaacaaagagattgtggctagtggagtgagggtttttacaaaagcagaaaatccaaaaaataaagaatctctagccctccccaggacactggcaagaagtgccaggcgcagaaatgcgcgcaagaaaggaagaatacagcaagtaaaacactatctctccaaggctttgggcttggatttggaatgctttgtgcaaggagagaaactcgcgacactcttccaaacttcaaaagactttctctctccctgggagcttagagagagggcattatacagagtgctagacaaagaagaattggcaagagtgattttgcacattgccaaacgcaggggatatgatgatattacttatggagttgaagacaacgatagtggcaagataaaaaaagcaatcgcagaaaattccaagcgcatcaaagaagagcagtgcaaaacaatcggcgagatgatgtacaaactctactttcaaaaatccctcaatgttcgcaacaaaaaagaaagttacaatcgatgtgtgggcagaagcgagctaagagatgagctaaaaacaatttttcaaatccagcaagagctaaagagcccctgggtcaatgaagaactcatctacaagctcttgggaaatcctgatgctcaaagcaagcaagaaagagagggactcatcttctatcaacgtccgctcaagggctttggcgacaaaatcggaaaatgtagccacatcaaaaaaggagagaatagcccctatcgtgcgtgcaaacacgctccaagtgcagaagagtttgtcgctctaacaaagagcattaattttttgaaaaatcttacaaatcgccatggattgtgtttctcacaagaagatatgtgcgtttatttaggaaaaatcctacaagaagcccaaaagaatgaaaaagggctcacctactccaaactaaaacttctgctagatttgccaagtgattttgaatttttaggactggattatagcgggaaaaaccctgagaaagcggtgtttctttctttgcctagcacctttaaactcaataagatcacacaagataggaagacccaagacaaaatcgccaatattttgggagcaaataaagattgggaggcgatcctaaaggagttagagtctttgcagcttagcaaagagcaaatccaaacaatcaaggatgcaaagcttaatttctcaaaacacatcaatcttagccttgaagcgctctatcatctcttgcctttgatgcgagaggggaagagatatgatgaaggggtggagattttgcaagaaagaggaatctttagcaaaccccagcccaaaaacagacaactcctccctccactaagtgagcttgcaaaagaagagagctattttgatattccaaatcctgtgttaaggcgggcattgagtgagtttagaaaagtgctcaatgcgcttttagaaaaatatggaggctttcattattttcacatcgaactaactagagatgtctgcaaggcaaaaagcgcaagaatgcagcttgagaaaatcaacaaaaaaaacaaaagcgaaaatgacgctgcatcccaattgctagaagttctagggcttcccaatacctataacaatcgcttgaaatgcaagctttggaagcagcaagaagaatactgcctctatagtggagagaaaatcaccatagatcatctcaaagaccaaagggccctgcagatcgatcacgcattccccttgagcagaagcctagatgattcccagagcaataaagtcctctgcctaacttccagcaatcaagaaaaaagcaacaaaaccccttatgagtggcttggcagtgatgagaaaaaatgggatatgtatgtgggtagagtatatagcagcaatttttctcccagcaaaaagcgcaaactcacacaaaagaatttcaaagagagaaatgaggaggatttcctagcaagaaatcttgtagacactggctatatcggaagagtgacaaaagaatatatcaagcattctctatccttcctgcctctccctgatggcaaaaaggagcatatccgcattatttcaggctctatgacttcaacgatgcgaagtttttggggagtgcaagaaaaaaatagagatcatcatctccaccacgcccaagatgcaatcatcattgcttgcatagagcccagcatgattcaaaaatacaccacttatctcaaagacaaagaaacccacaggctcaaatctcatcaaaaggctcaaatcttgagagagggagatcataagctttccctaagatggcccatgtcaaatttcaaagacaaaatccaagaatctatccaaaacatcatcccctcccaccatgtgtctcataaagtcacaggagagttgcatcaagaaaccgtgcgaacaaaagagttctattaccaagcttttgggggagaagagggggtaaaaaaggcactaaaatttggaaagataagagaaatcaatcaggggattgtggataatggagcaatggtgcgcgtagatattttcaaaagcaaagataaggggaaattctatgctgtgccaatttatacttatgattttgcaataggcaagcttcccaataaagcaattgtccaaggcaagaaaaacggaatcataaaagattggctagaaatggatgaaaactatgagttttgtttttcgcttttcaaaaacgactgtatcaaaatccaaaccaaagagatgcaagaggctgtactagcaatctataagtccacgaattcagcaaaagctactatcgaattggagcacctcagcaaatatgccctcaaaaatgaggatgaggagaagatgtttacagatactgataaagaaaaaaacaaaacaatgacaagagaaagttgcggcattcaaggacttaaggttttccaaaaagtcaagctctctgtgctaggagaagtgctagagcataaaccaagaaatcgtcaaaacatcgccctaaaaacaactccaaaacatgtttgatgaagcctttcgcactctttttatgagcaagcccgccaagctttctcataaaaacaataatctcatcatccatggcaaagaagatataggaatccctcttagagacatccacaccatagtgattgatacccctcaaatcaccctcacttcttcattgatgaaagaattggcccaatacaagatccttgtatttttttgtgatgattcccatctgcccagtggagtattctcgccctttcttgcacactaccgcagctcagccatactcgatttgcaaatccatttttccaaacaaaacaagtcaatcctatggcaaaaaatcatccaagcaaaaatccaaaatcaaacaaatcttttaatgcaagaaaacaaaacttccacagccacaaaactccaagcactgcaaaaagcagtcaaactagcagatggcacaaataatgaagccaaggcttcagccctttatttcccctctctttttggcaggggattttcgcgcaaagacttctctcccatcaatgcagccctgaattatggatatgccattatccgaggctgcattgctagaaacctcgtaggttcagggctcattccctctcttgggatctttcactccaatcaattcaatccctttaatcttgcagatgatttgatagagccctatcgccccttcgtggattctagagtgctagccctgaggatagaaaatgagctcacactctcccatcgcgtggaacttgtcaatcttttgaatacaaaagttttgcttcaaggaaagttttacccatttcatcgctccatcactcgtatggtatggagtatttcaaactttatttgcgatagaggcaaaatgatagaattgcctatcttggacaaggaaagcaatggaagagaagtttatgagagttttagtgatgtttgacatgcccacaaaaagcaaagaagatagaaaggcaagtgccaagtttcgctctacacttttgaaagagggctatttcatgctgcaattttctgtatatgtcaggatttgcaaaggagtcaaaagcgcaaatacctatcttgaacgacttcatctctatttgcccaaaaaaggacatatcagagccttgattttgacagaaaaacaattcgatcacatgaaaatcttgataggagaaatttcgcaagcacaaaaggtccaaaaacctactccgctcactctgttttaggctcggtttgaggggatgctaggcagttaccccacagaggaccgaaaactctttattttagccacatcccacctcctgaaactcccttctttaggggatcctcaagaggtgtattttagcataaacatatttatgaagtggctaaaaccttaccagtcgatacacggctgcatcctcaattttagcataaacatatttatgaagtggctaaaacctgaattgcactctattttggatagtgcttattttagcataaacatatttatgaagtggctaaaaccacatcaacctgcgagcgaagaagtgaaggattttagcataaacatatttatgaagtggctaaaacatattcgtacaccacgaatcaatacttctaattttagcataaacatatttatgaagtggctaaaaccgttaaactagtgaggtttccaaggttcaattttagcataaacatatttatgaagtggctaaaacgggctgtgtctttgagtgagaactttgaccattttagcataaacatatttatgaagtggctaaaacctatttttataaatcaagatttaggggtagattttagcataaacatatttatgaagtggctaaaacctattgcttcaaagatagagaggcacacctattttagcataaacatatttatgaagtggctaaaacctttgattcataagataactccgcttttaaattttagcataaacatatttatgaagtggctaaaacaaaaagattctgacttcttagttactagaaattttagcataaacatatttatgaagtggctaaaactattcgtaataattttatttctagaataagattttagcataaacatatttatgaagtggctaaaacttcgacggttgaaacatcgattttatttttattttagcataaacatatttatgaagtggctaaaacgattaggagcggagtggctagactcttttaattttagcataaacatatttatgaagtggctaaaacatatgtatataatagggtatcaacacatatattttagcataaacatatttatgaagtggctaaaactagagtgtaggtctcctcactatagtcaaaattttagcataaacatatttatgaagtggctaaaactcacctaaattatgaaaggagagcagcgctattttagcataaacatatttatgaagtggctaaaacccttggttgttaattcatgcaagcgataaaattttagcataaacatatttatgaagtggctaaaacgcttggcatgaaatacaaatcctagatcaagccaagcaataccaaatgctccccagtcatttctgcgagaaaaacaatcaaaactccaaaaacctccctcagcttttccattccacaaaattaacatacacaagactggccatcaaagactggccaccaatgaaaaagtaaaaacaagtaggaagcatctattttctttctaaagagtttagactcactaatcagcagtttttatttttgattaaaagaaaattttatcatttaaattaagtgggagacagtaaaaagcaacacatatatccacattttattggcttaagagagtatttgtcaataaatatactttataatggcaagatttattttcttagaaagagagtttttcaaatgtttcaaaaatttcttatcaagcaagttcttaaaaagtggaattttgggcgttatgtgatcgagttttgggatggagaacaagtcaaaataggcgagggggagcctgatttcaaaatcactttaaaaaagccttttgggctaaatgccttctcccaagatcttagcttattttttggagaggcctatatggatgggaatatcgagatcgagggggattttgatgcgatttcctatgtgatgtatcagttcaacaaccaccatcatctcaacaaacacaaacacattacaagcaaaatccacacaaaacaagaaagcaaaaatatcaaaagccactacgatctaggcaatgacttctacaagctttggctagatcccacaaaaagctattcttgtgcatatttcaagaatcccacggatgatttgcaccaagcacaaatcaacaaaatcgagcacactctcaaaaaactcgacctcaaaaaaggcgaaaaactccttgaaattggttgtggctggggttggctctccatcatggcagcccaaaaatatgatgtcgaagtcgtaggcatcaccctctcagaagaacaacacaaagaagccacacaaagggtaaaagactgtggtcttgaggataaggtcaccatcatgctcaaaaactaccaagacttggagatggagaattattttgacaaggcagtttccattggaatgtttgagcatgtagggcgggccaacttccctctatactttagtaaagtcaagcagtgtctaaagcctagcggaagctttttgctccatactattttggcttcctttgagggagagaccaatgcctggatcgacaaatacatcttccctgggggatatctaccctccctaagagagcttattagcattgcgagtgaatttgattttcacttgcttttggcagaaagtctaagactacactatgcaaaaaccctagatatctggagagaaaacttcgaaaaggagattgaagaggtcagaaaaatgtatgatgaaagatttatcagaatgtggcgcttgtatctcaaaagctgtgcttccgcattccgagtaggaagtgctgatatttttcaatttttattgaccaaaggagtggacaacaacatcgccatgacacatgcaagaatctatcaagactaactccaccttcatagatattttggagggattcccaaatctcaaaaatccaacacaaagaaagcaaattcaccccccaaagagcctatgcctttgcgtttttgcaaaactggccttttccaaaatcataggcctttgcaaaaagataaaacatggatttagaggtttgtagaaatcccttctgcaggaggaaatctcatacgcatgatagagtcatcacaaacaagcgccaaatgattcagggccaaaaaagaggggatatcaatcaaggaaatcctacaagatgcaatgcaggatgtttcctttcaagaaatgccagcaacaaacccaaaaccctcaaaattcactatcgctttgacaaagcagggaatctacttgtagagactccaaagacccttgggagggttggggtagaattccaaagccattctcttgcttggcttggatgcaaatgcaagcttcctagaacttgcctaaaacccccgaaggctttgctccacccatccaggctatgcttttttgccatattttatagcaatgcttgcaaatgaaatcaaagtcaaagaattatctcactttggcttcaaacataaatacgcgcaagctccctattttctcattatcaaaaagaaaagctacaaaattttagagcaacagctttttttaaggaaaatttgattagtatcagagagatattcatacaaaataatattttatgttccactaaggagtcaaaatgaaaaaaatacttttaagcggattgctcttaggggggggacagtaaacttcgcgcaagcaagattctttgtcggtgttgaaggaggatatagtctagatcgcatctatggtgaaggagaattcaaaaaaagacctttgaagggcgatggttttaatattggtctcaatctaggcacagagcattatttcggacaaagtgaaatagtaggtctaaggtggttgctaatgggtggatatggacaaaatagtattgtagtaaaagattcttggaattttcaacatctaaatgctggcttagacatagatcttttatttgacataataaagcctaataaagatttttccttaagcctttttggaggaataataggtggaggagaagttttattcagcaaagcaacaacagatgaagaaggttcgagaatacccaatatcagttggacaaatttattcattaaaggaaaagttggattatcatttaggcttgttgaacaccatcgtttggaatttagcgcacttattcctatatacaactatgctcttaatgattttaaagtatattacaaaccctatacttttttgttgagctataaatttctcttctagtaatcaaaagttatgagaatttggtatcacaaaatctcatatcagcatcaactaaaaaacgcacaaaaatctgtctatatgacagattggtgggcttccttgaaagctcagcattctatcatattagggagtgaagatgaaaaaaattcttttaagcttattgctattaggagcgacaataaacttcgcacaagcaagattctttgtcggagttgatggaggatatagtctagatcatttatacaaatataaaaataataaaatagtagaatctgcaaaaggcgatggttttaatattggtctcaatctaggcacagagcattatttcggacaaagtgaaattgtgggtctaaggtggttgctaatgggaggatatggacaaaattttatcgaaaatattactttacatttatcaaactttaatgtaaatctagcactagatttactgatagatgtcataaaatttgacaatgattctgccttgactctttttggtggtctccaaggaggattactggggattttatcaaaagaaatgcaagaaggaaatacatctttaagggcattaaataatcaaaatctcttttccttccaaggaagagtaggactatcacttagaatcactaaacatcaccgctttgaatttagtttctacacgcctgtttattcgttttatatgttttcagatactccaccaaatgcctttgccaataatataaaaatgacattaggctataaatttctcttctagtaatcaaaagttatgagaataaggttttatttttttatcattttctttttgggagaagcgcaagcaaaagacttgtgctttctagtcaaagagattaccttatctccactagaaaacactctagaaaatcaaaaagccttcaaaaaatattttggctttggagaaaagatcgccaaagcctatacaaatcaatgtctcaacgaaaaatccatcaataaacttttgcaagaactcaatgagaagacgataaagaaaggatttttgacttcaaagtttggcatcttgcctcaagatctcaaaagtcaaaggcttgagatcaaactcgatatcgggaggatccatcagatcacctacaatcacaataatcttttcttttctttcaaaaaggattttgatatcaaagaaggggatgtcttagacttgcaaaaactgcaagcagggatggccaatctcaaaaaaatgacgcatatcgatgccacgatgaagatcctcccctcagatcaaaagaacgcgagcgatattgtgatccatgtagaaaagaaatcttttcctttttctggagtttatatatttgataatgggaatttaaaatttctttatcagcataccttattgcttgcctgggaaaatcctctaaaattgtcagataaattgcaatcctatcttttggcatcttttttccatgacgaaagaatccataaaaactatagtatctatcattctcttagctatggtgttccctttgggcaattctttttcgaacaaaatttagcctattcttttaatagctttcaaatcaagcttgcaaatttttctcccgtgtatacaggatatagcatcaacacagatacaagaatgagctatgtatttttgagaacacaagagcatagtctttcttttggactcaattttggcgcaagaatctctaaaaatttcttagaaaatgtcttattggtaacacaaaatagaaaagtattgctctattcatttttcttacgctatgccttgtctcttccaacattgcaattcaatgtagacttcagtggattgtatggacattccttggcaaatgaatttctccatgcttatgattatttcatcccggtagtcaatctctatctttatcgtccctttaagtttttcggtcgttctctcatctatacaggtgcgataaaaacacaagtaggaagtaataaactttatgcaaatgatgcatttatcatcggaggaagatacacagtgagaggatttgataggctaaattatagtgggcagatgggggttttgtgtagaaatgacctcaatttatatattccctttctcaaaaagtttcaacttgtccctagtataggatttgatgtaggatatgtaaaagacttgatgtccaaagacgatattgccttatctggtggtggacttgggatccagtggatacaaaaatacctcaatcttcaagcatggtggtattttgcgatgtttagttccaaatcaagtgttcccaaacagaattttttcttttctatagcattcaattggtaaaccaaaaattttctaaaggggtgattttgaaaaatgtttttgatttttttagagatttgctaaaataaaaatacttaatacttaaggtaaaaatgatgcgaaaaatttttttccctattctttttggttttttactcatcagcaccaaactctttgctaaagaggatatcgagtttttcatcggtgcagattatggacggatggcacatattaaaaattctgcaaagtttaaaggagggcaaaatatctacaattttgatgatcctctttatggacatctctttttgggtagttttggtgtagaaatgggcataggaaacacagagattttgagaaaaatctttcgatcaagggtttttatcgaaggaggctatggcaaatttggcacaaatcaaggctatgagcttgctggtggtcttcctaatgtgaaaatcaaatcattggaaaattattatgtaggtggcggggcagacatgatgctaaatattattcctttttcctatttctctctaggagtattttttggtatgggatatgatttcgtcatttcagatctcagcaccaaagggagctttttagggagcaaggcctcagattatagtggcgctcaaatttatttgagcggatttgatggaagatttttccataatgaaatttatggaagactgggagcatctataagatttttgaaaacccaacgtatcgagtttattgtcaggattcctgcgattgaaaatcaagggtttgcaaagatccatcgcacattaaataagtccaatggggaagtttatgcaaaagaaaaactcctcatcactacccctacttggcttatctcttacaaaattattttttaaggagtaaaaattgaaaaaatttcttgctatcttctttattttactctctagcacttatgctaagggaagttttttatttggtgctggaacagactacatttatgaaaaaaccaaatacgactccagtggtcaaaaggcacaggactgggatgtatttgccacaacaagacaagaaatcaatggcctcaaagccaacattaacataggatatgaatatttgttttttgatatcattggattccgacctatgattacattgggctatggggctttgttttcttccaaagacaatatcattgataggaaaccaagaaacagtctttctctagattcatcctatatcctcagtgcgcgggcatggttggatttgctaatcaattttcctattcctgcacaaaatttggaagtgggattttttgtagggggtggagctggcataggatatggcaattctaccttcaaagaaaaggatctcaattctctagagaccattcactcctttagtgaaaaaacctccctcaagcagtttcttacaagacttggaattactttcaaaatcaattctcagcatcgagtggatctatttgtaatcgcgcctgtttatagtatcatcgatatcaaaaactcaagatatggtgagattcacatcagagaaagaaatgaatttttgcccaatagcggtggtttgaattattattttttgttttaagggattgtgatgcatctaggattgaatatcgatcatattgctacgcttagagaagccagaaagataaacgatccaaatcccctagaagcgattttcatcgcaaagaattgcggagtttttcaaatcaccatccacttgagagaggataggcgccatatccatgaccttgatgtcaaaaggatactgcaatcctcctttttacccatcaatgtagaatgtgcattggacgaaaatatcatcgaatttctctgcgcacaaaagccctacaaaatcactttggtaccagaaaaacgagaagaagtcactacagaggggggattgtctctcaaaaatcctttgatcaaagatgtcataaaaaccttccaccaacacggaatcttggtggcgacttttgtcgatcctgatgaggaagccatcctattatccaaagaatatggtgctgatggagtcgaacttcacacaggtgcatatgccaatgctaccttgatgcgctatagcaatcttagccgcatgcaaaatagtattgtttctttgcaaaatctctcttccaaagatctcaattctcttataaagcagaatctaaaatccttgcattttgctagcgtccttgcgcacaaaataggactagaagtctatgcagggcatgggctaaactatcataatgtagaggccatcgccaagcttcctcatatcacagaactcaatatcgggcagagcatcatcgcaaaatcggtatttgtagggctagagcgcgccatactggatatgatccaaatca

SEQ ID NO: 1003 - DNA, 23072 bp, synthetic construct
  misc_feature 1..23072: note = Synthetic
  source 1..23072: mol_type = other DNA
atgatgggggtggggtagattatgcctttagtgtaaaaaataaaaagaatctacttgaagcattgccaacctttcgtaaaaaggattttaaagatagggtacatagcaaagaattggatcttaaggcaatagaaatagcaaagaagattgaaaaaattaaaatttattgtttaaatcctaatagcttattgagtaagattgttccattagcgccaataagggaggaatgttttataaaaatagaagataaaccagaagattccataagagattttgtgcaattaccaaatcagtcaaaagagatattagaaactaacaagttatttaaaaaatttaaaatatttctaaaacaagaggggttttttgatgttgcaagtaaaaacttattttttagaattcttagagattttgtattttttataaagatacttatgggatttgtattttttctttttagaagataattaatataaatcttaagaatctttatattaaaaaatcttcctcttcatcaatatctaaagaatatttttctggcattatgtaaggaataggattgtcattaaagcttgtggaggggttaagggaacaagtaagattgatataaattgctccattgatgcaataggtttgatcaagatcttggcggcgtattgtgctttgtccttggattatattacagagttgatttttcttgatagtgcgtataaaaataggattaatcttatttttatagacacttaccaatcccttgcaattaaatttaataaatttatcatatgccattttaatatgcattgcatttcttaaaggagaggttggttgcaataagatcaaaacatcaaaattctttcctattgaagaaaacttacttaaggattctaaaacacaatcaatgcttttacttttatcttgagcgctttctttgcttcttaaaaatgggacacttgcaccataactcttagcaatatctgcatactcttggctatcagtacatacaaaaacttcatcacaaacaccactttgtagggcactttctatggtatgtgccatcaagggtttgcctttgaagggttttatatttttgtcttttacgcccttgctaccactgcgagcaggaattaatgccaaaactttcataagatatcaataaactttttttggagttttattttccaaaaatctttatctcttaaaattttaataaacttatttgcactatctccttttccaaaattaaaactttgtttactattttctaattttaaaaccttattaatagcatcaaggatttcttttttgttttcttggacactgataatattttcttgttctttaaatcttccatcttgtcttgagccaatattaatacaagggactccatatataggagcctctctgattcctgatgaactatttccaataataaattttgcatttttaagtaaagttaaaaaagcttcaaatttcacagatttaaagagtgcaaaattagaatgatgattgagtttttcaaaagatttgatgataatttgtgagccaaggtcattatttgggtaaataacaataaaatttaactttgaagccaagatagcttttattacttgtttaatattgctttttaattgtttgatttctgtggtaacaggatgataaattaagattgcatagtctttgccaaagggtttaatttgataataatagttttggacttttttgaaactgggtaattttgaacttaacatcaggtcaatatctggagagccgatgatgaagattccattttctttttctccaagttgaattaggcgtgtttttgcttgtgaatttgcaacaaaatgaatatgagaaagcttagagatgctatgacgaattgattcatctatagtgccactaatctctcctccttctatatgagctaccaaaatattattaaaagctcccacaatagcaccagcaagtgcttccaatctatctccatgcacaacgattaaatcgggtttaaaatctttgacaaaagaagaaaattgcttgatagtatcagatagagccagatccattttttcttgatgttgatgtgtttttgctagaaatacttcattaaaaccatctttgtaaatctcaataaaagtttttccataaagatccaaaagatgcattccgcagacaaaaattttatacttaaattttttgcttttatctatttctttcactagtgcttttatttttccccaatctgctctagttccacttagaaaaacaatttttttcattccaccatttcccaagagatatgtagatcttttttaatatcacattttgctttcttcccaagaatttcttcataaaattctgccttaatctttccaataccaggtctttttacccataaattatctcttgtaaagatttctccctttttgattgaagtgatgcttacacaagttgcaaatgcaaaatccatagttacttgttcctcttttagggcttcttttttaccacctcgcattacaaaaatttcttcagcagattttaaaagatcttttgcttcttcttcatccattgagcaaataacatcaggacctatcctatttttatgatctacaaaatgtctttctacaatacttgctcccaaggctatagcgctcttgcaggcattattattaagggtatggtcacttaatccaatggggattgaggggaattctctcatcatttcttgcattgctcctagtctcactagatgcggaggagtagggtagagattagtggtgtgtaaaagtgcaaagggcactttataatcttttagaatacctacagctttggaaatagcttttaaatgattcatccccgtagataatataatgggttttttaaaacttgcaatttttttaagcaatggataattattcatttccccagaaccaattttgtatgcactcactcccattctttctagtcgttttgcagctgctagagaaaaaggagtggaaagaaaaatcattccttgttgctctacatagttttttagctccatttcctcctcttcatttaaggcacattcttccataatttcatagatgcttttgttgctatttcctggaataacctttttggcttctttgctcatttcatcatcaataatatgagtttgatgttttatgacttctattccagcgcgttttgcactatctaccatttcttttgcaactgctagattcccattgtggttgatgcctaattctgctattacaagaggtttataattagatccaattttgcgatcttgtatttgaatatagctttgcaaagcttttttacctccttttttacgctattttaccataggaggctagagtttttttgcaataatgtagataggatgataggtaatagtatttttaaatttatcctcaaaaatttttagagatttttttgtgagtttatgattggaatcaagagaatttactcctgtaaatttaaggtgtctaaaagcttgtagtgggcttttaaaattgataggaaaaatctcctcttccaaatacaagatttgccatttctcttggagtaggctttgatattcttttagggaaaaataggatagcccaatagaagtgtgttgtttgatttctttgagattgtctttaccaaaactacctaaaaccagagtagtccctttgagacttattttttcaagatttaaaaagaatttttcttgatctagccactgaatacaagcattggatatgataagatcaaaggactgattaattttatgaatctcatttgcatctaaaagtaaaaaggaagcctcagaaggcaggtaattcccatagtcttcaagatcactacagataagagagtcaaattctaagacattgattatcttttttgtaaaacttcctacaccacaaccaatttcaaggatagaatgaaattttttttgcaaaaggaatgcaaggagtttattttgcatatgatcttgtacaatagcattctcttcataaaaatctctaactctaaaaaacttttttgctatagattgcaaaaatcatcccagcttttaaaatttaaaaaaacaaaatggggtgcattttttttgatgatttggcaagtttcccaggatctgatttgattttttgaggcaaaaattttatcatcaatgctaacaatagctctgtcccatttttgaggataataagggatcgttgttagagtattgtagagattttctaattctttaattaaagactctagatgatgaaaattaaaatttactgcttgtggtaagtcatctccaaagaggtttgccttaaatttttctaaatcaaaatgtttgattgtgtatctaaacactgcaggagagatcccttttgatgggtggatcccttctagcgtcccattaatagcaaccctttttttaatctctaagttatttggcaagaatctatttgcaatagcaacacccatagaccaagcaaccagagtaatcttcttgtcttttaaaaaagagagatcaaggctattgtcctgataatcagaaacaaaaacaatggttttttgaccttttgtaagatggctaaaaaactcttttggattcccaaatccagaaaaaaagacaatagcttcttgatagtctaaagaatttaatatttctactttcattgcctcataaacactctaacaaatttgtaatattttgttgtgttagattagcagttagagaaatacgaattctagattgattttcagggacacttggaaatctgattgcaggagcaaagaatcccttatcaaatagcttttgtgagagttctagagtttttttgttatcataggtcatcaggcatatgatatgaacatccccaataaaatcaatgtttttgtctctaagtccttgttttaaaaactttgcaagttttagtagctttttttgctgtggtttaaaatgtaaaagattttgaaaaacaaacaaagaaaaagcaatattagtaggtgccatagcggtagaataaattagtgttcttgctttattaataaaatattttctaaaaacatcatcacaaattacacacccaccagatgaacctattgctttaccaaaaccaagaattaaaaaatcaaccatttctatcaggttggcatttttacatacccctaagagattcttgccataggttccaatactatgagcctcatcaatataaagcaatacatttggatattgctttttaaattctactaattgtttgatatcacagacatctccatccatactaaaaataccctcgcttaaaataactatatggtcatattcacgatggtatttctctaaaagcaccccaagatcttgcatattattatgagcgaagcgtttaaacctagcgtgcgagattctaagaccatcaaagacgcttgcgtgcatagaggaatctgtcaaaaaaagagtatttgagattcttgcaagacaatcaatagctcccatattagcgtgataaccactattaaaaagaagagccttttttggagcataaagatgctgcagaaagtattcaaatctctcaaaaatttcaaagcttcctgttagtatcctagatgaggagctagatggagggattctgtgtaaatccagctgatcaaaaaactttttggtaaagtgcttactttgcgcaattcctaaataatcatttgatgaaaaatttactagtcttttatccccaacataaataaaatttttatcgtgtctcatagggagaatatcacgatagctaaaagttttctcgagttcatcgagtatgagttttaccttttcttgcatttttaacctttattttttagaattatactttgttagtgattagaaaaaataaatatttttcaaaaatagggcactttggtggtatgagtatggggaagataatgcaagataatatgacacaacaggatttgttacatatttggcatccttgtacacaaatgaaagatcatgagaagattcctttaatacctattaagagaggtaggggagtttatttgtatgattttaatgataaaggctatattgatggaattagtagctggtgggttaatttatttgggcattgcaatccctatatcagtcaaaagttaaaagaacaaattgatactttagaacatgtgctactagcaggatttactcatagtccaattattgagctttcttctagaatctgtagtttattacccaaagaattaactaaatgcttttatgcagataatggatcttcggcagttgaagttgccttaaagatgagttttcacaaaaatttattaaatggtaagaaaaaagataaatttattgccctagaaaatgcttaccacggcgaaaccctgggagctttgagtgtagggaatgttaagctttataaagatacttataaagatttattattagaatgttttcatacacctgttccaaatacacaagactatgaactagagctaaaaaagtttaaagaactaattcaaaaacatcatcaagaaatttgtgcttttattcttgaacctattgtgcaatgtgcaggtaatatgcatatttatagtgaggattttataaaagagagtgtgcagtttgcacaagagtatgatattgatgtgatttttgatgagattgcagtggggtttggaagagctgggagtatgtttgcttttgagcaatgtggagtggttcctgattttctttgcctatctaaggggattacaggaggatatttaccactttctgttgttgtaacaaaagaaaaaatttatcaacacttttatgccccttatgaagagcaaaaggcttttttgcattctcatagttatacgggcaatcctttagcttgttcttgtgctaatgcagttttagatatttttgaaaaaaataatgtgataaaagaaaatcagaagactgcaacatatatcttttcacaactgcagaaattagaatcttttcatcaaatatcaaatctaagatataaggggatgatttttgcatttgagttaaaaagtacaaagtctaatcgtgtaggaatagaattttttcaagaggccctaaaaagaggagtgatattgcgaccattgggtaatacaatctattttatgcctccatataccattacaagacaagaaatagattttgtagtagattgcatcattgatattgtgcaaaaggtggttttttaggtttctttggttataatcacggtatttttttacctcatagaatcttcgaaggaacaaggatgaaaagtattaagttaaaactaacactaatattagtgttagttatggtgctagcatttgcaattatagggacactatcttataaatctacaaaaaatatagctttagctcaaaccatcaaagatcataccaatacacttaagatggcagatatccctttagagtctgcaaatcttaaggttattgcaagtattcaaagattatttaaacagcttgatagtgtccctgaagatgtttttttcaatcagaaaagagctctagatgcaatagggcctatgttaaagccctttagacagggtggagattttcttggtgtgtattttgctcttaataatggagaggtgattattagcaataaggatatagatgataaaaatctcttgtatggaatctttggtaagtctgataattatgatgcaagaacaagagagtggtataaaaatgttttaagaaaaaagaaattaattgtcactcctgcatatattgacaatgctaccggtgagttttgctttacctatgctgttcctatttatagaaatggcaagttattaggagtattgggagtagatgatgggatttctgcacttcagagaagttttgacaagatgccagggcatttagttgcaatggatagaaataaaatgccttttgtatctacacttaaagatgaaatattaaaagaaaataaggattttgcttcactttataatatggcgatgaagcgtgagaatctaaagccatttgtttttatagacaaagataaaaataaaatgatggcaatttgtcagcgttcaaattctagtggcgatcaaggaatgcgtgttgtttgtagcatagagaatcttacaaaggtaatggagcccattgaaagagatgcaagaatgcaaatcatactcgcagtaatgatagcaactatcggagctcttttagtatatggagttgtttattatcttctaaagccagtagggataatacaaagtggtctcaatgagttttttgattatttaggacacaaaaagcaaaatgttgcaaagatacaagttagcacaaatgatgaatttggagatatggcaagaactctaaatgccaatattgatgaaacaagaaaaatgttagagcaagattctaaggctgtgttgcaatctgtggagatggctaaaaagattgaagcaggtgatcttagtgctagaattattgaaaagccggcaaatcctcaactcatagagttaaaagaagttttaaatgagatgcttgatatattacaaaagaaagtaggaaataatttaaatgagatttcacgagtttttgattcttatatgaagcttgattttacaactgaaataaaagatgcaaaaggaagcgtagagcttgttgctaatgctctaggagatgagataagaaaaatgctacaagcatcaggagagtttgcaaagagtttaaatgtagcttcaaatgatttgtttaaagcaatccatagcttaaactcagcttcaaatatgcaagcacagtcactcacacaaacaacccactcaattcaagagattacccaagcaatgttgcaaatcaatgaaaagacaaatcaagttattacgcagtctgaggatattaagcttgtgattgggattattagagatattgcagaacaaactaatcttttagcacttaatgcagcaattgaagcagccagagcaggagaacacggaagaggttttgctgtagtagcagatgaagtgagaaaacttgcagagagaacacaaaaaagcctaggagaaattgaagccaatactaatattctcatagaatctattaatgaggtaggaacttctatttcaaatcaatcaaatagtatttctcaaattaatgatgtaatcatacagctacaaaatacaacacaagataatcttagcattgcaaatgattcatcaaaaatcagtacgcaagtaaatcaaattgcagaagaaatacttgctgatattaacaaaaagaagtattaaaagacttttttaatgcttctttaaaactattttttatttcattaaggtttgcttcattataaaaaggtaggtgaatgattttgatatccacctgcttttttataaaatcatccatctcttcatctatatccccacttattattaaagacagaatttttatattcttattttttaaggcattgatacttaagagtatatgattgatagatccaagatagtgactccctacaagtatagtttgaagtttatgttcttggataaaatcaatcatacaatttttagaatcaataggagtataaagccccccagcagtttctataataagattcttgcttggtggcaaagaaattttaagaccatcataggaaatattttcaactttcattccaatatgtggagatgcaggagtttgaagtaaaataccttcgggataaattgatgtatttggtgaaaacttcttaatcacttcagaatcctttggcaaacctgcttgaataattttaaaataatcatattttaaaacagagcaaagcattgcacttgtataagttttaccaacattggtatggcaaccagcaacacaaatttgcatttttatttcctttttaatttttaaacaagcaattttataaaaatatttttgtttttaattttttaaacctgttgtatttattggcgcattctatagaagttaaaaaatagatataatttaaggaattttaaataaaaggagcagagagatgggtatcaagactctaggggttgatatagggattgcaagcataggttgggcattaattgagcaaaatgaaaaagatattgatattattgatagtggagttagaattttcaccaaggcagaacatcccaaggataaaagctctctagctctaccaagaaggatagcaagaggtgcaagaagaagaaaccaacgcagaaaagccagaatcttacaggtaaaaaaatatctaataaaggcattaaatttaccatcaaatcttttctttgcaaaagaagattccttgcctcctatttttgaaacttctaaagactttatatctccgtggcaattacgactagaggccttaaaaagaaagctaaaaaatgaagaattagctagagtgattttgcatatcacaaagcgcaggggatatgatgatattacctatggactagaagattcagatagtggtaaaatcttaaaagcaattaatgaaaacagaaaagaactattagagggaaaatatgaaaccattggttcaatgatgtgtgagaagtattttcaaaaaaagcgcaaggattcttcaaagtttgaattttgcaatgtaagaaatagaggtgaggaaaattataatcgttgtataggaagaagcgatcttaaagaagagttggaaatcattcttgaaagacaaaaaaaatttggcaatgaaatgattactcaagaatttgaaagagaattattaggagatagggatgctaaaagtaagcagaagttagaagggcttattttttaccagcgtcctttaaagagttttgaagacaaggtggggaaatgtcagttttttgcgacaaaagagagagcttgtaaaaattctcctagtgcagaaagatttgttgctctaacaaaaattttaaatacattgctttatattagtaaagaaacggggattgtatgggataaaccagcaatgattgctcaaattttagagaaagcaaaatccaaaaaaagagggataaattatcaagagcttagagaaatgttagagcttccacaagaatttcaatttagggatttagtatatgagagtgataaaacagaaagcaaaaccttcatagctttagaaaataccctaaagcttttagcagcaaatccagatatttgcctcaaaactcaagatgagattgcacagattttaggaaaaaataaggattgggaaaaaattgctagggatttggctagtttgggattaacaaaagaacagatacaaaacataaagactgccaaacttagttttagtaagcatttaaatctaagcttagaagcattagggcatttgattccattgatggaaaaaggaataagatatgatgaagcactaaagattttagaggatcaaaaaattatcattccacgcaaggctttggagcaagattttcttcctcctttaaaagagattgcaaaacaagatagttattttgatattacaaatcctgtggtaaatcgtgctttgagtgagtttagaaaggtttttaatgccattgtaaaaaaacacgggagctttcattatctaaatattgagcttgctagagaagtgggattgagtaaaaaacaaagaggtgatttagaaaagagccaaaaggacaatgaggcgataaatttacaagcaatccaagaaatgaaaaaacataatctcaccaaaaatgacattttgaaatttaaactttggattttacaaaatgagcaatgtatctattctggaaaaaaaattacaatacaacatctgcttgatgaaaaaatgttagatattgatcactattttccattaagtcgtagtttggatgattctcagatgaataaagtattgtgttttagagatgaaaatcaaaataagctaaataaaaccccttttgagttttttggatctgatgaaaaaagatggaatgagtttgtggctcgtgtatttagcactaaatatgataaaaagaagaaaatgagaattattagtaaatcttttaaagagagaaagagcggagaaaaaatagattttcttacaaggaatctggtagatacaggatacatcaatcgagttgttagcctttatgtaaaaaattattttaagtttttgccattagattctaagagagatcgcattagggttgtttcaggctctttaacctctgcaatgagaagttattggggtttggtgagtaaaaatagagatcatcatctgcaccatgcacaagatgctatcattattgcttgtattaatgattctgtaatacaaaaatactctaaatttttgcaagatagagagcttgcttataaagaaactgattataaaatccaaaaacttaataaagatggggattatatgacaaagcttaagttgcgttatcccataccagacttcaaaataaaaatagaagaaagtatcaaaaaaattatagtatcacataatgtttctcaaaaaattagtggagcattgcacaaggaaacaattagaaaaagaagtgaatactataaaagatttggtggagagataggattacaaaaagccataaaatatggcaaagtaagggaggttaatggaggaattgtagataatggggagatggtaagagtagatatttttagaagtaaggataggggattgttttatgtagtgccagtttatacttttgattttgccaaaaaaatactgccaaatagagcaattgtttcaggaaaaaataaagatggagtaataaaagattggatagagatgaatgagaattatgatttttgcttttcactttttaagaatgattgtgtattgattcaagcaaaaggtatgcaagagccaattttggcaatttataaaagtacagatactagaaatgcatctctttcttttgaacatttaagcaaatatgagcttaaaaatgaaagcgaagagatattttttaaaaaagaaaataaaaaacttttttcaaaaacagaatgtggtatccaaaaactacaagtctttaaaaaagtaaaaatttctccacttggagaaataaaagaattgggagaaatgaagagagtggggattattaacaaaaatgtttgaagaatcctaccgcactctttttcttagcacccctgctaagctctcttgtaagaataattccttgcagattctacaagagggtaaggttgttgtaattccattgaaagatatttcagtaattgtgatagatactccccaaattgctttaagttctagtttgctaagtatttttgcagattataagattttagtttttgtaagcgatgcttcacatattccaaatgggatttttatgccatttcttccgcattatagaggtgcaaaagtattgcaagatcaaattaaaataaaacagcaattaaaatcaatcttgtggcaaaaaattattcaacaaaaaatctataatcaagcacagcttcttattttagagaataaaattgcagtggcacaaaagattttgttgttacaaaaaggagtaaagctaaatgatagcacaaacaacgaatctaaagcttctatgatctactttcctgcattatttggtaggggttttagtagaggggatttttgtgctattaattctgcgttaaattatggttatgcaattattagaggaatccttgctagaaatattgtagcatcaggtttgctaccatcattagggttaaatcatcataatcaatttaatccctataatcttgcagatgatttgatagagccttttagagtctttgtggattctaaagtagcaagaatgaaattttctaatatattgagtttagaaaatagggtagagttggtaaatatcattaatgcaaaagttttactaaataaaaaattttatccgatgtatagagtaattacgcgtgtagtatggagtttggcaaagtccatacaggaaaaagaaaattatttagaattgcctatttttagcaaggatagcaatggaagagaaatttatgagagttttggtgatgtttgatatacctacaaaaacaaaagaagagagaaaagcaggaactaaatttcgtcaaagactacttaaggaaggcttttttatgttgcaattttcggtatatctgaggatttgcaaagggattaaaagtgcaaatacctatatgcaaaaactagagagctttgtaccaaaaaaaggtcatattagagcaattattattacagaaaagcaatttgacaatatgaagatacttttgggagaaagaagtctcacagaaaaggctcaagagccaatccagctaacacttttttagtctctagttttttgggatgctaagcagttaccctgcggagaactagaaaactccttattttagccacttcataaatcctattttggtaaatctcatagtccctaagaacctttacatctttgttttagccaagggtattttaccatagaaagatttatgaagtggctaaaattgtctatttaaatatttaatcttccctgctattttaccatagaaagatttatgaagtggctaaaatatactatcatttaaaaatatagaatacccaattttaccatagaaagatttatgaagtggctaaaattcttctgcatctacggataaatcatttgaattttaccatagaaagatttatgaagtggctaaaatgttctaggtcttagcaaactttgtatgcaaattttaccatagaaagatttatgaagtggctaaaatataaatagtagatttgtcttgttgttcattattttaccatagaaagatttatgaagtggctaaaatcaaattactaaacaagtattttaaatcgcaattttaccatagaaagatttatgaagtggctaaaatcccagttgtattgcttttgcaaaacaacaaattttaccatagaaagatttatgaagtggctaaaatcaaatatccatctacatcaaaatttatattattttaccatagaaagatttatgaagtggctaaaatcccacttaaaactaaagtctttaatccataattttaccatagaaagatttatgaagtggctaaaatctactttttctaatccctctttaatctcttattttaccatagaaagatttatgaagtggctaaaattagggcattctttattgtttgaagttctttattttaccatagaaagatttatgaagtggctaaaatctaattcttcaacatcaaataagtgccagtattttaccatagaaagatttatgaagtggctaaaattcattgttcctccttgtattataagcctaaattttaccatagaaagatttatgaagtggctaaaataaaaaagtgatgaaccgaaacccatacgggattttaccatagaaagatttatgaagtggctaaaatttttggtgtagttgcttctattatgtatgaattttaccatagaaagatttatgaagtggctaaaataagtctagtagatacactcttaaagaattaattttaccatagaaagatttatgaagtggctaaaatatttcctcttggcttggagtattagattttattttaccatagaaagatttatgaagtggctaaaatttgatgaagttagatttgttagaagccctgattttaccatagaaagatttatgaagtggctaaaatttgcaatgttattaaacacagattctattgattttaccatagaaagatttatgaagtggctaaaacatactctccacaaccatagtatcgtataatattttaccatagaaagatttatgaagtggctaaaacaagctgatgctatctgatgtctttatgttctattatgaaaaggcttctgaagccatcgtaagtaatggtataaaaagttgggtaatttatctttaaaagtaaaattgaaatttatttgatgagctaattttttaatctcgtgtttttctaaaagttctccatagatattgtttttataaaaatagtttctattcatcatataggtattccacatttcagaatagagatgtaaaaaaggttgggatctatcaaacttatgagtttttataaaatcttttgcccttccccaagagatttggcaagtttttctataatcccaattgtatctttctaagtttgattgtttgacttgtttggctaaaaaagaaggaccaataatagcccagggaacccgctttctatgattgatgatattttcagcttctaaaataagctgttttccaaagctagaatttttgggaaattttactaaagagtttgtaactcttggcatggtctgatcaagatctatttcttgagaaaaaatatattcttcttgactaaaatcataaaaatttagacaaaccatatcaagatccacccatacactttttcccaattcagaatctagcatcctgtatcggaaataatcactaaaagtggcgataccagctcctctgtcatctagaaaaaagttttcaaaaggaactagcttatttccatcttctatggaaaaattatcaaataaattacaaagatcaattaaaattttgtctttaagattgtatgtataaagagtgaatttatagccatgatctaaaaaggatttaatagataaaagctccattaaaccaataccacgatatccttctcttgtatgccaaaaacttccgatttcttgtcttttcattcattctctaaattacagaacagccaaataagcttgtaacaaatacttgtaaaacttaataatgtatgtccctctttggttcttattatattgaaaaagatttgaaatagcaagaataaaaagaattagtaagacttacttaaagcaatggaaatagtgttaattatttaagtaaatcccacccttagttttatatattatattttgataatatacggcaaaataaagggagtttgctatatttgattttttaatatagtttagattcttgagagaagaggtaaaaattgagagtatttattattgtttttgtatttgcattgcatagtttattgggtgatattgcgggctattatttgctaccaaaaaatgaagatggtgttgaaagtgttgtaagaatctttaaggagaagaataaatattatgcctatggttttgcttctaaaaataatgttgatttgggacttgatacaaaaaatccaaatgaagaaaaaagaaaacaggaaattagaggcagtatatttttatgggatctgatagaaaaatcagatgaaaagtatggagatggcagaatttacaactatgttaatggtaaaacttattatgtaaaagccgaagttaagggcgaaatgttgattgttaaagcttctgtagataaaaagggattgtttggaaagacatttaattggaagaaactaactccacaagaaatagagccatttttacaaaaagatatagatttagaaattgttaagcagaaattgcctcaagaataataaggagttattgataaatgcagaagtttgatgttgtagttatagggtcgggattaggagggttgagttgtggtgcaaccctaagcaaaagtggaaaaaaaattttagttttagagcaacatagtttaattggtggatgtgctacttgctttcctagaaaaggtatgatggtagatgccggattacatgagcttgattttggcacaagagatagggatatgaagcatcatatctttgatgtacttggactttgggataaaattaagttggtgccattgccaacagcttggacaatacaatcacagagtgaaaaatttatcattcctcatgggaatacgcaagaagttttgaagaagatgtttccttatgaagcagaggggattgataagtattttaaaaaaatagatttccaagccaagattgccaaaaaattcccctttgatatgaaatttttagagttttttattgctccaattacaactgtaatattcttgacatacaatgttattaggaataagacagctggagaggttttagatgagtgtatcagagattcaaaacttaaaagaattttaaatattaatcttgtttattatcactatgatccctataagtttatttggagctatcacgcaattcctcaaaagggttattatacacaaggaatgtatgtaaagggtgggtcacaagcattgtctaatggttttgctagtatcatcactgaaaatggtggagaagttagagcaaaggcagatgtaactaagatacttttagatggtaataaggcagttggtgtaagatactttgataagaacactaaagaagaagtagaggtttatgctgataagattgttgcaaattgtgatcctatgattgtatatagtgagcttttgcctcaagataggagttatgaaaaagatcttagacttactagagattttgagacagaaacttcacttttatccatttatatgatctttgaaaaaaatttaagtgagatttatcctgatatggattacagcacttttattctagatgacaaggaattaaataaagatttcaaagattctagttatgcaaaattagattacaaggatatgggttttgtttttgtaaattattctaaaatcgatagtggtttgagtgatagagatgatagatttttaggtgtaattacaacatttgcaagatatgatgattggaatctagaaaaagaagaatataaggcaaaaaaagaggaattaaaggctttttttgaaaaaagattagaagagacttttcctgggataatgcaatattgcattcattcagagttggctacaccaaagactatccaaagatatattagaaccagaaagggaaccccttatggatatgatcaaaacaaagagggctttatgggtagagaaagatatgattcaaaaagtgtaaaaaatctctattttgcctctgcatttggttttccaggtggaggttttactggggctattttatctggctatcgcacggcaaagaagattttaaatccttggggactcacaaagaagatagctttatgcgtattttttggctttgctgtagttgagattattaagtttattgctgggttgtttttttaatttttataagagatttatttttatttgaaggtttgagatatatgaaaattacacgcttgttatgtatattttcttttttttgtttcatttgggcagaaacagaaacaaaatcagaaacaaaatcagaaacagaggtaaaaacaaagcataccttttctgatctctggggaagaaaatactatgctgggattggatataagtatttggcttttggtgagatgggtggcttgcagaatctacaggttacttatggagtttgggacaagaataaaatgggtatttatgctgaggtattgtttccttttacacaggtagattctcctgaaaaaggctcaagaattactgcagttaatttattctggctctataatatttctgttaccaacatcttttctatttcaccaaaaattggctatggattatctgtagttaattatggatctaaaaatcatattgcttggaagccgagttttggcgtagatctttcaatttttgtcattgataacttggcactttatctagattatgattatagtttctatcatcttagtaacttctcacacttacactattttggtgcaggattgcgttatgtgtattagcgttttgcaataaatgcaccaaaaattattaataatataccaatcatttcatagacattgattgtttcttttaaaaatagatagccaaggattgttgcaataataggtgataggagtagcgttagtgaggaggtttgtgtgtcaagcttccccataatgtagccaaaaaaaccttgtccaagaatttgtccaaacattaccaccaatagcaccaataaccaatcttttaaatgcataggagcttgaaaaccttctagaatagttcctgtgcctaggagtaaaatactagatccaacacaggaaaaaaccatcagtagcatcgctccatatgtttttctcattttatagacaagagctaaaaatatgctatagcaacacatactaataaatgctaaaaaatctccaaatagagatgaaacactattagaatcctttcctccaagaagcaaaaaaataccaataagggtgattcctgcacctaaaacaaagcttatttgtatttcctctttgaaaaatataattccaatgggtacaaggataaaacatacaagagagctaataagattgacatgagctacgcttgtgtgatgtaaagctgtattgaaaaatactaaatctaaaccaaaaaatattcctgctaatatcatcaataaacaatctttaagagatactttaagcaagcttttgcgtgcaaagaaaaggaaaacagggatggcaagtgcaacacgataaaaaccaagcataataggcttgatgtcaataatttttactaatacacttgcataaatgatgaaactttcagcaagaattgcaaagaagaaaaattttagttgattttgcattaaaatcctaacaccagaaataagttgctaattatagaacatttaatttattttttaataaaattacttttcagatttttttgagaatcattttttgatttaagttatataatcccaatagtcttaagactaaatcaaaaaaaggatgttgtatggaatttctggaaatgctattgattttgatagctatgattttgatgattaggaagccccaaaaagaaaatttagcctttggtattttgatgttttcttgggcattgatgatttttatgtatgtgggacacaagtccttgggtattcttaccacaatgaatctttagggggttaaaatgcaagaacaaaaacaagaacaaaaacaagaacaaaaacaagaacaaaaacaagaacaaaaagctgtagacttgttttataacctaatgtgcttggctggttttctgattatcctttttcctgtaggaattgcaaattttattcttgggtatgtgatgggagatagtccttgtgcattatgctggggtcagagagaggcaatgatttttattggagtgattgcactttttattgttaggtttggaatcaagccaaagtatattgcagctttattaattgtaactgcctttggtctttatcaatcatttgcacattttgggaatcacgcaggtagggatttagatcaaggttttagtattatgatatttgggttgcatacttatttttgggcagaggttgtgttttgggcagttatcttgcttttaggcgtgatgcttatttttgctccaagctttaaggccttagaaactgcaaaactaacatttggaaaatataaacaaactgcttttattgtttgtgcttttgtggttgcttctaatattctccaagcttttgttagcacaggtattcctccttatttagggcaaggagatccagttcgtttctcttttaatcccaaaaatgttgtttggtcaacagagggatggaatgaaacttggagtggaatttcttttttaggaaagcgtgatgtaaaagatcctgattatgcttttgcacctactaaagttataagctttaaccataatgccaatcaatctccatttgagaaaattgacagaagtcttaagattgtagatacacaagttttgccatttaatcaacccttaaatactttaaatagcattgataatactttgattgcaagttcaaaatttgatgtgtattttttagataaagattttaaagttgaagatagctttgagcttgatcctaatttttcagctacaatcaaccctattgtgggaattgttccatttatgcaagataaatatttattgatgggttctaataaaactttattgaggtttgcaagaaatcctaatgcagatgctcaattgcagtatgcagattttattaaaggggcggatagatttgaaggaagaggtgaaaatttaggcaggaatagattagatacagtaagatctaaattccatcacactctttcagtggctacagatggaaagtatttctatttagctacggttccaaataataaagataaaaatacttttgtaatcagtcagtttttggaaaaagatcaggttttatcggctgaatttactcctaaagcagatcttaagccctcaagaagtttaggagatctttatattacttcaatggtatcgcgtcataacaagctttatgcattaagtaagcaatacaatgtgattattattattgatccattagagcaaaaagtggaaaaagtaatctcttatcccgaaaatattacaaatgcaagggctttgttgattgagggagataaaatcaagattcttagctatgaggataaaaaaaatctactttatacccttgattgattctttttaaaggtacattgacaataagtcaatgtaccaacttcaccccattagaaatattttattaattgttaaaattagccttgattttaaaatattgagtaaaaagcaagtagaagttataattgttttttttaaagaatatttagagagttatttattatcaaaatacatcaaaaacaggggagagaaatggataaaaatttagtaaggataaagagcttttgaaagttttcaagtaagatggtttttagatgttgtgaagaaaatgacatcagaggaatatacaggtattagttcagagggggaaagagatgactttacttattggttagagaataggcttgaaaatatgggaagtatttggggaggagctagttttaaatttggtatctatagacgcaatgatagtagatgatatgaggataatgagtgtttttaagaagatgtgcttagagagattgcaaaaaagagcttaatcttgataggaaaagattagatatctccgaagtttatagagagattttaaaggataaaatttatagctttgaggaagtttggatgaaagaaagagagttatggggcaaatatgtagaaagaaatttttggctttatagggctagagatgatgaagaaaggtggaaaaatatttacaataatgggttgataggtattccttggagggaactaggagatttaaaa

SEQ ID NO: 1004 - DNA, 22913 bp, synthetic construct
  source 1..22913: mol_type = other DNA
  misc_feature 1..22913: note = Synthetic
gttgtaaaattgaggcaaaaatataaaaacttaatcatcaaattcataagatgatttataatatcaattatcaaaagttaaggagtttgaattgttttttggtcaggaaataaaagcacaacttgctttgtgtcaagagaaattaagagatgtcaatacatttgtcaaatgcgttgatcagtcagtttgcgttgtgaagttggggttgagtggtgaaatgatttttgccaatgaaaaatacttgcaaacggtcggatatacttttgaagagcttaagagtattggttacaaaaatatccgcaatcctcaagtgagcgagagcgattacaacaatctatgggcttcaatcagaaacaaagaagatgtggcgggggtattttctcaagtcaaaagaggcggtgggcttgtatggttttatactagcttcaattgcgtatgcgatgattcgggcaaagtattgcatgtcttggcgtttgcgattgaaatcagcgattttgtccaaaaagcaaatgagtcacgcgacacgctcaatgcggtcaatcgctcaatggcaacaatcgaatttgacatcaatggtagcattattagtgccaatgaaaatttcctcaaaaccgtcaattatacgcttgatgagatcaagggcaaacatcataggatattttgcgaaccttcttttgtgcagtcaaaggactatacgcagttttgggagcgattgagacgaggcgagtttgtcgctgggaagtttaagcgtcttggcaaagacaacaaagaggtttggctagaggcaagttataacccgattttggattctaatggacgcgtgtatcgtgtgattaagtttgcgactgacatcacagctcaagtgcttaacgatcgagaaaatacaaaaatcgcttctcaaatggcacaagaaaacgacagattgacgacagaggggacaggagtcatcgaaaaaacaacagacaatatgaagcaaatctctgaaatgatgcaaacaagctcttcacttgtagcaagtcttggctcacaatctgatgaaatcacttcaatcatccaaacaatcaaagacattgcagatcaaaccaacctcctagccctcaacgctgcgattgaggctgcaagggcaggagagcatggaagagggtttgcagtggtggcagatgaggtgagaaaactagcagaacgcacaggtcaatctatcgcagagatcaccacgactatcaactctatccgcgatgtgacaggacgcgttgtggatagtatcaagatgagtatcgatcaggtcgatgacggggtgaagctcacaggtgaagcaaaagagtttatggacaagattcgcgaaagtgcttcacaggtggcacaaactatccaaaatcgtagcaacagctaaagccaaatcaatttggctccaaagcctcccatttgtggaggggcgtcttcaaatctcacaacttttgggtggtgtttcaaaaaatctttgatcgcttttgcgaggatccctccaccgattccatgataaatcagcacttcatcatatcctgccaacaaacaatccgagataaaaacttccgctttttctagtgcttcttctacgcgtagtccgtgcagatctagcgtgatccctacaggcttttgggtgtaggtgatatgtttttttggggttttgggcagtgggggtttgtgggtgggagtgatctgatgtgttttggttttgagacgcaaaccctcgcattcaactacgcacaaatctccgcgtttttctacgatgatacctttgttgttgccgtatttgacatagtcacccacacgcagttcttgggaggtattgtttgggggcttttgttgtgcttgtttgagaatcttgttggcttcgttcatattttggtggatttgggatagatttttggcttcttttttgagggtattgagggcttgattgtagagagagtgtaggtggttttgcaatgcttcgttttgttgggcattgtgcgtgagtgcttcatcgagcttttgctgtttttgcttggctttgtggatttcttgttgcaaggtgtttttttgtgccattagctccatttcaagagaagtggagcgttcgatgagttcattgagcctttctttgtccttgccatagtgttttttggctttttgcaaaatagcatcagggatgccataacgcgatgctgtttcaaaggcatagcttttgccaatgcttcctttcaaaaagccaaaagtggggatttgatttttttcatcaaaaatagctgcgtagagttgggtctgtgggtgtgaaaccataagagaggctaggcgtttgtggtgcgtggtgatgatgactttggctccacgctcaatcagtgtctccaaaatctctttgtataggcttgaggcttcatcggcatctgtgcctagctcaatctcatcaattgcaacaaggggggtttgtttggataaaatatgtgagacttgtagcattctacctgcaaaagttgagatgtcgtttttgctgttttgtgggtctgaaatgattgcatggatttctttgaaatgtccgattttggattgatgggcattgagagattgaggaatcaaatatttgcttaaaagtgcgacactcaaaacgcttttgagtagcattgttttcccaccagcattcacgcctgtaatgatgagtaggctttttcgccactcaagatgcaggggtgttgggtttttgagattggggtgtgcatagttgcgtagaatgatgtctttggtttgagttgggaacaaaaattctagattgaaatctttggcaaaacgactacgtgcgttgatgtggtcgataaaatcaaaggcttgattgatgaatttcaaaaacaaaatatgcttcaggaagctcccactgatttctttacaaagtcgataaatgcagtcattgaacaaatcttgcaaacgcccctctttttctttgagctggacaagattctgtggagcgagataaaaaaacccgccctgtgatcttgcaagcaccatacctttgatcacttgatgaaaacccgccttgagcaacaaacattctgtggcattgacatagtgtatctgatgatcgacaagataggggctaagcttgtcgcttctgagcaaactagagagggcttgtgcaatgtcttttttgagtcttgataaatgctctcttagcgaatcgatttcttggaaaatcccctctttgatctctccatcatcattgaaataatgagcaatcgcttgaagtttttcaggaagtgtgatttgttgaagccattgctccaaacgcccatcttttgggatatagcttgcttttttgagggtttgaaaaaacaaaatgattttgcaaaaatcgataatctcctcaagatgaagtacccccattttttggatgtgcaagagtgctttgtcgagattttgcacttttggaagcgaggggagcaaaaaggattcaagctcttggagtaagcgtttgtgcaagtccgtgttgccgccaatctcaatgcctttgtgtcgtgcgaaatatgtttggaatttttctacaaattcttccaaatctaattttttgatgagtgaatcaggcattgttgtctctgatttgataggtaatatctccagcaccaaaccccacaatcaatcctgaatcaaattgttgaaaaatctctccatgttcatcgtgcagatagaccaccccctgcttttgggtgatagagtgagcgaggattgggttgtatgaggcaaaaagtgaggcaaaatcaatctcttgatgttcctctccagcacgccacacgggcaaaatgaccaatttgtcacaagcgcaaaagcattggataaactcttgctgattgtccaaaaagcgagagtatttgtggggttgccaaatgcaaataatcggagagatgtttttgatttgagtgtaggtgccaatcgcttgtagggtgcttttgatctctgtgggatgatgtgcataatcatcgatgatgattgtttgagtgtctttatagacaatgtcaaagcgttttttgatccctttgaaatgtgtcaaattggtgcgtatttgtgagagggatatttcctcttttgcagccaaaattgccatagaggcattgagtgcagtgtggtagccaaacccccacacctcaaaaatccccaaatctttgaggcggaaacgcgtaaaaggctcatcgtctttgagaaaaaactcaatctctttgatgtcttcttgggggtataggcgtatggcttcaagatccaaagtagccaaaaaaggatcttccatattaatgacgcgtttggtggctttggtaaggaattgcaaataagcatcataaaaagcctctagattgtaatcatagctttccatgtgttcaggctctgtgtttgtgacgatggcacaataggggttggagttgaggaagctctgatcggattcatcggcttcaaagacgatactatcgcttgggatcgctctgacattacaatcaaactctttgctctccgccccaatgattgcaccaaaatgaggcaaaatactactaagcattgctgttgttgtgcttttgccatgagccccacaaatgctaaaaacccttttgtctttgaggatttctttgagtgcttctttgcgtgagaggatggggatccctttttgctgtgcttcttgaagttcgatgttggagggtttgatgatcgcagagtggatgactagatcttgatctgtgatagagtgggcagagtgagggatagagataggaatgtcagattgtaagagtttatgagtgagtttgttgtgggcgatgtctgatcccgtgatttgcacaccttgagagtgcaagtatttggcaagaccagagattccgatcccacctattccgacaaaatgtattttttgaaacattaaatctcctgatctaagaaagttttgagggtttttagggcggggagcataatgtcatcaggatacacaagagccactctaatgaagccttcgccgttttttcccaaaaatcgcccgggcaaaaccaaaatcccagcttcttgatagagctttttggtgattgctagatcatctttgactttgagccaaagataaaaagtgtagggggagatgacaatctcagagaataattcttgagctatttctagattgcgtgcgtagcattttctgatctcttcgcctgaagtttgccatgcttttgcacttgcgtgttgcagtggcaatggcaaagcacagcccaaataagtgcgatattggcgataaaacttcaaaatctctctatctcctgcgataaatccactcctaagccccggtgcagaggagcgtttggaaatagagttgagggcaaggacatttttgaaggtgtcatttttggcaagtttggaagcttcaaggatacttggtggaggggtgtgttggtagatttcgctatagcattcatcgtttagcacgacaaaatcgtatttgagtgcgtattccacccattgttgtagctcatcgattccaagcacactgcctgttgggttgtttggggagttgagaatcacaagatgcaccctttggagatcctcttgtgttagcgagggtttgaaatggttctctgcagtgaggggcatcaagatcgcagtggctccacttgcgattgctcccccttcatagatttgataaaaagggcttggataagcgattgtgggagtttctttgccgtgtagcaaaaattgtggaaaattgaacaacacttctctagtcccaaaagtagggatgatttctgcacttgagagttggacaccaaaacgatgtgcgatgaaatcaagttgagcttctatcaaaaaatcctcaccctttgatttggggtatttgttgagcaaggaaacagagtctttgagtgcattttgaatcacttgaggggtttggaattgtggctctccaatggtgagattggtgattttgggtgtattgggtttgatgtctttgatcaaaagattaagtcgttcaaaagggtagggattgaaacttgttagcatttatgccctttggttaaaaaatatttgaaattttatcaatacaatggaaatgttttcgaatttatcaagaatatttgtgcagttgtcttgattttttaataaaagattgttaaaatccactttttgattttcaatcagcagacaatctgcgggaatagctcagtggtagagcacaaccttgccaaggttggggccgcgagttcgatcctcgtttcccgctccatatcgtgaattaatctcaataataaccatttaaagagtgacagaagcccggatggtggaatggtagacacaagggacttaaaatccctcgaacattgcgttcgtgccggttcaagtccggcttcgggcaccaaaatggcgacatagccaagtggtaaggcatgggcctgcaaagccttgattcctcggttcgaatccgagtgtcgcctccatagcttcatcgggagatggctgagtggtcgaaagcggcggtcttgaaaaccgttgagggtcacacctccgggggttcgaatccctctctcccggccatccttaatttgccttaaatttgcctatttttcaaaactatgctataaactttactataaattaaaatcaaaacataaaaggacgaaaaatgaaagttgcattgttgatgagcgggggagtggatagttcttattgtgcatatttgctcaaaaaacaagggcatgaagtgctaggtatctatctaaaactgcacggcaaagaagaaaaacatcaaatgtttatccaaaattgcgagaaagtcgcttcaaaactagaaatcgagtttcaagtcatcgatgctcaaaaagaattcaaagaaaaagtttatgatgaatttatcgcctcataccaaagaggagagacacccaatccctgtgccttgtgcaatcctttgatgaagtttgggcttgctttggatagagcgatggagatggggtgtgaaaaaatcgcaacaggacactatgcacgcatcgaagagatcaatgggatcaaaaggatcgctcaagctaaagatcctagtaaagatcagagttattttctctatgcgatttctcaacacgcaattgattctttgatttttccattgggggattatttcaaaagcgatgtgaaaaaagaggcatttgaagcgatgccgtggtttgggacacttgaaacctataaagaatcacaagaaatttgctttgttgagacagattatattgatattttgaaaaagactttgcaagtggatcaaaagggggttgtgaaagacactgcaggtaatgtggtgggcgaacataaaggctatatgcaatacaccgtgggaaaacgcaaggggtttagcgtcaaaggggcgttagagcctcattatgtgttggggatcgatgctcaaaaaaatgaactcatcgtgggcaaaaaagaagaactcgcagtcaatcgcgtcaaggcagtcaataagagcctcaatcaattcacagatggggagtatgaggtcaagatccgctatcgtagccaaaagagcaaagcaaaagtcacactcaaagatggggtgatcgaagcagagctgtatgaagatgtatttggggttgccaaaggacaggctcttgtcgtgtatcaaggagaatgtgtgcttggtggtggagtgattgtgtaggcagaagcgttgtgcttcccaacgcaactagtcttgtgggatgacattggggtggagcttgtagattttgttgcgaatctttgtgatgatccctgtatcgatgagctgtttgaatgtcttgacaacggtgggtttgctgacattgagcgtctcaatgatgtcttgataagaacctctaaaaatatgatcctctccgacattattaagcaaatagcgaatgatttctatttttttccctcctataaaggtagagattgtattgatgagcaaagtttgggcttggatcatctcttgttgcaagattgggagcataacgcgattgagcgttgagagtagctcctcgatattgataggtttgaggatatagccatcggtgcgtagcttgatcgcttctaggaggtattgaacttctgcgtgtgctgaagtgatgatgattgggatcgaggggtttttgtgaccattacgcactgctttgatgagctctagaccattgagtcttggcatcaaaatatctgtgaggatcaaatccaccttacaagcattgaagatttctagtgcctcttgtccgtctctagctacgatgatttctttgacatagtcttccaaaatatttgccgtaatcttgagcgtgtcttgctcgtcttcggcatataggattgtgagggttttgagattttgcattatgactccttaggtgagataatcgtcataggaagtttgattgaaaacattgcaccaaagtattcctcttgtgtgattctattgcaccaatgtatattttcaacaaagattttgccatccatttggcattctagaatctgctttgccatatagagtcccacccctgttcctacggatttgtgcttggttgtcacatacggctcaaagatcctttctttgtcttggaattggatccctcccccgttgtctttgatctggatgcaataatactgctcttctgttgagacttgaagctcaataatgccttttggaatctgatgtgagagaatcgcatctttggcgttgttgatgaggatgagcaaaacttgtgtaaatgcattttcatacccaaagattgaaaaatcttgagggatcgcggtttggataccgatgttttggtgttgcaagtgggctttggcgatattaaacgcactttgcagactattggcaaaagagaaatgtgtctttgtcgtgctaggttgaaaaaagttgcggaagtcttcaatcgtttctgacatattgtgggcaatccttagggcatctttggtttgggtgtcaataaactctctggtgagcttgtcgttgtctgctttgcttttgaaactttggatgatcaaaacaagggtgttgagtggctgtcgccattggtgggcgatgttttgtatcatctcaccgattgaagcaagtcttgcttgttggtgcataatctgatctttgcgtttggaatcagcgacttcttttttgatggttttttgcaggtcatcgttgatttggcgtagttgtttggttttgtctgaaacaatgagtttgagagagtggtggatgtttttgatagacacaagaatcatttgggcaaaaacaagtgtgatcaaaataataatacacgcaatcacaatcagcagacttgaggagaacaaaaacaatgaatcggtggcttgttttttgaggttgaggatttggatatggagctggattgttttgtggatgagggtgttgaggtttgccaaaatctcctcttgtgccaaaatgcttgtgtcatcgaaacgctcaccgatgatttgcttgatttgtgcctctgagtttttgagctcttccaattctttgtgatgactcaaaaaaacttttgcataaaaatctttgaaatgcgtaaaaaggttggttttttcattgattgcattaaactcactccaagcttgtttgagaagttggagttctttttggggatcttgctcacgcagaagtttggtcaaaaggtcagaatagatgttttgtatgacaatcaaatctttgagcttttgttcttgattgatgaagtgggaatcatagtcatatttcaagccaaagagagagaataacatcgtgagagtgacgagaataagcccaatacaaatgttgagaatcaaaatctttgctttgtattcaagtgatgcacccaaaattttgtttttgatggtcgagagtttcaacatttggtgtcctgtcgcagttggcttatggatttttattttataacttttttctaacttaatcggcgatatggtgacaaaatgtcggtgttaagcagatttgtgctgaaattgagattataattaatgacatagtgatgtgatgatgttgaatgtattgctaaacaatgttattgaaggaattgtgatgaaaatcagaacgcttggcgtagatttggggattgcaagtattggatgggctcttatccaagaggagggggaaagattggacattattgatagtggagtgaggatttttaccaaagcagaacacccaaaagacaaaagctctcttgcacttcctagacgcatagcaagaagtgctaggagatctattagacgcaaaagagctaggattttgcaggttaaaaaatttctagcctctactttggacatcaaacttgaaggtatgttgagcgacactcaaatgcttgcggctttgtttgacactcgcaaagactttttgtctccttggcaattaagggtagagggtttggataggagattgagtgatgcagagcttgcaagggtgattttgcatattgccaaacgcagaggctatgatgatttgacttatggaatcgaagacaatgaaaaaggtaaggtgcttaaagcagtcaaacaaaatcaagcccttttgcttaagtatcgtagtgttggcgagatgatggttcaggagtttttccaaaagcctcgtgagggatatattggtcagtgggaaaatgttagaaatcatccagaacaaggggattacaagcgttgtgttgggcgtagtgagcttagggcagagctgaagttgattttgcaaacacaagcaaaattgggcaatacaaaagtcacagacagctttgtttcaatgcttcttggagatgaacaagcacaaagcaaaagccaaaaagaaggattgattttttatcagcgtcctttgaagggatttgctgacaaaattggtcattgtgtgcatttgccatcgcaaaaacgggcttgtaaaggtgctccgagtgcagaagagtttatcgctgtgagcaaaatcatcaatactttgctttatatttccaatcaaacaggggtgcaatgggagcttcctgtgttgatcgatcagattctctcaaaagcctatgagcttaaatctggggtgagttatgccaagcttagagagattttgcaacttcctgaagcctttgagtttcgagaattgacctatagcaaagaaaaggtggagcaaaatacaaaatttatagaacttcaggctacccacaaacttttgaaagccaacccaacgctccctaggcacatacaagatgaaattgcagcaattttgggagccaataaggattgggaaactatccaaaaattacttgcaaatctcaatctaacccaagagcaaatttcaagaatttgtgatgccaaactccagtttgcgacacatatcaatctcagccttgaagctttggcaaaactcctgcctcttatgaaagagggtaagcgttatgatgaggctgtagggattttgcaacaaaggggagagtttgtagtgccaaatatttgcaaaaaagattctttgcctccactttgtgagttggcaaaagaggatagctattttgatattccaaaccctgtggtcaatcgggctttgagtgagtttagaaaagttgtcaatgccttgattgcaaaatatggcaaatttcattatttcaatcttgagcttacaagggaggtgggtcaaagcaaaaaggagcgtagcgaagtcgagaggagacagagagaaaatgaagctttgagtgttcaggctttggatcagctcaagacgctaggaatggcagaaaatagcaaaaatctactcaagtgcaaactttggattcagcaaaatgagtattgtttgtattcgggcaaaaagataccttctggggcactcaaagatcccaatcttgtagaagtggatcattgcttcccattgagtcgaagtttggatgattctcaagacaacaaaatcctctgcttcaaaacagagaatcaaaacaaacgcaaccaaacaccttatgagtattttcaggaagggcgttgggagagctatgtcaagtttgtttatcagagcaaatttagcacaaagaaaaagaaaaagcttgtcaataaactttttaaagatagagaatgcggggatagagcttcatttttgacacgcaatttggtcgatactggctatatcgcaagagttgtgagtctttatgtcaaaaattatttggattttgagcctattgccaacaaaaaagagcatcttagaattgtttctggatcgctgacttctgcactaaggagttattggggattggttgataaaaatcgagaacaccacctccatcacgcacaagatgctatcatcatcgcttgtatcaatccaagcacgatcaacaaatacagccaatttctcaaagaaaaagaattgggctacaaagattctgcacacaaggctcaaaaactaagtgaggcagaatacaaaaccaaacttgctctgcgttatcctacaaaggatttcaaaaacaaagttgaagaatctatccaaaaaatcatagtctcacatagcgtatcgcacaaggtgagtggagcattacatcaggaaacaattcgtaaaagggaagcatattatgcaacttatggtggtgaagagggagtaaaaaaggcaatcgcatttggaaagattagggaaatcaatgggggactagtagataatggcgagatggtgcgtgtagatatatttaggcataaactccaaggaggattttatgcagtgcctatttatacttttgattttgccaaaggtgttctgcctaacaaagcaattgttgctggtaaaaaagatggggtgatcaaagattggctagagatggatgaaaattatgagttctgcttctcgctttctaaaaatgattgtgtcaaaatccaaacaaaagagatggaagagccaatcgtagcggtttataaaaaaaacaggttctgctacaggaacaatggattttgagcatcttagcaagtataagtttgcaaatacagatgaagagagatttttcactgataaagataagaaaacagaaaaaattgtatttgcacggacaagttgtggaatccaaagactcaaacatttctccaaagtcgtagtctcacctttgggagaagtcaaagaagccaagccaagcaaacggcagggaatgcaaactaaaaaaagctccaaaaatgtttgatgaagcgtatcggacattatttttgagctctgcactcaaactttcgcatcgagacaatcagctctgtattcacggagaaaaatcagcgtccatccctctgcaagacattcacactatcgtgattgatactccacagatcgctttaagttcctctcttttggaggcatttgcacgctatcggattgctgtgtttgtcagcgatgattctcatttgcctagtggagtttttttgccttttttgactcattatcgcaatgctcaaattttggaatatcaaatcaatcaaagcaaacagagtaaggctataatgtggcaaaaaattattcaagccaaaatcaagaatcaaggcacactcctcattcaagaaaacaagctaccaatcgcctcaaaacttcaaaccttgcaaaaaggagtcaaacttgcagatgcgacaaacaacgaagccaaagcctccgcattgtatttccctgcactctttgggaagggtttttcccgcaaggagatttgccctattaattctgctctaaattatggctatgcagtcataaggggctctattgctagaaatctcattggttcgggtttgttgccttctcttgggatttttcaccacaatcagttcaatccttttaatcttgcagatgatttgattgagccttatcgtgcgtttgtggattcgctagtgctgaagttggattttgaagatacttttgagcgtcgtcatcgcatcgagcttgtgaatattctcaatacaaaagtgcttgtaggtggcaaattctatcctatgcatcgagccattacacgcagtgtgtggagtgtagccaatatgatttgtggcaaatgcagacaaattgaacttccgattttagatgaggtgagcaatggaagagaagtttatgagagttctagtgatgtttgatgtgccaacaaaaaccaaggaggagaggaatatggcgaccaaatttcgccagaagctgatcaaagaggggtattttatgttgcaattctctgtttatgtgaggatttgcaaagggatcgctagtgccaatcgttatatggaaagacttcaactttttctgccaaagcgtgggcatatccgtgcaatcatcttaacagaaaaacaatttgatcatatgagaatcttgatgggagaagaaagtaaaattgaacaagcacgcaaacccgtgcaattaacattgttttgatttctcggttttggggatgctaagcagttaccctgcaaggaccgaaaaccttttattttagccactctgcaaatactctattttggtattctacaacttctcaacaccctttgtcaaggggattttgataatctctattttatcatagagtgatttgcagaatcaaattgtccagatattttagtctcaacatcaaatctcggatttgctttgcattgtcttgtttgtgtgcggatgttggtgggaagttggagcaattttttgcaagcattaaagaattagagtaaaattttgatacggacttcaaatgacttgggagtaatgatgattgatttgaaacttcttataaacgactttgcacacattgcagaaaaactagaaatcaaaaaagtagataagcaaatcctagaagaactcaaaaagcgttctatggaatacaagggcaaaaagcaagagttagaggagctccaagctctgcaaaatgccaactctagacgcttcggagagtgccaaaggaaaggcgaggacacttcagagcttcgcaagattctagaagaaaacaaacagcatatcgctaggctcagcggtgcggtggatttggcagaagagggtttgatgacgattttgcacaatgtgccaaatattccagatgacaaaacgccaaggggtgatagccaagaggataatgtcgagcttgctaggatactcactcccaagacttttgattttgcccccaaagagcattgggaacttgctgatcaaaatggttggattgattttttgggtggggtgaaactagccaaaagccgttttagtgtgcttagaggggagggtgcgcgtctcaatcgcgcattgattaactttatgctagattacaacgagcgtagggggtttgaggtggttgccacacctgtgattgcaaactccaaatgcctatttggcacgggacaattgcccaagtttgaagaagatatgttcaagctctcaggtggggtggaggagctagatggaagtaaaaatgaaaacgatttgtttctgataccaacttctgaaatcactctgacaaacctttataacgatgtcatcatcccatcgcaagatttgccgatcaaaatgactgcccacacgccttgcttccgcaaagaagctgggagtgcagggagggacacaaggggtatgatacgccaacaccaattcgacaaagtcgagcttgtggcgatcacgcacccaagccaaagcgatagtatgcaggaatatatggtgcaaactgcttcagggattttgcaagagcttgggcttccgcatcggttggtgcagttgtgtgggggcgatttggggtttagtgcgagcaatacgattgatattgaggtatggctacccggtcaaaatcaataccgcgagatcagctctgtatccaacacaagagatttccaagctagacgggcaaaaatccgatacaaagaagacaaaaaaaactatctagcccacacgctcaatggctcctctcttgctgtgggacgcactttggttgcgattatggagaattatcaaaatgcagatgggagcatcagcattcctgaagtgttgaggaagtatttgtaacgatgaaagaaaagatttcggtttttgttgagaagctcaaagggctaaaagacaaactcaagcatatagcaatcaaaatcaaagacaatctcaaaaccaaagaaaacaaaatgtccttgtatgtggttttggggatacttggagtggcattgttgtttgtggtgatttcagccttcaggcaagattctagcactcaagatgacatacaagcctctcaatcaggcaatgcacaaacttcaaaagcacaagccaatgctcaacaaaacaatgcaccaatagggggcggggctggtgtggttttgcaatctcaagccgatgagcaactgagccgtctgcaactgcccaatcaagaattggagagcttgatccaaaaagcaaacattctgtatgaaaatggtcatattgatgacgctctagaggtgtttgacaaaatcgccctttattctcaatctctggcaaactacaatctaggtgcgattcagcttgtggaaaaaaaatactctcaagcgattcgatcttttgatcaagcgattgctggtggagaggatgtgagcttgagtgccgtcaatgcaggatatagtgctttgaaactaggggatatggagaaattcaagcattatatcgatgtggcttataccaatctgccttattcgtatggttctcctttttattcttatctgtatgcagaggtgctgtattacaagaatcaatattttgaagccctatcgccattgctcaaccccaattccaaaagctatatccaagagagcgatcaacttgcttcagagatgtttctggtgtttggcgatgattacaacgcactagagaaactcaagcaaagtcgcaatcccaaagacaagtttgcattggggatgctctatgcacgcgtaggggactatgccaaggcggagcaaaccttgcgagattatttggttgctcaccctgaggattatcaagcgatatgggcaaaggagcttgtggatatcaaagcacggaagtttggctcagcaagtgccacactcaaacagctcgatgagttgaaaatccctcaagcctacaaaatcgtgacaggtctcaatgagaatctatttgatgtcaaattggcacaaaaaaaattctgggatcgcaattttgaacatcaccgctccttgcaatacaagattttgttttattatgccccatacaaggttttcaatgccaatgaggcatttgagattttgagcgaagggaattttaattttggtgcaaatttattggaacaatctgtagatttttataagcgtgggggcacgatttcaaaaatcaatcgcaacatcgcagaggggatcagagaggtgtatagtggcgatttacgcaaggcattgaaatattttgaaggcaatgccaagcaatacccgcaatattctgttttgtattatgatacggggcttttgtatgcacaatttggggattttgagaaagcttattcgtattttagtcgtgcatactttctggacaatactaatatttttgcagggatttttgccattatggctgggcagtttatctatcaagacacctcaaggatctctgcttctatcgcgacagatttcaaaagcattgattctctcaatcaagacgaatcacgcttcttgcaggcattgtttgaatatgttgtaagtggcacaagtagcagtctctcattccccaacacaactgccaagaaaaaagcaatctattttgcatttgacgcagtcaatgcgatgaatagtggggatatcaaaaaggcttcagaagcattccaagagcttgataagatttttcacaaagatttgacgacagatattatgttacaagttgccctcaattatggacaagatttgcaaaaaatttcattgagattttctacggcatttagaaagggtgatttttctaatctgcattctttgtattatggtggaagtcttgctagagagctttttgtgtatcttgcttttgtgacagggaatctctcttatgtgattggacaacttcaagatcgcttggtggtcgaagatcaatctgtcaatggtattttacaagcattggggttagcatatatctacaatcgtgagtttgaaaaagcgttttctacctacaatgatttgattgacaagtttggagaaaacgacgcacggacaaaatttctaggctctgtggcagcgattggtgcgggacattataacaacgcagtggctttgttgcagatttcaaagattcaatctcctgtgagttttgaaagtcgctacgcccttgctttgctctatcagcaaatcggcaatctcagatcggcttctagtttgtttgcgacactagatgataaaaacttcgtatcagagttttttgatttcaaaatcgacacttcagagttgattgaagcgcttgaaaaggggcaagagcaaccaccaaaaccccaaaaagtttcacaaaagccataaaatgagtttgctcctatcctcgctcaatccacaacaagtccaagccgttcagcacatacaaggtccgttgctactccttgcaggtgcaggaagtgggaaaaccaaaacactcacgacgcgtttggcgtatctagtcgatgaggtgggcgtgttgcctagcagtattttgtgcttgacttttaccaacaaggctggggctgaaatgcgtcaaagagcctttgcgatgctccaaggcaaacacgatagctaccccttgctttgcacatttcacaaatttgggcttatttttttgaagcattatatgggattcttgaaacgcagtgagcagtttgtgttgattgatagcgatgatgtcaaaaagatcttgaaagacttcaaatccccgatttccccgtcggctctgtcctcttatatttctttttacaaaaatcaagccttgttgcccattgatgtcatcaatgaggcaaaaaccccacaatcacgcaagattgccgagctttatgcagattatcaagaatatttggaaacaaaaaatttgcttgattttgatgatttgttgcttctaccttatttgattcttgcagaaaacgaggatttggcacagagcgtgagcaaggagtatgaatacattatggtcgatgaatatcaagacaccaatgtcttgcagtatcgtttgctcaaacttttgacatcagcacattccaacctctgcgtagtgggagatgatgatcagagtatttatagttggcgtggggcagatctccgcaatattttggagtttcaaaaagattttgcgggagccaagctcatcaaattggagcaaaactaccgctcaacccctcagattttggagtttgccaacgctttgatttgcaaaaacacaaagcgactgggcaaaaccctccaagccactagggagtgtggcaaggaggtggaggtgttgaattttgctacgcacaaagaagagatcgcgtttgtgacacaaaagattttggagctcaaggcacaaggggtgccttatggggagattgctttgctctatcgtctcaatgccctcagtcgcaatgtggaggatggattgtcacgggctaagatcccctatcagattatcggttcgattcggttttatgagcgtgcagagatcaaagatgctttgagttatttgcgtctgatgatcaatggagatgatgatttttctctaatgcgtgtgatcaataagcccaagcgtggtttggggaaagtcacacaggagaaacttctacaatctgcaaggagccacaggctctctgtgcgtcagttttgtgcagatgctacaagggcgattgagtgtgttggagagaaaaattacacaaagctcaaggagttttttgagctgattgaggtgctgaagcagaagtttgagagtggggtggaggggtttttggaaacttttcagaaagaagtggatcttttgagtgaatttgcaaacactcaagatgaggtggatcgcaaagcaaaccttgaggagctttatgcgttgctaagagaggagtttggcacaaagggtgagtatggcttggaggattttttgaatgatattactttgagttctgatctagatgatatgcagcaagagtgcgtgtcttgtatgagcgtgcattctagcaagggcttagagtttggctatgtgtttatcgtagggtttgaggatgggattttccctctgagcaaagacaatgaggatgagctagaagaagaacgcagattgggctatgtggcttttacgcgtgccaaaagtgagctttatatcacttatgtggattggcgttttttccaaggtaaaagtgcgagcttgcctccttcaagattcctccaaaacacctatggggtcgcacgcactgaaacagagggtttggaagctcaagctgacaaaaacgccatcgcagtgggggatagggtcgtgcataaaatctttggggtggggcgtgtgctagagttggtaggcaagggcaaagaggcacgcgggagaatcaattttgcaggaaatgaacgcacgattttgctttcttttgtggagaaagaatgaaaaagattgttggttttttgattgcatttggcgtgtgggcacaggctttgcctagtgtttattacatctctcaagattatatttcctctcaagaaatccaaaaaaacattcaagagttcaagatcgcttcatttggtgataagtttgatttggaaatccctgctgtgcagatcgaggagctttttgggcgttatggggtgaaggtgcgatttgatacccaaaatgtgcgttttgtctatcaaacccccacttcacttgcaaggattcaagaaaaaatcaagcaaacgctagagcaagactactccgagcgtcatttgcaaatccaaaatgtcatcctcaagcctatgtttcaaaatacgcaacaaaaaatgctagatgtcaaatgggaaaacaagaaacccaaaaaaaatcgtttcgtggtgctgttggtcgatgaaaaaggacgcgagaatccatttttgtgcgaggtggtgggggagatggatgtggcggtaggtttgcaagatatgcgtccgggggtgattctaagctcaagcaacacgcaaatcaaaaaagtgaaatttgatagtgaaagcattgcttctttttctgtgatcaatggattgcaaacgcgtagtttcgtgcgcgccaatcacatcatcccatcaaacaaagtcaaagccgtggtggtggtcaaaaaaggcgatcttttggatgtcgtgttgcaagatggagcggtggcgatagagggggttttggaagcgatggcaaatggcagtgtgggggaggaaatcatcgcaaggaatccacaaagcaaaaaaaatatcaaagtcaaaatcattgccaaaggaaaggctagggtgttatgaaaaagttgattcttgggattagtggtgcaagtggggtgaggcttggggtgagatttttgcaagaagtcaaaaagcattttgagtgcttcgtggtagtctcgcattctgcgtgtatcgtggcacaaaaagaagagggcaaagatctgatggatgtgttgtttcaagaaaatgtgaaaatttacaatgagcaagagatcgatgcagggattgcctctgggagttttggagctgatgtgatggctgtgatccctactagtatgaatatgcttgccaaaatctcttgtggaatctctgatgaattgatttcaagatgtgcgagtgtgatgctcaaagagagaaaaactttgcttctagcaccgcgagagatgccattttctagcattgctctagaaaatatgagcaagcttgcaggcttgggggtgatcatcgcaccgcctgtgttggcttattatgctcaaagccaggatttgcaatcgatggaaaacttcatcattggcaaatggcttgatgttttgggggtgccaaactctttgtatttgcgttggagtgaccgatgagagcgatttatcccggaacttttgatccttgcacaaaagggcatttggatattttgttgcgtagtgcggggatttttgatgaggtggttgtggctgtggcacgcaatgcttccaaatcgccactttttagccttcaagagcgttgtgcgatcttgcaagcttgtgtgcgagagtatcccaatatttctgttgtggggtttgatgagctgttggtggattttgcaaggaagcagggggcaaaagttgtgattaggggtttgcgtgcggtgagtgattttgaatacgaattgcaaatgagttatgccaatcaatctctagatgaggagctagagactttgtatcttatgcccaccttgcaatacgcatttgtcagctcctctgtggtgagaaatatcatcgaatatgggggtaaaatctctcaccttgtgcctatggaggttgtggaatttttgaagtctaaggagattgaatgtatgtagccattgaggggattgacaccgcaggtaaaagcacgcagattgctttgctcaaagagagttatcctgatgcgattttcacgcttgagccgggtggaagtgctttgggagtagagttgcgtcatatcttgctccaagcaaatcgcccactctcaccaaaggcagagtttctgttgtttttagccgatcgtgctcaacatatccaagaggttgtattgcccaatctcgacaaaatggtggtttctgatcggagtttgatttcaggagtggcttatgcccaaaaggttggtttggaggatgcggtggcactcaatcgcttcgcgacttctgacattttgccccattttgccatcattctcaagatcccaaaagaaacattgatacaaaggctcaatgccaaaaaaagagaccatatcgaggagagaggggtggagcatttgcttgagattcaagaacgccttatctttgcttgtgaggctttgggggtgccttttgtgtgtattgatgcgagtttgcgtcccgatgagatttttgaggaaatcaaacaaaatatcacttcaaagatttttgg

SEQ ID NO: 1005 - DNA, 22700 bp, synthetic construct
  variation 2849..2858: note = n is a, c, g, or t
  variation 2273..2282: note = n is a, c, g, or t
  misc_feature 1..22700: note = Synthetic
  source 1..22700: mol_type = other DNA
actgatattgctaatacaccttataagattgaggttattaatgctacagaaggtggggctagaatccatgggagtgttgagatgccttttgctaaagccattgaattaatagataagagcaaggaaaaaacaccaattgtgcttaaaaaaccagaggaaaaaataagcattaggaatatcaataaggcttatgaaaaatgcaaaaaaattattacctatggctcaaaaaagaaagcacgtgtagaaaagacatttttgaaattagctaaattaacagaagagttagaagtattgaatgaaaaaggacaattacaaaaattagactttaagcgtatagaaaaaatggtagatgaggttgatcgtattaaaaagttttttgaagagaaggaattttctgattattttgtagatgcaattcaatcttatatttttcatcaagaactggatattgcaaagatattagtgcgatatgtaagtaatgaagaggaacgtaaggcaaaacaactagagtggctttatgcgcataaatattggttatttagcttggctggagggatggattgtgtgattaatgtaattagagatactttagatgaacaaatagaatttacacattttaagtaaaatttgataaagtttaaaaagtcaagggaaaaagatgctgaaggtgtatggaatcaagaattgcaatagtgttaaaaagggctgtgagtttttaacaaaacataatattgaatatgaatttgtagattttaaaaagacaccaccaagcttagaaagactaaaacaatggcaagatcgagctgggatagaaaaaattatcaataaagcaggacaaacatatagaaaaatgggactaaaggatcaagatttaagtgatttagagcttttagaaattgctagcaagaatccaagtcttattaagcgtcctgtattagagtttgatgatgaaaatgtatactttggttttgatgagactttttataaagagaaattcatttgaggcaaaatttttctaaaacactaactttttgtatttattttgcatttttgatgctatttataggatgtgcttctaaaaataaaatagaaaatgcagttttggatttaccgcaagattctagttattttttagctggtaatgatctgattttacctaaaaatattacagaagcactcaagcaaaactatttaaaaatctggtattcaccatggactgatccaagccctaacttaaatgtagaggaagttttttggatagcacctagtcttttaagacttaagggctatggaccaaatttaaaaccctattcttataaagagctgcaagaaatttatgattctttagatatggctcactatccaagtgcacagattaaagcaattattactagagatagtatggtgagagcagtcccgacacttaagccatattttaaaacacgagataattatccatttgatcgttggcaaaattctttaatttttgctggaactcctgttttaattactcattttaatcccacaaaagagtgggcacatatccagagtagttttgtttatggctggattagggtagaggatctagcaaggcttagtccagaaaatgaaaaacttttgcttagcactaaggattatattatgccaaaccgcgatcgtatcggtatttataacgatgctggagaatttatgcgtcttgcgcgtatgggagagatttttgccattaaaaatttaaaacaagatcatatatcagacaacttttatcatatttatctaccctatagaaagtctaatggaatgctagagcttatagaaactaaggttaaacgtgatgatttttctctttttcctagaaaacttagtcctgttgcaatggcaaatatagttgattctatgttgggcgatttttatggatggggaggggctttagagagtagagattgttcagcttttattcgagatggttttgcaaattttggaatctttttgcctagaaattccgctgctcaagctaaatatgcaaataatatgattgatttaagcaagatgaatgcaaaagaaaaagaagcttatattattaaaaatgccactccatttgccactattttgtggcttaggggacatgttatgctttatattggcaatatagatggtagagctgttgtggcacatagcgcttggagtgtaactactagaagtttacgctataaaacagaaaatcttttgggaggggcagtgattactactcttgtaccagaaaatcaaaaaaatgnnnnnnnnnngtaaaattaaaaaagctaaaaccctattagatcgtattttagggatgtcggatttatatgattatatcttaaagcttgattctaagtaaggtgaaatgatgaaatggatgtttgctttaatgctatgtatatatgctgaggcaaaaataaaagtagctgtatctattgctccacaagcctattttattcatcaaattgccaaagatttggtagatgtgtatgtcatggtgccaaatgggcggaatccagagcagtatgaacctttgatttctcaaatgagagagcttaaaaatagtgtgctatattttggtatcggtcttgattttgaggatcgctggaaaaaacgctttttagattctgctaaaagtatggagtttatttctcctaatataagaaatgattcttataatcaaaattataatcataagcatgataatcatatttggctttctatagaatttgctaaagagtatgcttcttatattgctcaaattttgagtgagcaagataagcaaagatcccaagaatataagcataatctttcagaatttattgccaagattgatnnnnnnnnnnaagcttgattctttattgcgcgagattttttctcatcctaatgccaaaaaggtttttttggtatttcatccagcatttgaatatttagccaaagaatatggtctattagagttggctatagaggctgataataaggaagtaaaaattaaacatatgcaagaaattagccaacaaataaaacaaaataacctaaaagtgatttataagcaaccacaattctctgataaaactgtgcgtttattggctaaagaatatggcttaaagatttcagaacttgatccatttgcttatgattggattgataacttgatgcagatagcacaaaaaatagctaatcaacgctaaaagggatatataatggcatctaaatatgaagatatagctaaaattgtcatccctacaagaatctggaatatggatgaggaaggaatagaaaacaaaattaaaggaaacgatataaaagagcctattattagttgttctaatctttgttttgcttataaaaaagaagaagtgctaaggaatgtaaactttgaagtttataatcatgattttttggcagtaataggtcctaatggtggcggaaagagtactttaatgaaattaatgttaggacttttaaagcctaaaagtggagagatttattatgccaaaaacttaaatcgaaaaataggttatgttccacaagataccggaattaataaagattttccaatacaagttattgatgtagtaaaaatgggatttttaagaccaagagcttttggatttcggacatcatatttacagaataaacgtgcctatgagattttaaatagacttgaaattgctcatttagctaagtgtaagattagtgagatttcaggtggacagctccagcgagtgctgatagcacgtgcattatgtggggatccagaaattctaatgcttgatgaacctacttcaaatattgatacaaaagctcaaaaagaaatttatgacttgttaaaattttttaataacttttatcctataattgttataagtcataacatttcaatacttttaggttatgcttctagggttttgtcggttaatcgtgaagtagtagtgcacaatatgccgcaggtagtgttgccaaatcaagggcatatttgtgaaattgatattttaaatcagatattggagagtagaaatgaaacaagagtttgaggttgctattattggcggaggtatttcaggttgtgcagcattttatgtattaagtgaatatagtgatgttaaaaatattgcactgattgataaatgtgctggattagccaaaataagttcaaatgctaaagcaaattctcaaactattcatgatggaagtatcgaaactaactatacatctcaaaaggcagctaaggttaagctttcagctcaaaaggtgcgtaattatgctttaaataaaaaactacaaaacaaggctatttttgaatatcaaaaaatggctattggggtaggagatttggaatgtgaatatattcaaaagcgttttgaggagtttggaagtatttttcctggaatacaattttttgataaggcaaaattaaagcagattgagccaaaaattattgaaggttcagatggggtagatcgctatgaaaatgtggttggtatggggtatgaaaaagattggtgtggacttgattatggctatttgagtgaacattttgtcaaagaagctatggaaaaaaatacaaataatgcaacatttttaaactattgggtaaataaaattgaacctagaggtgatggttatgctttagtttcaaagcagggggatgaaatatatgccaaatttgtactggtagatgctggatcatatgccctgcctttggctcaaggaatgggatatggcttggatttaggttgtttgcctgtagcgggtagtttttattttgtgcctgatttattaagaggcaaagtttataccgtgcagaatccaaaattaccatttgctgctattcatggggatcctgatgtggctataaagggtaaaacacgtatgggacccactgctttatctatgccaaaattagagagaggtaaacattggctagataaaattagctgggaactaataaaactagatgctaatatggatgtgttaaaaattatcctggatttaatgaaggattctgaaattcgtaattatgtatttaaaaatatgagttttgagttaccttattttggtagaaagggctttttaaaagatgctcaaaaaattataccatcccttaagttggaggatttgcaatatgctaaaggatatggcgaagtgcgtccccaggtattagataggacagaaaagaagcttgttttaggagagaaaaaaattataaccaataagggtattacctttaatatgactccatctcctggagctacaagctgtcttgaaaatgcaatgattgattctaaagagatcacagcttatttgggacgtagtcttgatgtagagcgtttttataaagatttatcaccagaagagttgtaagaatttgctataaagagcttaagaaatgatagagttttttagccattatccttttttgcttaatgccttgcttgcttcaattcttgtgagtataagtgctggagtaattggaacattggttgtaagttctaagagtgtatttttgaccggtggtgtggctcatggtacatttggtggagtggggattgctttattttttggatttagcactatgcttggcgcagcattatctgccatatttatggcatttgttatgggatgggtaaggctaaaatataaagattctctagatagctatattgcagcactttgggctatgggtatggctattggagtgatttgtatggatttgtcgcaaggttatggaaaagatctctctagctatctatttggatccattattgctgtaagtacagaagatttatggtacatgggattgtttgatatatttttaattttggttattactatcttttatagagaaattttaagcttattttatgattttgagttttgtcagcttaagggtatttttgtaaaaacattaagtatggttagttttgttttaatagcacttggtgtggtgatgagcatgagtgtggctggtcttattctggtcatttctattttgtctattccggcttatattgctggtttttttagttcttctttacgatttcagatggcattatcaagtttgttgtcattatttttaatgtggatgggatttattttatcttatagctatgatttaagcataggtccttgtgttgttcttgtatctgtgtttgcgctttttttggtattatccttaagatattttaagaggaaagtttcttgatgatcgagaatgttggtgtggatgtaaaatataaaaaaatgttaaaagttcttatttttataggaatgattttaatttttttattattattttttatctttgctttgattgcgcagactaatgctactgcagaaaatttgaagcagataaaacttttagaagagagaattaaaatacttgaaagtcgctagcaaatattttttattgttatttttgtttatttgtgatattgtgtatgcaatacctcccagtggtatatctggtggaagatatggctatggaggctacaatcaaggttatagtcagccagtacaacagccttctttgcgaaaaacatcatcagagatactcttatatgatgtaggtttaggattatcctattatagatatgcagagccaaatgttatgagcatttcaggacctatgtttaatctttttgcttctcttggatatattagagatctatttagatttcaattagatttatcttatgatacacatgtcggagctaatgcttatgatggtggtttacaagatgtgcatggcaatactactccctataagacaaaatccacagattggtatatactaggtgctacaaaatttggtcttactctttttgataaaaaagaaatattttttgtctataccgggcttggatatagatttttaaggaatcatttagaggataagccaggtattaaggctagttattatcgttatcagggctatttatatttgccactggggatgagtggagaaataccagtaaatccgcaactttccttgattagtgcactagaatatagaatcttgctttttgggcataatacttcaactcttacagatgtgggatataacaagaatgcttttttcaagcaaaatataggatatggtgctcattttagtatgggaatatgttattatattttaccaacctattcaatcaagattaatgcctattgggatttctggtctattgatgcttctgatattgttagcttaacttcagcagatggtatagttggtaattttgttgagccaaaaaatcatactaatgtttttggtgtaacatttggctttagtttttgatattttaagttacttttatattagattctgctaaataaatcttattttaatggctaaaatctatgatatatatttaatgaaatgcttttgttttccattccattatctaagacttcattatctatatctatattgatatttgtgtttggtttttgaaatcggctacttactataaatcctagcccatagcctagaatacctccggcaataacttgtgtgatagtatggcgttttgaagtgattctagatattccaacaagtgaagcaataatagttgtaggtactccccattgccacccataacgtctttgcataaaaccagccgcactgaaagcagaagcagtatgaccagatggaaaaccattatgtgatccagtatctggtcttttgctaatagcagcccaatcagggtggcgtgtagcaatggcgctaaaagtgtatttgctagctaatgtgatagctaatgtactacctgtacctatagctagttgcccaagtcccttccaatcttgaatagccatcggatagatagaaaccattaggggtaggaattgaaaaatatcgccataaatttgaaaagcacctttggcttttagtgtttgtattgaagagatacttaatagcaaagcaaggataatcttactaaaatttagcttgagatttatgtatttgtatgagagtagagtcatataaaaaataccttcaattaagagcctaaaattattaggaagaagatggtgtgcccagagggattcaaacccccggcctacaggaccgcaacctgttgctctattcagctgagctatggacacaaaacttttgctgaagcagggattataccaaaaaaaatattttttttcaaaaatataaaaaagttgctaaaatattagttcaggttttcctgaacttaaattaaaatcaagaaagtgggtgattttatgcctggtatcaaagttcgagagaatgaaacatttgatgaagcctatcgtaaattcaaaaagcagaccgatcgcaatcttgtagtaacagaatgtcgtgctagaagattttttgaatctcaaactgaaaagcgaaagaaacaaaaaattaatgcgaaaaagaaaatgcttaagcgtttatatatgcttcgcagatatgaatctaggttataatccaaaaatattccggtacttttgtaccggtcttctttaaacaaatcatcatttttatacgttaatttggaggtttttatgcagttttgcggaaaaaatgcacttatcacgggtgcaagcaagagcattggtgcagatattgcaagagttttggctagttatggtttaaaagtttggattaattatcgtagtaagcctgagcttgcagaagcactaaaaaaagagattgaagataatggcgggaaggctgctattatttgttttgatgcgactgatgaggctgcatttattgaagcgatcaatgtgattgttgaaagtgatggtgagttaggttatttggtaaataatgcaggaattacaaatgataaattagccttgcgtatgaaaacagatgagtttatgggcgttgtagatgcaaatcttaaatcaagctttattggttgtcgtgaagcattaaaagtaatgagcaaacaaaggtatggtagcgtggttaatattgcatctattatcggtgagcgtggaaatgctgggcaagtaaactatgcagctagcaaaggtggaatgatagctatgagtaaatcttttgcttatgaaggcgcaagcagaaatgtgcgttttaattgtgttacaccaggatttgtagaaacagatatgacagctattcttaaagatgaagtacgagattattatcttaaaaatatacctctaggtcgtatggctactggtaaagaaattgcaagttgtgtagcatttttgcttagtgatggggctagctatgtgacaggtgaagtccttaaggttaatggcggtttatatatgtaaatttttaaagactttttattatatcttttgcttgtagtaaaaagtctttttgtgctatgtgaaaattattgctattaaaagttttaagatgtataatcttaatatctgcatagcttgaaataaagctatcaaaatctttattttcttccccactaataacaagccccataatttgtatattttttgattttagtgcttctatagatagcaggatatggttgatacttccaagatagtagcgacctgttaatagcgtggggagattattttttttcatataatctagcattgtatgatactcatctataggggtatagagcccaccggcagtttctataatgagattttttgattctggcaaggggatatctaagccattataggttttattttcaagctttttacctatatgtggtgaagcgggtgtttttagaaaaatcccatcagcataaatcgtattttttgatttagctatttggcagtagtgttgcactaatgatgcatcccttacctctccagcctgaatgattttaaagtaatcataatttaggcttgcacaaagtatactggatagatgtgttttcccagcatctgtatgacagccactgatacaaatttgcatattttctccttttatctaccttatttatgtattttttaagcatagaatctaaaatcagtatataatctatgaaattatatattaggatgtgttatggtggcaagaacattaggtattgatattggtatttcaagtattggttgggcattagtagagatagaaaatgattctattcaatctaatggaggaaagattatagcttctgggagtaggattttccctaaagcagagcatccaaagaaatcttctttagctctgccacgaagggaagctagatctaaaagacgtttagttaaaagacgtgcccaacgtatgttacagataaaaagatatttatctgataggcttggcttaggggatatgatagatcaagataataaagataaataccaactttttaaaaaaggggataagtctgtatgggagctgcgcgccttagctttggataaaaagttagagcctagggagttagctagagtgattttgcatattgccaaaagaagggggtatgatgatatcacttatggaatggatgaaaaacaagatgataaaaaaatattaagctgtattaaagaaaatcagagacagcttcaagaaagcggctataagaccataggtcaaatgttttatcataaattttatcgcaggctgcgtccaaatggacaaatggataatattagaaataggaagcgaaataagatagtaagctataaatatagtattgctagaagcgaactaagaagtgagcttgaaatgatttttgaagttcaaaaaagcttaggcaataagtttgttgatgatgaattttgtaaaactttattgggtgataagcaagctttaaaaaaagaaaaaagagaaggtttgattttttaccaacgtccattaaaaggttttggagataaggttggaaaatgtgagttttttgataatgaaaagagagcttttaaagatactccaagtgcgcagaagtttattgcattaactaagactatcaacttactaagatatatcacaaatacccatggtatagaatttgatatgccacaaacaattaagcagatttttactgaagctatgaagcttaaaagcggacttagctacaagaagttaaaggctctattagaattgccagatagttatcagtttaaagggcttgattattctaaggataagccagaaaatagcactttcatagagtttggctctagcattaagcttgcttccttaggtatagatgaggctaggcaggatgcattagttagtttattagcagagaacaagaactgggatgatattgttttggagttaaaaaagataggattagaatctaaagcccaagagattagagcacaaaattttaaattttctaaaacaatcaatcttagtttaaaagctcttagctttatcatccctttgatgcaaaaagggatgcgctatgatgaggctattaaagagctttataatcagggtgtatttaagcttaaaagagtgcttcagaggggagatttgccttcattaagtgagatagcaaaagaggattcttattttgagattacaaatccagttgtgatgcgggcattaagcgaatttagaaaagtagtcaatgcgatcttgcaaaaatatggcaagtttcactatataaatattgagttaactcgtgaagtgggattaagcaaagaggagcgtaataaaattgagagaaaacaaaatgataatgcaaagttaaactcccaagctaccgagtttcttaaagataacaatatggagataacatcaaaaaatattctaaaagctaagctatttaaaatgcaaaatgaaacttgtatttatagtgggaaaaaaatcacacttaatgatttaagggatgataatagtgttgaaatagatcatatcttgcccttaagtagaagcctagatgattctcaaaataacaagatcctttgtctaaaaagtagcaatcaagataagagaaataggactccttatgagtggtttggtgatgatgagaagcgatgggatgcatttgaaacccttattaaaacaatgatgcttggaaaagagaggataaaaaagcttttaaataaaaactttaaagatagaaatcaaggcgctagagccgagtttttagcacgtaatttagcagatactggatatattgctagagtggtgagtaagtatgttagaaactatttggagtttttatccataggagataaaaaagagcatattagaattatctctggtagttttagttcatttttgcgtcattattggggtattggcaaaaaagatcgtgctaaccatatccatcatgcccaagatgctattattcttgcttgtgtaaatccatctagtatccagcgctttagcgagtatttaaaagacaaagagcttagatataagaaaaaccagcaaaagatagaagatcttgatgagcaaaccaagtatgctttgcgctggccgatgaatgactttaggcaaaaggtcgaagagagcatcgctaatatcatggtatctcatagggtatcccataaggttaccggggctttacatgcagagacaataacaagttttaaagacaagaaatgtcaagcaacatatggagggatagaggggataaaacgtgccataagcttaggaaagctaagggttgttaatgaaggtcttgtgatgaatggacccatggtgtgcatagatgtttttaaaagtaaggataaagggcaattttattttgtcccagtttatacctatgatattgctattaagaagatttcaaataaagcatgtgtataaggtaaggataaagaaggtgtgattaaggattgggttgagatggatgagaattatgagttttgcttttgtctataccctaatgacttagtagagatacaatctagcaagatgcaaaagccagttttgggtctatataaatcatctaatgcttcaaaagcctcaataagtatggaacatttaagccattatatgcttaatgaggatgagttaaacttttacaaaaatgaggaaaataagtttatcatagaaagtttgggtgtgaaaaccttaaaagtttttagaaaaaagacaatttctgttttaggtgaggttaaggatgcgccaaaatgcaagagagaaggggtaggaaataaatcttaaaaggagagctagtgtttgaagaatcttataggactttgttttttagcaagcctactaagctttcttgcaggagcaataatttaatcatcactcaagataagatcatatccattcctttgaaagatattgaaaatattattatcgatacaccacaagttagtcttagctctagtcttttaagcacattagctagatataagattatgctttttagctgtgatgcctctcatatgccaaatggtatttttctgccatatattcctcattatagagcatcaaagattttggggattcagcttagtcttacaaagaaagttaaggcaattttgtggcaaaagatcattaaagcaaagattgctaatcaaatagcacttttagataaaaatcccatagcaaaaaagctagaactcttttataagaatgtgaaaatggctgatttggataatgatgaggcaaaggcggctgtgctttatttcccagctatttttggtaaaggttttatgcgtaaagatctttgtgttattaactctgcactaaattatggctatgcaattatacgcagtgtcgtagctaggaatttagtgatctctggccttttgcccgctataggcatttttcataaaaatcaatttaactcttttaatctcgcagatgatctgatggagccatatagagtatttgtagattctagggtacttagcatgaatcttgggaatgaaaatagctttaaattagagcatcgcatttatctagccaatattttgcaggcaaaaatcactttggctaataaaacttatccgctaaatagagcgatatctagaagtatacagagttttattagagccatatgtgaagatttagatgccctagaattgccgatttttggagaaaattcaaatggaagagagatttatgagagtactagtgatgtttgatatgcctacatataccaaagatgatagaaaagcagcctcaagatttcgtaatgatttgattaaagaagggttttttatgatgcaattttctgtatatgtaaggatttgtaagggagtgcagagtgctaatacatgtcttaaaagactagagatgcttatccctaaaaaaggacatattcgtgcactgatgctgacagaaagacaatttgataatatgaagattttaataggcactagcagtcctactgaaaaagcacaaaagccagaaggtttattgttattttgatagataatggagaggtagtttttgaggggatgctaggcagttaccccgcggagaaactacaaaaactccttattttagccactttacaaatccttttcatcctcttagccccattatcaaagttatttcagatatgcctattatagcataaaaggatttgtaaagtggctaaaactcacatcccatttatccaatggctgattaaattatagcataaaaggatttgtaaagtggctaaatgatttttgggaattggcatttaagggacaagctttttaaaaatgagtttatttgcttaagatggataaaagagtattttaatgtgggcttaatctcatttagggcttataggattttataaaatacacccttgtttagatggatataatttacttctttatgattttcaaacttcaggcagacttttaatcacacttaatgaaaaaagccctaaaatgcttaaaaatactaaaagaagaaagtatacaagcttttattatagtaaaaagctgtatctaaatagaaaattatttatattctttaatttgttacttttatactcatttagaaaatttatatccttttttatcccattattattctttttaaactcttatttttttatcattaaaataaataattttgctttttaggagtatgaatgataccaaatgttacaaaagctttagagttggcagaagaattacaaagaaaaattgaggcaaatatctctacaagtgaaaaggaatttcattctaaaatgcaaaagcttttaaataatcctcaaaataaagtaatgcttatagaattgcttgatcgctcttttagatgtaaggataaaaaagcgagttttgaacttatagagcatactttaaataaatacggcatagcagatttttttagtgcatttgaaaaatttttacttttttcttttttgaattttggaaaatttgctccaaatttaagtgtacctttttttattagtcatttaagaaatgatactaaagctatggtgcttgatgctgatgtaaatatcttaaaaccacacattgagaaaagaaaacaacaagataagatcactttaaatgtaaatttaatcggtgaagaagttttaggagagcttgagagtaaataccgcatacaaaaatatgaagaagctttaaaatcaagctatattacttatatttccattaaaatcactactattttttcacaaattaatatcattgattttgattattctaaaaatgaagtggtaaaaaggcttgatcatctttatgctctagctttagaagaagaaaagaagcaagctaaacctaaatttattaatttagatatggaagaatttagagatttagagctaactgtggctgcttttatggaaagcgtggctaaatttgatattaaagcagggattgttttacaagcttatatacctgattcttatgagtatttaaaaaaacttttcgccttttcaaaagaaagggttttaaaaggaatgaaacctattaaaatccgttttgttaaaggtgcaaatatggaaagtgaagaaactatagctagccaaaagggttgggaacttcctactttttctaaaaaaatagacacagatagtaattataataaaatgctagattttatactagaaaatgataactataaatacattaacataggtatagcaagtcataatatctttgagatcgcttatgcttatacaagaatagctgaagctggggctttttcttcttttacctttgaaatgcttgagggtatgagcttgcaatgctcttatgagctatcaaaaatacacgatttaatcctttatgcacccgtttgtgatgaggctcattttaataatgccattgcttatcttgtaagacggcttgatgaaaatactagcattgataattttatgagatattttttcaatcttaaggtgggtgataaaaattggaatactcaaaaagaacttttcttaaaatctcttgaaggcattaaaacacttgataattcaactcatcgtatacaagatagaaataaaactcaaaatgtagttagcgcttatgaaagtggggtttttaaaaatgaaagcgatacagattttatcctaagtgccaataggaattgggctaagaaaattaaagaaaaatatgagaatttaaaagattttaatgcttatccagttataggggatttaaattttgaaaatgagaatttaaactttttagaagtaaaagataagattaaaaatcataccataggtaaggcttatttagcaggtgaaaaagagattaaaaaagccttagaagtagctaagcaatctaaatttaaagaaaaaagctttgatgagattcattctatcttagcaaaagcagcaagcataatgagagaaagaagaggggatttaataggaatttcagccttagaagtgggaaaaacttttttagaaattgatcctgaagtaagtgaagctattgattttacggaattttatccacactctttaagagttttaagagaacaaaataaaaataccaaatttagccctaaaggcataggtgttaccatagcaccttggaattttcctgtaggaatttcaattggaactatagtagctcctttagcagcaggtaatgtagtcatttataagccctcatctttatctatccttacaggttatatgctttgtaaatgcctttgggatgctggaattcctaaagatgctttgatttttttaccatcaaaaggaagtgatatttctaaatatttacttagtgatgaagtcattgatttttctgtgctaacagggggtgaagatactgcttatgcgatgttaaaggctaatccaaccttacttttaagtgctgaaacaggaggaaaaaatgccactatcgtttctaaatttgccgatcgtgatagtgcgattaaaaatattattcattcagccttttcaaattctgggcaaaaatgttcagccacttccttgcttgttttagaagatgaagtttatgaagatgaagagtttaaaaagactttaattgatgcagcttcttctttggcagtaggagatccatatgattttaaaaacaagcttggtacactagcagataaaataagccctaaggttgaaaaagctttaaatgagttagctccttatgaagagtgggttttaaagcctaaattcatagatgataatccttatttaatgactccgggtattaagtatggtactaaaaagggagattttactcatttaaatgagctttttgttccgattttaagcgtaatgagagctaaggatttaaaagaagccattgaaatagtaaattcaacaggatatggtttaacagcaggttttgaaagcttagatgaaagagagtgggagtattttcacacacatattgaagcaggaaatatttatattaataagcctacaacaggtgctattgttttgcgtcagccttttggaggggttaaaaaatcagccattggaaatggtagaaaggtgggaatttataattatattacgcagtttttaaatatctctcaaaatgattttgatgagaatttaagtaacaatgaatttgcaagcaagcttgatgatttaaagcttgatttggatcaaaaagagcaagatgagcttaaagaagtagctaaaatggcaagatcttatgcttttcattataaaaatgaatttagcgtatcaaaagattatgtaaaaattagaggtgaggataatcttttttcttatactaatattaaaaatatgatatttagactatgcggtgatgagagtttaagagatattttaggagtgattttagcagcaaatttagcaaaagttgatcttagcattagttatgaagatcataaaaaacttgatattgtaaaagaaatagttaaaaatataggtacaaaggtattgtttttacaagaaagcaaggatagatttatagaaaaaatacaggattatgaacgtattcgctatcttgcaaagcctagtaaagaagatgaaatttatataaaagcagcaagtttagccaagataatcattagagataagcctcttataaatggacgctttgaacttttaaattattttaatgaaaagtctttaagcatttcttttcatcgctatggaaatttaggaattagagctttaaaggagtaaaatatggaagtagttcaaattaatatccctattataataatgtttatagtctatgctattttaatgctttatataggtttttgtttctatagacaaaataaaaatacagaagattattttttaggtggtcgttctttaggtcctgtgatttcagccttaagtgcaggagcatcagatatgagtgggtggcttttaatgggcttgcccggagctttgtatgttagtggatttattgattcttatattgctataggacttactataggagctagtttaaattggctttttgtggcaaaaagacttagaatttatacgagtgtgattgctaattctttaaccatacctgattattttgaaacgcgttttgatgatgacaagcacattttgcgtatagtttgtgcagtggtgattttaatcttttttaccttttatgtttcatcagggcttgtaggtggtgcaaagctttttgaaagcacttttggaatcgcttatgaatatgctttaagtacaggaactttaatcattgttgcttatactttcttaggtggatataaagcagtttgctggacagatatgatacaagggcttttgatgatgtcagctcttgttattgtgcctattgtgatgctttatcatttaggtggttttaatgaagcttttaatattataagagaaatcaagcctaatgctttatctatgggcgagggagtgggattattaagcattatttcagcacttgcttggggtctgggatattttggacaacctcatattttagtgcgttttatgtcaattcgctcaaccaaagatatcccaatagctactttcataggtataggatggatgattttatgcttaattagtgcttgtttaatgggagttttagggattgcttatgtgtataaatttaatcttactttacaagatcctgaaaaaatctttatcgttatgtctcaacttctttttaatccgtggataacaggaattttactctcagctattttagcagccattatgagcacggctagttcacaacttttagtttcaagctctaccatagcagaagacttttataaaaaaatctttaaaaccgatgcttctaatgagatagtattaaagcttggtaaaatcggtgttttaatcgtagcgataattgcttttttaatctccacagataaaaattcaagtgttttaagcatagtatcttatgcatgggcgggatttggagcatcttttggctctgtgatgtttttttcacttttttggagtagaatgactagagtaggggctattttaggtatgattagcggggctttggtagttgtattatggaagaattatttggctactttatttaattttcctatttatgaaatagttccaggctttttagtagcatctttagtgattgttatagcaagtttattaacttcagtgcgtccaggaactaaagcagcttatgagagaatgttaaaagagctttaacatattaatcaaataggtattagaggtattgctataagattaattagcactatacaaaggaatgattaaaatgcttgtttagagatgggattgtatctattagaccgcatgcatatttgttactgcattaggtattaccagtctatgtcctatcatacataattgtgctattgtgatttttgctgcatagtctaaaaactacaaaaatcacaaggagcaataaagtgataacttacacaaataaagtgataaaaagtggtgcagtgagtgtgcttaactcattttttaaactcatcatcgccatggttagaagaaaatatcaagacttaattcactgattgtatccatggtgtattgattgagtttaaaaatttgaaaaatatcattaacattcttataataatgactataagcatcgtgctaacatagctagataaagaatatccacttaaattgcataaatttagggcttaaagaatttatataaattatacatagtgttaaaataaagatttaaaaaatcttgatagcttgctgtatgaatttcgtattttcaaaggattagcatcttcaatatttttattgattgtaatttgtgtttattaatcaaatatcttactacaggatcaccaaataaaggggttattataaaatctaaaagtttctaagttttatttaaatttcctattttttatgcattgttttttgagcgttgatattttgtgttgttgatagatcatcttgatttagatggataatctttggagtgatgatgattaccatttcttgtgtttgctctctttgcttatgataggaaaacaaatatcttagtataggaatatagcctaagatcggtaagcgcttttcttgagttagattctgtttagagataagtccaccaagaatcactcgttgattatttttaatttttacaattgaggatagttggttagtagagagattgggtggagattttagagcattgctttgattttctactttagagtcttttgtagaagtgatagaagggtttatttttaaaataatttcatcgccttcaattgatggtgtgatatctaagagtactccagaaaatacgcttggatattgttgtcttgtattttgaagtgtagaggaagtattggcagtttgatagacgagattttgagtgtatcggatgatattacctacagagataagcgctggttgattatttagtgtaaggatttttgggtttgatattgagcttacagatccataggtatttagaaaccggatgatttctccaagacttagatcttgtgagaaaatattgattccatattgaaatgaggaattggacaaattgagtaagggggtttgagaattattgatactaaagttataaaaattaccccaatcaatccctgtagtgcgttcattatggtgtgtaatggtaagaatattaacatcaataagcacctccgtgtttaaacgttcattgagtttttgaatatagtgttctgccctcttgatttgagaaggtgtggcagtaatggtgataaaaccagaacctttatcaatgctaataggagtagaatctttagcaggaagatatttatcattttctctaaaaataataggatagatttgatcttttatctctccccaaaaatctagcgcatctaaggagtaaattttagagccagatttattagcattttgatcttgagcattagccatatctaagagctgctgatgagtattgttggtattattagagatattttggttaaatgtgctatcttgttgagcatcttgagaaaaaatgatatttgtattgcttgaggcaactctggaagtcgcgatgtaattgatatgaaaagtttttgtttttaaatgagagatatatatctttttagattcaaaaatataatctaaatccagagcttcaaatccagtttgtaaaatatcatctaaacttgagtgataaaaatttaaaagaatgtttttatcctccaaaatggcttgagaaaccttatctctatagatgatgctaagatggcattctttagctaaatgttctaatatttcataaaaactgatatttttgctaatagcaatatcaaattttcttgtctcacatggtattttggcatacacaaaacttgtagctaaagtaagaaaaaaataaaagtttagatatagttttattcttgccaacatttaaagccctagtatgattttttgatgctgtgcattttctaagattacagatatgggggtaatatctatgattttcataccaaaaagattgtctcctgtttgataccattggtttgagattctagctttatggttgatgatcatttctaaattcatagcatgaggactaaaaaatactaaagatacttttttgttatttgtatcgcgtataaaggcatttttagcaatacaaaatcttacaaacatattcatttcctttttttgttctaggctataatctaaaatttcactttgattaaagctttctataaactttaaaagttttgtaagtgatagaaaatctccacttgctctgaagctatgaatatttccttttgattctaggttagatatagtaattttgttattaaactttaagatttcttgcaggatttttgcgggagattttggattagaaatcatggtttgttctagcgttgttagctctttttgattttttatggctttatagcgcattaataggttttcaaagccataaagatagaaaaaactaaa

SEQ ID NO: 1006 - DNA, 22688 bp, synthetic construct
  misc_feature 1..22688: note = Synthetic
  source 1..22688: mol_type = other DNA
ttatttgtgattttattgaattgcccaaaatcaatgtaagaaaagatattgatatcccccccccccaatttaatttaagagataaaataataagaggtttatctagctctggaattaagagagataatgtgtttataaaatttttattagatacttttaagattatcagaggcattgcaaggattatagagcaaggtataaaaaaatttattttataaaatccccctcctcatcaatatccaaactcacttctctactcatcacataagagagaggattgtcattgaagcttgtttgaggggtgagtcttgaggctagattgatataaattgcaccattaagcacatagcatttttgcaagtcttggcgacgcacagagcttgaaagtagcaagaggttttgaagtctatcctctataatccttcgcataaatagagggttttctacactctcacacacacttgccaaatcctcacacccaaatctcacaaatttctcataagcctctttgatatgcacttcatttcttagaggagaggtgggctgaagcaaaatcaccacatcaaactcttctcccctctctttgtatctctctaagctctcgatcacacactcaatgctcttgctctcatctcttgcactctcctcactcctcaaaaacggcacactcgctccaaactctcttgcaatacaggcgtatttctcactatcagtgcagacaaagacttcatcacacactccacttctcaatgcactctcaatactatgagccagaaggggtttgcctctaaactctttgatatttttatctttcattcccttgcttccacttctagcaggaatcagtcctagcactctcatagcatatccacaaatttcttttgaagctttttatcccaaatctccccattctctagcacagcgataaactctttggcactcttgcccttgccaaactctagtcttggggtgagtttgagtgtttgaacctttctaatggcctctaaaatctctttttcactctctttcacactcacaatcccctctccctctttgtatcttccctcttgtcttgagcctaggttaatgcaagggattccatagattggggcttctctaatccctgctgaactattgccaatgatgaattttgcatttttgagcaatgtcaaaaatgcttcaaatttgagggatttaaagagtgcaaaatgagggtttttttctagtcttttataggctttgaggattgtttttgagcctaagtcattattggggtaaatcacgataaagttttccccacatttctctaatgcctcaatgctttgagtgatattcctctccaagctctcttcttctgtggttacagggtgatagagaaagattgcatactttcccttaaagggttgtatttgatagtagtgtttctccacagcctcaagagtaggcagagaagagccaagcattaagtcaatatcaggagagccaatgacaaaaatatcttcttgcttctctcctagctggattagtcgcctcttagcctcctcatttgccacaaagtgcaaatgagcaagtttagagatagagtggcgaatagattcatcaatcgtcccactcacttcccctccctcaatgtgggcgactaaaatattattaaacgcccccacaatcgctcctgcaagtgcctctagtctatcgccgtgaatgacaatcaaatcaggcttatattctttaacaaagtttgagaattgtttgatactatcagagagggctaaatccattctttcttggtatttgtgggcttttgccaaaaacacctcatcaaatccatctttgaaaatctcaataaaagtctttccatacagctctaagaggtgcattccacacacaaagattttatactcaaagcttttgctctcttttacttcttgcactagggctttgatcttcccccaatctgcccttgtcccactcaaaaatacaatctttttcactcgatcatctcccaagagagatgagtgtcgctctctatatcacattttgctctcttgcccaaaatctcctcataaaattcagccttgatttctccaagtgcagggcgtttcacccatagattttctttgctaaaaatctcaccctttttgataggagcaatgctgacacaagtggagaatgcaaagtcgatagttacttgctcttcttttgtagcttttttctctcctccacgcattgagaaaatttctttggctgagaggattaaatctcttgtttctttctcatccatagagcagatgatatcagggccaattctatctttatgatcgctaaaatgtcgctctacgatactagcccctaaagcaatagcagatttacacgcattgttgttgagtgtgtgatcgcttagtccaatagggatatgaggataagccctcatcatctcttgcattgctccaagcctcaccaaatgagggggtgtggggtagagattggtagtatgaagcaaggcaaaggggacattaaagctttgtaaaatgtctgtggctttttttacactttccaaatcattcattccagtagagacaatcataggcttaccaaaactagcgatatgtttgagaagtggatagttattcatctctcctgagccgattttatacgcactcacccccattctctctagtctatctgcccctgctctagaaaaaggtgtggagagaaatatcattcctgccctctctacatactctttaagctcaaattcctcttcttcactcaaagcacaactttgcataatctcataaatgcttttatcactattgccaggaatgacttttttggctaatgagctcatctcatctttaatgatgtgggtttggtgcttaagcacttccactcctgcccttttggcactatctaccatttctttagcgacactcaaagagccattgtggttgatcccaagctcagcaatcactaaaggctcataatcactcccaattcttctaccctcaatctcaatgaaatttgacataataaaaccttaaataaaaaatattggtattttatctcatattggtttaattgtgatgtaaatagggtggtaggttagagtgttattaaatcttgtttgaaattcataaagttttttttgagtgattgtgtaattagattccaggctatttaccccagtaagttttaagtgcctaaaaacctctagaggcgtttgaaaggtaagcggaactagtgtttcagataagtgcaagatatgataattttcactcaaaatcttttcataatctattaaatcaagataatctaatccgttgttagtatgttgccttatttcaatgagattttgttttccaaaagtgccaaaaacaagaagagagtcttgatggcaaagttttaaaatattagccaaaaactctctttgatgaagccattgaatacaggcatttgagataataagatcaaacttttcttcaagcgctgtatgaatagaatttgcatctagtaaaataaaatctgtttgcggtgggatataacttttgtaatcattgatatcgttgcacacaaattttgtaaaatccaatgcttgaaaaagttttcttgtaagcccaccagttccgcatccaatctcaagaacgctataaaacctttttttgggtaaaagtgataaaagtctatcttgcataagattttggattatcgcattgatatcataggtgctttttgcttcaaaaaatttttttgctatatattgcatagcatatcccaatcatcaaattcaaaaaaaggaaaatgaggagtgtttattttaataggtttgcaattctcccaagcatttagctgatactttgtttcaaaaattttatcatctctgctaatgagaatcttatcccatatttcctctttgcttggtatgtttaaaagagtgtcatagatattttgtaactccataatcaagctttcttttttagggaaaagaaaattatttgcactatttaatgtattttcaaaagtattttttttaaaaatctcaagattaaagttttttatagtgtatttgaaaattgcaggagggattccattttttttatcaataccttgcaaggtcccatttatggcaatttttttaatgacattcaggttttttggcaaaaagcgattagccattgctacccccatagaccaagcaattagtgtgatttttttatcttttaaaaaatctaagtttaaaagattgttttgataattagaaatgaatataagtgttttttttggcaatgtgagatgttgaaaaaaactcttattgctcccaaaaccagaaaaaaatattatgacctcattataatctgcaggggttagtaaatctacttgcatagagcctctaagagattttgtaaaatatcttcattaagatttgcattgagtgagattctaatccttgcttgattttccggaacacttgggtatttaatcgcaggggcaaaaaatccatatttaaagagtttttctgataaatcaagtgcttttttattttcataagtcataaggctgatgatatgagaatccccaataaaatccatttttctattcagtaattcctttcttaaaaaattagaaagattgtgcagtttgttttgcctatctactaagtgtggtagattcttaaagacaaagaggcaaaaagcaatgctaattggagcaatggcggtggaatagataagagtgcgtgctttgttgataaaatattgcctaaaaatatcatcgcagagcacacatcctccacaagatcctatggcttttccaaaagcaagaattaaaaaatcaacagaatctaaaacctttaaatctttgcacaatcctaagagttcttgcccgtaagttccaatgctatgtgcctcatcaatataaattaaaacatttttgtagatttttttaaattcgatgagtttattgatattgcaaaaatccccatccatactaaaaagtccttcactcaagataatgatatgctcataagtgccgtgaaattctttgagcaaagattctaattcttgcatattattatgggcaaatcgcttaaactttgcacgcgagattctaaggccatcaaaaatactcgcatgcacaaaactatctgctaaaaaaagtgtatttggtatttgcgcaagtgcatctataattcctagatttgcatgatatccactattaaaaatgagtgctttttttggggaataaagcatattgaggtatttttcaaaatcctcaaaaattttaaaatttccactaagacttcttgaagaagcactggatagaggggtttgtgtcaaatcgacttgttggtaaaaagagttgataaaatccctatcttgagctatgcctaaatagtcatttgaagcaagattgataagcatttgatttgaaataatgattttttcttgttgatgttgcataggagtaagcgtgcgataatttgatgaattttgcaattcttgtaaaatatgttttattttttgatgcatcttaaacctttttgtaaattatacttcaaaatcaggaatatactaaaagttatcaaaagatattacacttctgtgattaaaaataaggtagagaatggaaaatataatttcacaggatttattgcatatttggcatccttgcacgcaaatgaaagaccacgaaaaaatccctcttattcccattaaaaaaggcagaggggtttatttatatgattttaatgataaggcatatattgatggtattagtagttggtgggtcaatttatttggtcattgcaatgcgtatatcaatcaaaaattaaaagaacaaattgatactttagagcatgtgcttttagcgggttttacacatcagccaatcattgatttatctgcacgaatctgtgccttattgcccaaagaacttaataaatgcttttatgcagataatggatcatctgccattgaagttgctttaaaaatgagttttcataagagtttgttagataaaaaagaaaaaaagaaatttattaccctaagtaatgcatatcatggcgaaacgctaggggctttgagtgtgggggatatcaaactttataaagaggtttatggcgcgcttttattagaatgtttgcaagctcccactcctaaaaatgaagattatgaaaaagaattgcaggtttttaaagagttaataatgcaaaattatcaagatatttgcgcttttattcttgagcctattgtgcagtgtgcaggaaatatgcatatgtatagcacagattttataaaagaaagcgtgctttttgctcaaagctatggaattgatgtgatttttgatgaaattgctgtgggatttggtagggtcggaagtatgtttgcattagagcagtgtggagtagtgcctgattatctttgtttgtccaagggtattacagggggatatttgcccttatcagtagtgataacaaaagatgagatttatcaaaaattttatgccccatatgaagaaggaaaagcttttttacattctcacagctatactgggaatcctttggcctgttcttgtgcaaatgctgtattggatatttttgagcaagaaaatatcatacaaataaatcaacaaaaatccaaatatatttttactagaatgcaggaattaaaaaattttcatcaagtttcaaatctaaggagcagagggatgatttttgcatttgatttgataaaaacaaaaaaaaatcgtgcaggtttgatttttttccaagaagccttaaaacgaggtattttattgcgtcctttgggaaatacaatatattttatgcctccatatgttattttggagaaagaaattgattttgttgtcgattgtataaaagagattttacaaacaatagagctttgatttgttataatttactccaaaaaatagctctgcttgaggattaaggcaaaaaatgaagagtattaaatttaaattgacttttatttcggtatttattgtggctttagcgcttgctattatcggtgctatatcttacaaatctacaaaaaaagttgcttttaaccagtcagtaaaagaacatattgatacagtaaaaatggctgatattccgatggaagcagcaaagctaagagtatttactagtataaaaagtttgttagaacaactagatgaagtgccttcagatgctttttttaatcaaaccaaagcattgcaagctattggtcctttgcttaagccttttagaaagggcggtgattttcttggggtatattttgcacttaataatggtgagcttattattagtgatgcagatatagataaaaagaatcttgcttatggtatttatgggaaagctgatgattatgatgctagaactagggagtggtataaagatgctttaatgaaaaaaagcttaattgtaacttcagcctactttgatgatgcaacacaagagtattgtttcacatatgcggtgccaatttatagaaataataaactgcttggaatcttgggtttagatgataaaatctcaaccttacaaagaaattttgaaatgatgcctggtcatatttttgcaatggataaaagtaaaatggcatttgtctcgacaaataagcaagaagttttaaagaaagatgcggatttgataaaactttatgatatggtgttaaagcttaaggatttaaaaccatttgtttttttagataaaggtggaaagcaaaaattggcagtatgcaagcgttctgatataaaaggtcaaggttcttatattatttgcagtgtcgaggatttgcaagaagtgatggcgcctattgaaaaagatgcaagaatgcaagtcttcttggcgattttcttagcaattgtggtagctttcttactttattgggtaatttattattatcttaaacccatcaatgctatacaaagtggtttaaatgaattttttgattatttaggacataagaaaaagagtgtagcaagaatatctgttaatacaaatgatgaatttggtcagatggctagagttttaaactcaaatattgataaaacaagacaaatgttagagcaagattctaaagcagtgcttcaatcagtagaaacagcaaaaagaattgaagcgggtgatttaagtgctagaatcattgaaaatcctgcaaatcctcaacttattgaattaaaaaatgtattaaacaatatgcttgaaattttacaaaataaagtaggtagcaatcttaatgaaatcaatcgtgtttttgattcttatatgaagttagattttactacagaagtgaaaaatgcaaagggtagtgtagagcttgtaacaaatgctttgggtagtgaaattagaaagatgttgcaagcttctagtgactttgcaaatagtttaaatgttgcttctagtgatttgtttcaggccatcaatagtttaaatgcagcatcaagcacgcaagcgcaatcattggcaaaaactacaaaatctattcacggaataactaaaacaatgcaggatatcaatgaaaaaaccaatcaagttattgcacaatccgaagatatcaagcttgttattggcattattagagatattgccgatcagacaaatctcttggcattaaatgctgcaatagaagctgcaagagccggagagcatggaagaggttttgctgtagttgctgatgaagtaagaaaactcgcagaaagaacacaaaaaagtcttagtgaaattgaagcaaatactaatatgcttatagaatctatcaatgaagtaggggtatctatagcaaatcaatcagatagtgtatctcaaatcaacgaagcagtggtgcatttacaaagcattacagaagaaaatgcaggtattgcacgatcttcatcaaatattagcactaaagtaaatcatattgcagaagagattcttactgatatcaataagaaaaaatattaaaaaataatatccaatgcttgcttgaagtcttttttgatagtctcaaagttagatttatcaaaaaagggcaagtggagtatttttacttttgcgtattctgagataaaattatcaaaatctttattttgttctccagacattattaatcccattagttgcatatttctattttttagtgcttcaatactaagcaatatatggttgatagaaccaagataatatcctcctacaagcagagtttttagatgatggtgagagatgaaatcaatcatacaatatttttcatcaataggactataaagtcccccagctgtttctatgataagattttgactttgtggtattgtaatttctttggcattataattggctttttctatttttttacctatatgtggagaagcaggagtttgtaaaacatatccctcaggatagattttgctatgcggagcaaaagaagtgataatctcacaatcttttggtattcctgcttgaatgattttgaaataatcatatcccaaacttgcgcataacattgcacttgcataagtttttccgacattggtatgacatccagcaatacaaacttgcattttttatcctcataaataaaagtaattgcacattttacataaaaaacttttttttgttattttataaaatgtgacaaaacccaactcgaaaaatataatattaaaagatggagaaaaaccatgattgtaagaacattaggatttgatattggtatttctagtattggttgggcgttggtagagggacaaatgcaagatgataaaatcaaactcgaaagaattgcagatagtggagtaagaatctttagggtggctgaaaatccaaaagatggaaaatctttagctctccctagaagaaatgctagaagtgctaggagacgcaatgcaagaagaagaaatagaatcttagaaattaaaaaatatctttgtaaaactttggaaatttcacctaaagaaatgtttggagatataagtctccctcctctttttcaaacaaagccaagagagaggctatgatgatattacttatgaactagaggataaagagggaggtaagttaaagggtgcaatccaaaataatcaaaaaattttacaagaaaagaattttaaaaccattggtgaaatgatgtatgaaagttattaccaaaagccaagatttggaataactggacaaatggataatgtgcgcaataaaaatcaaaaagacaaagacggcaaaaaaagtattgtagactacaagagatgtataggaagaagtgaattaagagcagagttagaaatgcttttaaatacacaaaaagaactaggaagtgcttatattactgataattttaaaaaaataattttaggaaatcaaaatgcaaacaacaaaataggacaagagggaatagtattttttcaaagaccattaaagagctttgaagataagataggcaaatgtcaattttttaaagatagtaatagggcttgcaaattctctccaagtgctgaggagtttgttgctgttacaaaaattatcaatacacttttaaatatttccaataaaactggaattatatgggaaaataaacaagagataattgagcaaattttgcaagaagcatcaaataaaaaactaacctacaagcacttgcgaaaaattttagaattaccacaaagttttgcttttaaagatttggattattccaaagcagataaatcggagaatgtagcatttttagaattcaaggctacatatcagcttaaaaaagcaaattctcatttatcgcaaatcaaacaggataagattgccgaaatattaggtgaagaaaaagattgggcgagaattgagagtaagttaaaaaaagaaagttttactactcaagaaattgataatatcaagcaagccaatctaaaattttccaaacacatcaatctttctttaaaggcactctaccaaattcttcctataatgaaagagggcaaaagatatgatgaggcagtagcaatcttgcaagaaaaaaatatttttccaaaaacaacttcacaaaaaacaaatcttttacctcctcttaaggatattgcaaaagaagatagctactttgatatttcaaatcctgtcgtaaatcgcgctttaagtgagtttagaaaagtaatcaatgctattattgaaaaatatggagcagtgcatttttgcaatatcgagcttacaagggaagtgggaaagaaatatgcagaacgggataaagaagcaaaacagcaaaaagaaaaccaaataatcaatcaagaagccttaaacgtcttaagaagctatggattaagtgaaaatgcaaaaaatattttaaaatgcaagctttggattttgcaaggagagcagtgtctttatagcggggataaaattacacaagagcaccttagagatgaagcgtctctagatattgaccatttctttcctctaagtcgtagtcttgataattctcaaggcaataaaatattgtgttttaaaagagaaaatgcccaaaaaggaaacaagacgccttatgaatatttagcagataatacggataagtgggaaaaatacattacacgcgtttttgccacaagatttgacaagtataaaaaacagagactaatctcaaaaaattttaaagatagaaatattggggatcgtgcagagtttttggcaagaaacttggtagatactggatatattgtaagagttgtaagttgttatattgataaatatttagagtttttacctcttgaaggtaggaaaagaagggttaggatagtatcaggttcgcttacttctgcattaagggcgtattggggaattagcactaaggacagggagcatcatattcaccacgcacaagatgctattattattgcttgtatcaacgatagcacgatacaaaaatatagccaatatctcaaagaaaaagagttaggatataaagattctagacataaggcaaatagtttaaatcaagcagactgtgtcacaaaacttgctttgcgttatccaatagaggattttaaaaacaagattgctgatagtattgcaaagatttttgtttctcacgcctcatcacataaaattacaggagcattacatcaagaaacaatcagaaaaagagaatcttattataagagttttggaggggaagagggggtaaaaaaagctattgcatttggtaaggtacgagaggttaatggaggtttagttgataatggagagatggtaagagtagatgtttttagaggtaaaaaaggtttttatgcagttccaatttatacttttgattttgcactaggcaaacttccaaataaagccattgttcaaaaaggaaaaggtgaggtgctaaaagattggatagagatggatgaaaattatgagttttgtttctcgctttttaaaaatgactatgtcaaaatccagacaaaagagatgcaaaatccagttattgccgtttatactaccacagggactgcaacggcaagtatgagttttatacatcatagtagatttgcttttgcttcagaggatgaaaaaagtttctttaaagatgtggataaaaaagaagataagatgcttttttctcgcacaaattgtggaattcagggattggtggtttttgagaaagtgcaagtttctccactaggagaaattaaagtatgcaagccaagtaaaaggcaagaaatagcactcaaaagacataagaagtaaatcaatgtttgaagaagcttttcgcacacttttcctaagcactcccacaaaactttcgcataaaaacaatgctttgtatcttacacaagatacaaagtctttttgtatccccttaaaagatatttcagtcattgtcattgacactcctcaaattactcttagctcaagtcttttgagcacttttgcaaaacataagattttgctttttgtcagtgatgaatctcatatcccaagtggttgttttatgtcttatctaccacattttagaggtgcaaaaatcttgcaatatcaaataaaaatcaaacaacaacaaaaatctatcctctggcaaaaaattattcagcaaaaaatctataatcaagcacagcttttgtttttacaaaatcaaaatattactgccaataagcttttgtccttgcaaaaaggtgtaaaactcaatgatagcaccaataatgaggctaaggcttcaatgctttattttccagctctctatgaaaaggattttttagagaggatttttgtgttattaactctgcattaaactatggttatgcgattgtaagaggagcaattgcgagaaatattgtcgcttcaggtttgctgccctctcttggaatcaaacacaccaatcaattcaatccctataatcttgcagatgatttaatagaaccttatagagctttcgtggattctaaagtttcttttatgcatttaggagagagtttggaactaggggatagggtagagctagtaaatattctcaatgcaaaagttttgcttgaaaataaatactttcctttatatagagccataacacgcacgatatggagtcttgcaaaagccatagagacaggagagaactacctagaattacccacttttagcaaggagagtaatggaagagaaatttatgagaatcctatgatgtttgatatgcctactaagacaaaagagcaaagaaaggcaggaagtcaattccgccaaagattactaaaagaaggatttttttatgttgcaattttctgtatatgcaaggatttgcaagggagcaaaaagtgcacagacctatatgaaaaaattggaaagttttttaccacaaagagggcatattcgcgccataatgcttacagaaaaacaatttgacaatatgaagatactcataggagaaaaaagtctcactgaaaaggctcaagagccaagacagctgacattattttagttttttgggatgctaggcaagttaccctgcggagaactaaaaaactccttattctagccactttgtaaatcctattttgataaatctcgtagaggcaaaagcccccttatttcatcgttttagccaagggtattttatcatagaaagatttacaaagtggctaaaactatttaccatttaacctagtctttaggaaaaaagattaaaatactaaaagaatatgagatatggatacaataaggaatattaaaaacacaaaagagagataatgcaaaaatattacttaataaagagcaagaaaatgcttcttaaggctttggagaatgagaattatctcaaagatttaactatcagaatggctcatcatagcaccgctattgagggcaatactttaactcaagatcaaactgctagtattattcttgatggttttattccaagccataccaatgaaagagaattttttgaagtgcgaaattatcgttttgtaattcctaaaattctagagttttatcagcaaaatctacaaaataatcaaaaacttaataccaatcaaattaaagaactacactctattgttatggataatctcattgaaaacaaggggcaattcaaagtaattcctaatcttattgtaggagcaaattttgaaacaagcaagccttatttagtgcctacacatttacaagaaatgctaaataacttagattatcaaatcaatagtgcaaaagatgatgatcaaaaattagaggcaatcttacaatcacattttcattttgaaaaaatccacccctttaatgatggtaatggaagagtaggaagacttataatgttttatttttgcatagaaaataatatcactccttttgttattcaaaaagaacaaaagtctttatatatttcaattttaagagagagtaatctcacagaatttaaaaaattagcaaaagatttacaagaaattgaactcaatcgcttgcaaatctttttaagccaacaaaaagaaaaacaaatcagaaaaagttttaaaagataagaatattctattcctaaaaagaataaaaaagaataatttattcttttttatatctctatacttcaactgcaataacaagaaaagtaatttaatcgaataatttaattttacatagaaaaaatatttgatatataattgcatcagaggttgccttaagaggtagcagcctctcaaggtagcctactttttgcaaaggaggctaaatgaagaagatattcagacatatcttaatgggcattatactactattgctttttgcagtcaaggcttattaagataaaacctcttagctcatttcataagcgtgagctaggagaatatcttctaacctctagcttatgtttataagaataaaatattcctaaaaggaataaaaagtaataatttattcttttttattcctttttagcataaaaaagaatagagcttcattgcaaacaaacccaccacacacacttatataaaacaatacacatttttaatccctttttttacttttttatgcagtttttttattttttacatctcaatagaattttttttgttttgcaaaagttgcaaatctaactttttattggagaaaaagatggaaaaacaagaattaactaaggaagaagcagttgctttttttaaagcagggattgagattcaaagtgaagatgaagctactttgatattagaacaagaacttaattacatcgtaggagagtaagaatgaaaacttgggaaacaatgactttggaagaaaaaaagaatagttatgctgaatatatctcttttgaaattgtgcaaagtatcgcaaaagacagagcaccttttaaaaaagacaaatcaaaagaagagtggcaaagggcttataatccaagcaatgggataccatacaatgatttaaattctttaatcttgaatattaagcaacaagagggtaattataaaaacaatgcgtggatttccttaaatgatgctgcttttttaggagcacaaaaggaagaattagattctatttttcaaaataaaaatattgtaaaagcaaaaatctcttatattaaaactcataagttagaacctatctttaaacttgatgagaatggtgaaaaaataccattgcttgatgaaaatggaaagcaaagatactctgaaaaaacaggcgaaatgttatttgagtatcaaacagaagtgcaaaaagaccaaaatggaaatattaaactaaaggaaaacggagagccatttacaaaaattagcactcaaaaagttgcaataactccaacgctagttacagaacatctttttaatattgaagagtttgccacaatcaataaagaaagactaaaaccactgaatgaagaattaaaatttaaaaacattctaaaaaacaaccctcaaacaccagatgagaaaaagttacctacttatactttattggaagaaaatagacttctgtatccagatacattaaagcaagttaagaactatctttatgcacagaatttagaaaaagatttccacgcaaaagactttagaaaacaacaaaatcaaaaaattgaaaaagagcaacctgaaataaagcaagagaaaaagcacgagcagaaaaaaaacaaaaagctttaaaagatagtttttataaaaggaggggagagcagagcaatagtaaggagagattatgaataaggatttttggaactcatttttttacacctataatttattaaagcttgatgaaaaaaaagaatttttcaaagttattattgatgaaattaaaaaaaactctaatattgatgattacatagaaaatctcctaaaagagcttaaagcaaccaaagaagaaatacaacaagacaataaaatagaacaagccattacactcaaagattttttagaagattttcaaaaagagattgaaataaccaatgataagcaaaaacaagaactacaggattttgttaaaagcattcaaaaagagtttgaagatctccaaacatcagatttggtttttaaagaaagcaatgaaaagaagtttgttttgccaattgcttggaatatctttgatgaaaaaattattcattttggtaatcagattttaaaaaatcatcaagaagacttagagaaaataggtatttttaaagaggaagaaatatttgataacactattaaggtttttggtagggagaatttagttagtcaagaaaagcttgctgaattaaaaaaagattttataaacacctatatccagcaagtgcaagaaaatacaggtttaaaaattgacttagtaggtatgaatcagaatgatgatgccattattgcacttaagacagagatgaatcaagagcaattcttatcccttattaaaaataattttaatccagagaagatagaatggaacaaggttttaagtattgatgagattaagagagaaaatgaaataggagaaaactttataaatctctttgctcaagattgccaagagattatgcaatcaaatactattgaaaatcaaaaactaaacaatcttattgaagaaaatgaaaataccatcaaagaaacacctctccaaaatatccataatatacctaaggaaaatacaaaagcattagaaaataataagaagcaatcaatatctcaatcagaggaaaaaaagccttggcttacttggcttgaagatattaagttacaaaatcacaatctcgctatgacaaaagatatgttcaaaaagagattttttgagtattgcaaaaatggaatggacgatgatgagttaaaaattttaattattcttaaagacaaaaccccatcaaaacttagtttagaacacagagaaatgattgaaaaaggtatccaaatatcctttgaaggcaacaagatactaaatgatgatttaagattggcagcaaaagtttttaacgagaaaaagagcaacccagaagaagtttcaaaaactaaaacttttttacaaggcttagaaagcaataccctcaatcaacaattttcaaaagctattgatagaaatttacaacataaaaaacaagagaatacaaggaaaaagtaatgccaaataaagattttaataaagttcaagagttaagcaaaattcctttgcatttggtattgctaacacagggatacagtcttttgaatatgtctttaagggaaatgcaaagaagtaaatggatacccttagttaaagaagatattttaaaaaataaagaaaaaattatggtgaatatcaaacttgatgaaaataaaacaccatattatctttattacaatatgaatggtgatcaaagtgatcgtggcaatattatcaattttgccaaaaatagaaaaattagtgcaaaaaaattagttgaatgttttcagaataataaagattttgatttttcaaaaataaaaatcaataccaccattacacaatcaaaggatttttccaaagagtttaaaatgcttgaagagagtagtttggataatccattatttgaaaatcgtatgatttatgcaaagacaattacaccatacaaacaatatatcaaagaagataaatttaaaaatgtgtgtttcccacattatagtcttcaaagcctaaatgaggtaaaaatgatagccttatgtggctttaccagaagattaaatattcctattttaaaagatacagagggaaacataagaaaaaaacccttaaagaatattcaaacaggggaaaaaggtattgaaatcctaaaaccaagcggagagattaaaaatttagttattacagaaagcattattgattctttgagttttgtgcaattaaaagggttaaattcagaggaaactcttctattttcaacagcaggaagatttggagagcaaaaactaaaagatatgcttgattttatgtttgaaaaaaatatattaaatgcaaatttaaaaataaatttagctatggataatgatcctgatggaaaagcaatgagttccataattgaaaaatattttttagaaaaaactaaaaaatttccaagagtttatactccattttgcaaagatgttaatgatgatttaaagctcaaaaatttaatgcaagtagatattttaagcaaagaaagctttaatgaatttttagatagacaaattttaaattataaaagctcaggcaaaacctatactagaaacattattttagaaaaacttagaaagattgacaaaatcaaagaattaccagaaagttttaaaaatgcctttaatcaaattccaaaacaccaagccattaaaacactttaggagaatagaatatgagtgaaaagaaaaatttaaaagaagacattcttaataaagaaatagaaaaaattgcagattttttagaagcaatctataaaaaacaatcaaactccttggagaaaagagtgggattcaaaatatggaattacacataatccttacacaggaagtgtttatcagggattaaattctaaattcttaaggtttaatactttgataagagaatattccagtaatgcatattaatgtttgcgatggacttattgattttccaaaagaaaaaacaaaggaatcgtattctaaaccagctttgtttatagcttacttaacttattgtaaatgattaaaaagaaaaatgtaaattggagagtgtaaaatgaatagtgtagaatgtccttattgtggagcttatatagattattctgaatttaattacttggaaatggaagatgatgattccaaagattatgaatgtggtaattgcaacaaagagtttgagctatattcttacataagtccaaacctccaaaagaggttcggttacaaccatataggtgtaagttgtagattggattatacataatttttcctaaatttaaaattatattaacaaattttataagaataccacttattttttcaagcaccaaagtttttgaaagaattttgaggtgtatctcggatatttgcgatattcttattttttgctattggatattttggctatacttttacaatgtttgcttgggaaaaaattgtaaaaataaaaagaaaggaaaaaaaatgaattttaatttaatttttgcagatcaaacattgtttgatattgaaaaagaaagcattccagaagttttagaatggaaaaatattgcaatggatacaaaggatagaaaagagcttttagaactagataatgttgataaaattatttcattggtaaaaaaatactgcgatattgaattaaatagttatattcaagaacaagaataaaaacgaataatttattcttttttaccataaaaacgaataaaaacataaaaaagaaaaataatgcaaaaaatactacaagacattgatagactacaaaagtttgtaacagaaaataccctgtcaaaatccatcgaagccaagatgaatgaggattttaaactaaattatacttatgattctaatgcaattgagggaaatacacttacattgcttgaaacaaagatagtgttagagggaattacaattggtggaaaaagcttaagagagcattttgaagtgattaatcatcataatgcaatagattatatttataatcttgtaatagataaaacattgttaagcgagtatgatataaaatctatacattctttgattttaaagaatattgatgatgaaaatgcaggtaaatatcgagaatgtaatgtaaaaattagcggagcaatgcatattccaccagagcattacgaagttccaatgcaaatgcaagattttatacaatggtatcatcagcaagctttttctatgcacccagttattagagtttcaagaatgcatagtctttttgtgggtatccacccttttattgatggaaatggaagaacaggcagattgttaatgaatcttgaattattaaaatcaaatcttccggcaatcagcataaagagcaataagagacttgaatattttaaagcattagataaagctcaaacagataaagactatcaagatattgataggataatagcagattgtgtatatcaatctttattgcaaaaagaagaattgattttgcaatttttacaaaataaaaacaataatcttcataaaacaaatacaataaaacgaagtagataatccctccctattctcatttttaatccttctaagtttttagctcccttatttattacaatcataaaatttaaaaatttgcatcttgctcccgcaagatgccataagggaaataaagtcttacaaatgccttatattggtccttttagcctttttattagttgtaaaattcctatgtaataaaaaagaataaattattcttttttattctaaaaaggaataaaaacgaatagaaaggaaatagcaaaatatggaaaaacatagctatgcagcaatgattatttttaaagaacatttgaaagtttctcatatggataaaaaggaattaaaagaatatgctgagagtaggggagtggaagcaaaaggagttagaatgagagaattgcttggaactttagcacttgctgaagcgtatgataaactctatgaagagtatcagattttaaaagaaaaggcaaaaaaatgaatttaaaagattgtttaaaagaaacagtaaattatttaaaagatgatagcaggcaagaggattttttcataaatggtgaagtagtaaggaaagatttttctggagatattaaaaaagtttatataagagatgaaattttagaatatccaaagaacaataatcttgaaataatggcaataacactactttttttaactgtttgcgatgcacaggagctgaaataagatatggatttagacaatattttaaaggaaattgatagaaaatcaacaagcaacctaaatagggtaggtaataaaataaattttaaagtggatttttctattgaagaagttaaaagaattgatgagtttgcaaaaaagaattatatcaagagaggcacagcagtcagaatgatttttagtttttttgttaattctcaaaaaaaggattaagtgatgaaaaccgcaagagaaagattaaaagaaaaaggttcgcaaaaaaaagaaagaattgctatttcaatcataatcacgccagaagaattagagattttaaagcaacatgcactcaaagaaggtagaaacaaaagcaatgcttttaaaaatattataagagattttttagataaacaacaggaggaattaagatgattattagtgtttggaatatgaaaggtggagtagggaagacacatctatccttagctttggctaaagacttaaatttgaaatattatacaaatgaaaacaattttttggaagacaccattttgctaaaagatgatacaaaaattgctgatgcagccatttttgattttggtggctttgttgataaaattgctaattatctaaaaatcagtgatctaatcatagttcctaccactagagataaactagcattattaaaaacctatgaaacattaaaaattattgaaagtatcaataaaaatattattattgttgtaacaaaaaacaaaaatcatttccaagatgaaacctttaaaatgctagaaaaaatcaataaaaaccaatataagacttttttattgaatgaaagtaatatttttcaaaaatctttggaagaaaatgttagtgtgtggcaattgtcttgcaattttgcctataaaaataagacaattactgtgcaatataaagaattacttgatttttttaattgagtaattattgcttctgttaatttgctg

SEQ ID NO: 1007 - DNA, 15899 bp, synthetic construct
  source 1..15899: mol_type = other DNA
  misc_feature 1..15899: note = Synthetic
gtcaatatcttctaaatatatttcagatcttgttcgctgctatgggggattttagcaccacacaggggcgtatgccatgtttcctgatactctcaatcacgcggtgcagatgcttgacctcctcgatatgcacactcataaattctggcttcaagggcgcaaataactccacaaaaaaactaaacattctccaccatcagatgcacatctaggggtttagaggcatattttgtaatctgctccaacacaaccggaccaaaaggtgagatttggcacaaaatgcccatccatcacatcaatgtgcaaaaaaatccgcccccgcatcacaaagggcccggatctcctctcccagcctcataaaattggcagacaaaagacttggtgcaaccagcattgctcctccaaaaaatccaaaatcactcagggcgtataatacaataagattaataaaatccaaaaaaaaatggaggtagaaaatgcagcaaatctttgatactctcaagcacatcgctttagaaattcatgcccttttacaagattctaacaccacttatttggagagcacaaattccacaggagacgtgcaactccaagttgatatcatagccgataaactcattgaagagagactgctcgcactgcctagcgtgcgcggagtggcaagcgaagaaaaaccaaatgccatagaaaaagcagaaggagagtttttgattgcctatgatcccctagatggctcttcgcttgtagatagcaatcttagcattggttcaatttttggaatctatgcacaggatttccaaggcaaaaatctcattgctagcgcctacatcatctatgggccgcgcacagagatcgtgttcgcacacaaaaacatctcctatcaaagctacaatggcaagcaatggatccaaaaacccactcccaaactccaaacaaaaggcaagattagcgcaactggtggcacgcagaaacattggagcaaggagcataaggccttgatagaatctttttttgctgcggggtatcgcttgcgatattctggtgggatggtgccagatttgcatcagatcctcatcaaaggtggggggatctttagctatcctgctacaagtgatgcgcccaagggaaaattgcgcaagctttttgaagtttttccttttgcatatatttatgagctttgcgggggagaggccataggagaaaatggagtgcgtttgttggatctgccctgtgcgcatttgcacgataccacaccttgctattttggcagtcttgaagaaattgcattatttaaggagaaaaaatgagtgaaaatcctgcaaaagatacctttgcattgcagctagatcaagcattgcaggacttgcaaaaatgccaaaaagagaggaactacgactcctgtctgaagtgtgaaaaattttttgaatgccctgtgcgcaaaagctatgtcagcgcagtgtataaaagcatgaacaaaggagagcaaggggggtttgaattttgatatggatcgacatcacagatcccaaatatgtattattttttcgctccctcattcccctgcttaagagcctagattctgtagttgttaccactagaaaaagcaaagattatgaggagtgctatgctttgctagagctgtttcagattccatccatttgcattggcagttacgggggcaatgagatttttgacaaactagaagcaaggctaaaacgtcaagagggatttttggagcttttcaaacgcataggcaagcccaatctttttatcactggagtgagcgtggaggggacacaaactgcatttggcctaggcatccctatcattcaattttctgatactccactagcaagtcatcgttttgaactctcaaaaatcacggttgtagccaagcttaccctgcctctaagcagtctcatcttccgcccctttgtcgtccctgagatttgctatagtgcgctaggagtggagccaaaaaacatcattgcctatccttttattgatgtggcactctggctcaaagacctgcctcaaggagaagattttcgcaagcgctatcacctccccaccacgcgccctacaatcttgctgagagaggaagaatacaaagcccattatgtcagaacaaaacttcccataatctatgaaagcattcctcttttaaatgaacttgatgcaaatttggtgatcatgccccgctatggaagcgcggaacttcatagacagttttcttctctcaaaaatctcacaatcttagaagaaaaactcccaccccaagacttttatccctttatcgacatcctcataggaggtggaggaacgatgaatctagaatcctgctatcttggtatccccacgatctctactcgatctctttttttgtttcatgataaatatcttttggaccatcatctcatgcaacatcacacagattcccaagcgctctatcatcaagtaaaagcctggattgcacaagagacaaagcgcaagaatcagagggaattttttgaatcttctcctgcaaactttcaagaaatctttgcaattatccaggagagatattacaaacatcaaaaatagttaaggactggcgaacaatttttttgactagattttttgggttttggtaatgatttaggagtaaattggtaacaactcaataccaaaaaagcatgcaatgaagccatgtagccccattctcatgggcttttctttaagaaaaaacgataaaatccagcaataatcgagtcaaaaaagaggagcgcaaatgaaaaaaattctattgagtctgttgctgtttcttgggatgatgcatttggctcatgctagattttttatcggcagcaatggaggatttgggtttggatttggaacaaaatcgatccaaaacttggtctatagttctgagttgggatatcaatttttttttgaacccaaagagcgtgtaggaatgcgtgtatttgggcaattggggtataacaatctgctcacctcagattctgtcatcgccacgacgcagcctgcattgggattagacatgctttttgagggcaccaaggaagatcatttttttgcctttggggtatttggcgggatacaagctggaatcaactccgccctccccatgagtcgcaaggccctggcacggctagcaggccttagtcctagcgatcccgtgccactgtatcgactcaactttttgataaagggaaggattggcatgagctttatttttgtggagcatcacagggtggaattctttgcgctcattcccattgcaccacgatccatcaacgccaaaagagactacatcccccaaacctataatttcatgatgggttataaatttgtcttttgaaaacacttgcacaaaaacccaaaaagcaattcaagccctccatttgaaaagccaaaaaagccgcttcaagaacccaaacaaatagccaatctttggccaggagccttgagggaaaaattagtttttttcctctcgcaaaaacccttcttccaaagtaacaaaggcaattttggatgatgacaaaaccacactcctgcaattcaagaagactccccctcttttttctctccaagataacgagggaagggagcaaacatctcttttgcaagaccacttggagtaaattcttaaaaatccctaattaaaacgaaagtgctaagatttttccaaacaaagtaggagcaaacagtgataagaactttgggaatcgacattgggattgcaagtattggttgggctgtgattgaaggagaatatacagacaaggggctggaaaacaaagagattgtggctagtggagtgagggtttttacaaaagcagaaaatccaaaaaataaagaatctctagccctccccagggcactggcaagaagtgccaggcgcagaaatgcgcgcaagaaaggaagaatacagcaagtaaaacactatctctccaaggctttgggcttggatttggaatgctttgtgcaaggagagaaactcgcgacactcttccaaacctcaaaagactttctctctccctgggagctcagagagagggcattatacagagtgctagacaaagaagaattggcaagagtgattttgcacattgccaaacgcaggggatatgatgatattacttatggagttgaagacaacgatagtggcaaaataaaaaaagcaatcgcagaaaattccaagcgcatcaaagaagagcagtgcaaaacaatcggcgagatgatgtacaaactctactttcaaaaatccctcaatgttcgcaacaaaaaagaaagttacaatcgatgtgtgggcagaagcgagctaagagatgagctaaaaacaatttttcaaatccaacaggagctaaaaaatccttttatcaatgaagaactcatctacaagctcttgggaaatcctgctgcacaaagcaagcaagaaagagaggggctcgtcttctatcagcgtccgctcaagggatttggcgaaaaaatcggaaaatgtagccacatcaaaaaaggagagaatagcccctatcgtgcgtgcaaacatgccccaagtgcagaagagtttgtcgctctaacaaagagcattaattttttgaaaaatcttacaaatcgccatggattgtgtttctcacaagaagatatgtgcgtttatttaggaaaaatcctacaagaagcccaaaagaatgaaaaagggctcacctactccaaactaaaacttctgctagatttgccaagtgattttgaatttttaggactggattatagcgggaaaaaccctgagaaagcggtgtttctttctttgcctagcacctttaaactcaataagatcacacaagataggaagacccaagacaaaatcgccaatattttgggagcaaataaagattgggaggcgatcctaaaggagttagagtctttgcagcttagcaaagagcaaatccaaacaatcaaggatgcaaagcttaatttctcaaaacacatcaatcttagccttgaagcgctctatcatctcttgcctttgatgcgagaggggaagagatatgatgaaggggtggagattttgcaagaaagaggaatctttagcaaaccccagcccaaaaacagacaactcctccctccactaagtgagcttgcaaaagaagagagctattttgatattccaaatcctgtgttaaggcgggcattgagtgagtttcggaaggtcgtcaatgcgcttttagaaaaatatggaggctttcattattttcacatcgaactaactagagatgtctgcaaggcaaaaagcgcaagaatgcagcttgagaaaatcaacaaaaaaaacaaaagcgaaaatgacgctgcatcccaattgctagaagttctagggcttcccaatacctataacaatcgcttgaaatgcaagctttggaagcagcaagaagaatactgcctctacagtggagagaaaatcaccatagatcatctcaaagaccaaagggccctgcagatcgatcacgcattccccttgagcagaagcctagatgattcccagagcaataaagtcctctgcctaacttccagcaatcaagaaaaaagcaacaaaaccccttatgagtggcttggcagtgatgagaaaaaatgggatatgtatgtgggtagagtatatagcagcaatttttctcccagcaaaaagcgcaaactcacacaaaagaatttcaaagagagaaatgaggaggatttcctagcaagaaatcttgtagacactggctatatcggaagagtgacaaaagaatatatcaagcattctctatccttcctccctctccctgatggcaaaaaggagcatatccgcattatttcaggctctagtcaggatttgcaaaggagtcaaaagcgcaaatacctatcttgaacgacttcatctctatttgcccaaaaaaggacatatcagagccttgattttgacagaaaaacaattcgatcacatgaaaatcttgataggagaaatttcgcaagcgcaaaaggtccaaaaacctactccgctcactctgttttaggctcggtttgaggggatgctaggcagttaccccacagaggaccgaaaactctttattttagccacatcccacctcctgaaactcccttctttaggggatcctcaagaggtgtattttagcataaacatatttatgaagtggctaaaactgttaaagaagcgagcgattttatctctttattttagcataaacatatttatgaagtggctaaaacaagttttccctgcaaagtagaggaagtcgtattttagcataaacatatttatgaagtggctaaaacgcaattaacaccgatgatattatccaccaaattttagcataaacatatttatgaagtggctaaaaccataattattgataagagggaatagctggcattttagcataaacatatttatgaagtggctaaaacttgatatactcctaaaagctagcctagctagattttagcataaacatatttatgaagtggctaaaactactccaaatatgggaacaaaaaaaccataattttagcataaacatatttatgaagtggctaaaactactccaaatatgggaacaaaaaaaccataattttagcataaacatatttatgaagtggctaaaacttctttaaatattttccagagagcgataggattttagcataaacatatttatgaagtggctaaaacaaaagtgttgatttctttcaactctgaaaaattttagcataaacatatttatgaagtggctaaaacgcttggcatgaaatacaaatcctagatcaagccaaaaaccaattccaaatgctccccagtcatttctgcgagaaaaacaatcaaaactccaaaaacctccctcagcttttccattccacaaaattaacatacacaagactggccatcaaagactggccatcaatgaaaaagtaaaaacaagcaagaagcatctattttctttctaaagagtttagactcactaatcagcagtttttatttttgattaaaagaaaattttatcatttaaattaagtgggagacagtaaaaagcaacacatatatccacattttattggcttaagagagtatttgtcaataaatatactttataatggcaagatttattttcttagaaagagagtatttaaaatgtttcaaaaatttcttatcaagcaagttcttaaaaagtggaattttgggcgttatgtgatcgagttttgggatggagaacaagtcaaaataggcgagggggagcctgatttcaaaatcactttaaaaaagccttttgggctaaatgccttctcccaagatcttagcttattttttggagaggcctatatggatgggaatatcgagatcgagggggattttgatgcgatttcctatgtgatgtatcagttcaacaaccaccatcatctcaacaaacacaaacacattacaagcaaaatccacacaaaacaagaaagcaaaaatatcaaaagccactacgatctaggcaatgacttctacaagctttggctagatcccacaaaaagctattcttgtgcatatttcaaaaatcctacggatgatttgcaccaagcacaaatcaacaaaatcgagcacactctcaaaaaactcgatctaaaaaaaggcgaaaaactccttgaaattggttgtggctggggttggctctccatcatggcagcccaaaaatatggtgtcgaagtcgtaggcatcaccctctcagaagaacaacacaaagaagccacacaaagggtaaaagactgtggtcttgaggataaggtcaccatcatgctcaaaaactaccaagacttggagatggagaattattttgacaaggcagtttccattggaatgtttgagcatgtagggcgggccaacttccctctatactttagtaaagtcaagcagtgtctaaagcctagcggaagctttttgctccataccatattggcttcctttgagggagagaccaatgcctggatcgacaaatacatcttccctgggggatatctaccctccctaagagagcttattagcattgcgagtgaatttgattttcacttgcttttggcagaaagtctaagattgcactatgcaaaaaccctagatatctggagagaaaacttcgaaaaggagattgaagaggtcaggaaaatgtatgatgaaagatttatcagaatgtggcgcttgtatctcaaaagctgtgcttccgcattccgagtaggaagtgctgatatttttcaatttttattgaccaaaggagtggacaacaacatcgccatgacacatgcaagaatctatcaagactaactccaccttcatagatattttggaaggattcccaaatctcaaaaatccaacacaaagaaagcaaattcacccccaaagagcttatgcctttgcgtttttgcaaaactggccttttccaaaatcatgggcctttgcaaaaagataaaacatggatttagaagtttgtagaaatcccctctgcaggaggaaatctcatacgcatgatagagtcatcacaaacaagcgccaaatgattcagggccaaaaaagaggggatatcaatcaaggaaatcctacaagatgcaatgcaggatgtttcctttcaagaaatgccagcaacaaacccaaaaccctcaaaattcactatcgctttgacaaagcagggaatctacttgtagagactccaaagacccttgggagggttggggtagaattccaaagccattctcttgcttggcttggatgcaaatgcaagcttcctagaacttgcctaaaacccccgaaggctttgctccacccatccaggctatgcttttttgccatattttatagcaatgcctgcaaatgaaatcaaagtcaaagaattatctcactttggcttcaaacataaatacgcgcaagctccctattttctcattatcaaaaagaaaagctacaaattttagttcaacagctttctttaaggaaaatttgataagattgtaggactattcatacaaaataagattttgtattctactaaattaaggagtcaagatgaaaaaaatacttttaagcggattgctcttagggggggggcagtaaacttcgcgcaagcgagattctttgtcggtgttgaaggagggttgacacagggcatgattcaatctagtggtagtatgagttataagggcacctttcaaggggtgacgcaagagctccatgggtctgcattctacaaaatggatagctccaaaaatttcggtcccctggtctctgtcaatctcgggacagagcatctcttctttcaggatatttttggctttcggtggtctattggggtaggctatcagtctcttgcaataaaagacagaattctgcccacatttcctgatcctcaacttaacgcttacaatactgcgatcaaaacgcttgaagggccgcgttttgatgcttcttttgatttgatgctgaatttttttcgcaatgagaaattttcctttggaatgtttggaggaatccaatacaacctctatctagcaaaatttgcaaccaaagattctgatttttccaaagcttctatcaagattaccaatgatgctttttcccttgatctaaaaacacaaggcttcaatgggcaaaatacttttggcaatgctgcttatcgggtcggattgagcatgatgtttgccaagcatcatcgggtagagttttatataagcagaaacattgctagcaattcttacaaaagaaataacgagcggaaaaatatttataggcagggaaatttagaagaaaaacaagtatttaaaatatcagaaatgctgaagcttggcacaaatacctatatgctaagttacaaatatgttttttgaagaatccatgataaaaaataggaatgataaggaattattatgagaaagataaaacaatctttagccctcttaaatgccctctgtcttttaggtagttctgctaccgcaaatcccatcacgattgatgccgaccatacaggcccatctcccactttggggaaaacagacaatggagtcgatctcatcaatatcgcaaagcccaatcaagcaggcatatctagcaatttttataaagatttcaatgtagaaaaagagggtcttatcctcaataacatctcacaaaaagaagatcttgcaaaaactgttttggcaggatatattgctgccaatcccaacctagagacagcagccaaactcattttgaatcaagtgagtggcaataaactctcaaatcttttgggatttttggaagtagctggcaagcaagcagatgtcatcctagccaatcccaacggcattacctgccatggctgtggtttcatcaatatcgaaaacctcacgctagctacaggaaaattttcacaagatgagttccatcgactcaaccaactcaaagcttatgaagaactaaaaacactttctttggatattacgcaaggcaaaatcatcacttctgccctcaatgccagcaataccaagactcttactttcctagccaaaaacatggaagtaaatggcatcgttgaagggggagataagatccgagctcttttgggaagcaatcatgtgaatttctctcctagcgtgttgctttatgaacctatcaagcttgaaggagagcaacaagctctaggattggatgtcacttatctgggaggagtttttgccaaaagtatttatcttgtggccaccaatgagggcataggagtaaaaaattctgggattcttgcgagcacagcttcccaaaatagcggggatggtggatttgtcatcgatgcaaatggaacaatagagattacaaaacctcaaacagctctgataaaacaaatccaagctacaaaagatctccaaaatgagggagagaaggccccagcacctagtgctttgcctctcatcttctccaatcaaaatctaaatatctctgcaaaaaccctagtcaatcactccatcctctatgcaaaagacaatctcaacataaaggcagaaaacatcctcaatcaaggagcattagaatttatccaagatcctgctactagggagaaattttattctagagatcccaatatcaatggctattttggaggcagtaaaacctactatatgacctatgattatacgatcaaaaccatcaaagaaagcatccagaaagatacctattctcctgcaatgatgctggcaaataatattcatcttcaatcccagaccacgacaaatgataatgccttgatccaagcaaacaatgatttccaaaatgcaagcaaggagtttatcaacaaagccccacaagccaaatctaccacgagctatgaaggcacaaaaactctttataatcgatatggaaaatgttttgcaggggtaaaaataggtttcaactgcgcatctacgaggacaacctctgcctttgttagagcagataaagtcgaatttaccgatgtggagctaccagaaatcaccttgcaagatacttctatccttttgcaagatactctgcaaaatacaaaaagtagcaccccgcttcctaccccctatgtccaaaacaaagatgtcctggatctccttgtagcaaggcgcatgcaagatactccctctacaagaagagatattatggatttctcaatattccaaggatcttatcaaaaaaaccttttgctaggacttcaagcacattccattgtcatctcaagccaaaatacctataactctagtgctatcacaggcaatgatatcaccatcacttctcaagcattgctcaatgaaaatggcaccctcctcgccagagacagtctcaaactaaaaggagaagcaatcaccaatcaaggagggaaaatcctcgcgcaaaatatcagcattgatgcagatggcttcacacatacctccagcataacaagtcacaaaaaagataatgttctttataaatctgccatgatacctataaagaacacttcccttaaagtctctataattaaaaaacaagctaatagcgtccgcagcacttctgaaaacacaaaacttgtttctttaggaatcttggaaggcaatcatatcatcatcaagagcaaagagacccatctcatcggtgctaatgtagatgcaaaaggagatcttctcatccaatctgatgccctaagcgtcaaaactttggcattgaaggatgattatgcagatgcggtaaatacaagaaatcatacaaatcagcaagtttctagtatccaaagtggtagcgatattgtaatcaatagcaaacaaactaatctcataagcgccaatattgatgcaaaaggagatcttctcatccagtctgatgccctaaatgtcaaaaccttagcattgaaggataattatgcagatgcggtaaatacaagaaatcatacaaatcagcaagttactagcatccaaagtggtaatcacctccttattgatgctaaaaaacaagaatatgcctcagtgaaaatgaagggtgataccatagcacttacgggggaaaatattctctttgatacgagtgtaaataagtctgaaaacaaaaaattgactaggggaatactttctccaaaattatcaacagcccccactactcaacatatcgcaaatgaaatccaaggcataaacctagcgattcatagcaaaagtgattttactgcctataattttgatgccgatatcacagattctttatctctaaaatctgatgcaaatcttctgataagcaatcatgcagatagcatacaatctcctcgcaacaacacaaacaagtattctacacagatagataaatctatagctcaaactgccaaaagtattaagttagaatcaaaaaatattgctctcatcggtgctaatgtagatgcaaaaggagatcttctcatccagtctgatactctaaatgtcaaaaccttagcattgaaggatgattatagtgatggaacaaatataagaaatcatacaaatcagcaagttactagtatccaaagtggtaatcacctcctcattgatgctaataagcaagaatatgcctcagtgaaaatgaaaggagagaatatcgcactacaaggagaaaatattcgctttgatacgagcacgctatttgatgcgagtacaaaggagagtttttctaaaggcaaaaaatttgatataaaatcattttttctaagaccacttgttcttgaaacaactactcaacatatcgcaaatgaaatccaaggcacaaatctagcgattcatagcaaaagtgattttactgcctataatctgcagacagattcccaaaatcttgccatccaatcagacaaaaatatccttattagcaatcatgcagatagcatacaatctactcaagataacataaacaagcactctacacagatagataaatctatagctcaaactgccaaaaatattaagttagaatcaaaaaatattgctctcatcggtgctaatgtagatgcaaaaggagatcttctcatccagtctgatactctaaatgtcaaaaccttagcattgaaggatgattatagtgatggaacaaatataagaaatcatacaaatcagcaagttactagtatccaaagtggtaatcacctcctcattgatgctaataagcaagaatatacttcagtaaaaatgaaaggagagaatatcgcgctacaaggagaaaacattctctttgatacgagcacaaaggagagcttttctaaaactagggagaaaaagactagcggctggttccttgatggtaaaactaccattactactaccacggcctccacttctcaacatatcgcaaatgaaatccaaggatcaaatctagcgattcatagcaaaaatgattttactgcttataatctgcagacagattctcaaaaccttgccatccaatcagacaaaaatatccttattagcaatcatgcagatacaaaaaatgtcgttgtagatacagagataaaaaaacgaagtctctatggctctatcagtaaagataaaatttctgcagggcttcgcacatccaacacaaagatccatcaagataccaatgacaaaaatcatcacaataccacactaaaggctaatcacgcttcctttgtcgctcaaggcaatacagcaatacaatccaccaatattcaaagtgatgatctagccctccaaggtgaaagtattgcattaaaggctttgcaagatgagcatacaagtctagaaaccaaacatgtcacttctcacacctttggagtgactatcaatagacggcctcttgagaggctcgtcataaaatatgcgaattctctaggtagcaaactaggcatcaaagaaagcatcaaagtacctgaaaaagaagatataaaagcaggtttttcgtatcaatattctgatgacttcaccaaaacacaaagctatgcaactagcacaagcaatcttgcaatacaatccaaaaatctgcaaatggattccaaaaatgatacggtgatcacaaacgcagatatcaccacggatgtttttgctgccaaaaacaaaaatctcgcgataaacaccttggaaaatgtcaaaacaaccaccacgacaaaatataatgacaccatcaatgcttctttgaagctttctctaggcaaacaaactggcatcaaagcacatgcagattacgcacacgatggcagcaaagaaaaaaatagagaaacttcccatgttgcaaatcacttcaagataggcacgctcaacttggatacaaaaaatgatgtaaagatccaaggatcccacctcgatataaaagaagatgctaatatcactgccaaaaactttgccatcacttctgtaagcaatacagaaaccaatgagaaaacagacaaaaagcacaatgctgcgctagattttacctataatggaggctttaatgtcgctctttctggaggctatggagattcttctagcaaagagaacaaagtcacgcaagtagcaagcagcctttcagcaaaaaatctcaatctcaaaactagtgagaaaacacagatcctaggctcacgtttgaatatagaagaagatgccaatatcactgccaaaagctttatcatcacttctacagaaaactcctttgcaaaaacaacgcattccaaagatgcaaatgcttctctttctgcaggatttgatggtagccttgatctaggagctaatggtggctatacacaaaaagtcaccactcaatctaataattctgcattgagctctgatgtctctatcaaaaatctcaatctccaatctgaagatacaaagatcataggatccaatctcgctaccaaaaaagcacagattacttcaaaaaatctatggattggctccatacaaacctattccaaagatacagaatcctcgcttggcgctcaagcagggcttggtaacaaatccggggtgaagactgcatgggattataacaataaagcacaaaatagcacaggacaaactgcctctcatgtctctttaggggattttcagatcgaagtgaggggagatacacagatcaaaggctcccatctctctggagacaatggtagcatccagacccaaaatctcaatgtcctctcttctgaagaaacacaaaagagtcataacataggcctaggagcaggaaataccaacctaaaatttagaggtaatgcaagcctagatctccacacacaaaccacacaaagtgcatctagcatagaagctcaaaatctcaaactcgctgtaaaaaatgacatgaatgtagaaagcagtcagataaaaagcgagaatctagatgcaaagattggcaaaaatctcaatatggtgagcaaaaaagatacagaagcaagctttggggtaagtggatctttggatat

SEQ ID NO: 1008 - DNA, 23375 bp, synthetic construct
  misc_feature 1..23375: note = Synthetic
  source 1..23375: mol_type = other DNA
acataatcatcgccatcgcgttcagctttcagctgaagtgaggcaaggtcggaccctgaccctggctcggaatacccctgacaccaataatcctcgccattgagaagacgcggcagataatgggctttctgctccggcgtaccgtatcctatgatacatggcccgaccatggacagccccattggagagagcgatggcgcaccagccgcagcaaactctgccgcaaaaatcgccttttgcgtctcggtgaaaccgggtccgccatattcttttggccagtgcggcgcgacccagccgcgctcattcagcttcgcctgccatgccagcgtgtattcaggctcgataaagacgctcgtcgccttgcgtcctgccgctgcaagttccggcgtcagattgtcatgaagaaaggcgcggacttcgtctctgaacgcctgatcggcagccgtgaattcgaggttcatgttgttcccagttctattttatcgccagctaaaagcgtcacgtgctcacaatcaagaactaacgcagcgtcagttggcaggagaattttaaacagaacacaaaaatgacgggcccccttcagggcccgccacagatttctggatttgtcagaaccgatttagttcagagatttgctgattgagacgcggaagccgtgcgcatcgaagacatcagaacccacaccatcaagataggtgttgaaattcatctggatgccgttctctgcaagccagctaaagccgccttcgagacgcatgcggaagtcttcatcgaacacacccacaacctcgtcaccaaagttgtaaatgccttcagcctcgatgaaggccgaccatgtctcacccgtcacacgctgatgcgttgtgatgagttttggcgcaaagctcagctcgttgagattgaggtcgctttcagggatcaatacaccaaacgcatcgcggtaggcttcctgcgtttcgttgaaggtccggtattcgattgtcggacgcagcgtcaggtgagtgttgaacgcatagtcaccgctgaggctacctgcgaacaacatacgcgttgtgtcgaaatcatccgtatatgtgccaagcggcgtgacggagttatctgcctgtccccatgcgatgcgagcatcagcatagaggttattggcaagacgtgccgtcacatacggaccgaccatgaagccgttaccatccgcggcaacagaagtacggtcattctcgctctcgaagttgtcgaactgcgccagaacaccgaccagtacgcggtctgtgacgagatagtccgcaccgacatagaagagcgagaaatcgccttcagagccggaattgtcgaacctggcatagttgacctcagcccagacatcaaagctgcctgcgcccatattcgcatccgcgcccgcaatagcagacaggctgacatccatagagccgccagcatcattcagagacatgctgaccggtgcagtccggcctgaaacaaggttcagacctgctagctgcacaccctctgcctgaactgtacggccggcaacacggtccatacgtcggcccgcatccggaccattgctcagaagaagcgcgccgcgctgtgcctgcatttgctgaatagcatcctgcgccgcaccgcggctgttcacagacgcaaacgtacagataacatcctcgcccgcagcaagattgatggtcgcctgacgcgcaccgatattcgcagtggagtcgccatcatcacaagttagcgccgtgagcgcgaaacctgcatcacgtgggtctgccatcgtcacggtatactggcctgcaatcacacgatctgccgacaggctcgcctgacctgcagaggtcgtgaccgttgcattaaggcccggaagatcagacgtgaagctgaagcttgtatcaccgcctgtcgcctcactgataatggtgatggagccgaccgggcgcacatcaacagttaccagagacgcagggctgtcttctgtgccgtcattcacggtgaggcggaatgtcagcgtggactcagttgccacgaatggcgcggtgaagctcgggctgacggcattaacgtcagacagagtcacagccggaccggacacctgctgccaagtgtaagtcagcgcatcaccatcagggtctgacgaagcagaaccgttcagcgtgacgagttcaccggaattgatgccagtgatattcgcgccagcattcgctgtcggtgcacggttatcctggaaggtgatcaccttctcgtctgccgggctgtcaacagcgccgtcattcaccaccagagcgacagtaacctgctcatcgacattgtcagagtttgagcctgtataagtcagcgttggctgggcaagcgtcggatcattgatcgtcgcgctgccgctgacgacagaccaagcgtaagtcagcgtatcgccgtccgggtcagagcttgcgcttccatcaagcgttaccgtgtcgccattgtcatagccattcacagtcacgtccgcgcccgcatcagccgttggtgcgaggtttgtgttgatagtgacagacacctcgtcttcggcagaagagagattaccgtcagagacaaccagaccgaagaccagcgtatctgctggcgcaccttccggctgaccaaggccagacgcactctgcatacggttatctgatggcggatacacaaagctcggggttgcagaagacgcattctggagcgctacaacagggccggaaatctggcgccaagtgtaagtcagctgcgcagcttcagggtcagaagatgcggaaccatcaagcgtcacgaccgtacccggagctacatttgccagcgtctgatctgcacccgcatcagcggttggtgtctgatcaaccgtcagcgtaaccgtaacggtctgcgtgatggtgttcacgccatcagaaatggtcacggtaaaggtgaatgtaccgcccgttgtcggaaccgggaagcttgggtttgccgcattcggatcattcagactgacattcgggccgcccgtttgcgtccagatatagtcgaggtcctggccatcaacatctgtgaccgtgcccgcatccagcgtgtagttggagcccggaaggactggcgcagatggtgcaatcacgactgggcctgaaacgcttggcggcgtgttcactgtccagtcgacagcgacctgagacgtatctgtgccgccgcggccatcgctgacgctgagctcatacaccgcgcgaccagccgagttcggctgacggacaatctgctcgatactgcccgcaaatgttgcgcccgccaggaaggttgttacaggtccgctgatctgcgtaatcgaacttgtaagcgtatcgccgtcagagtcagagaacgttccggtcagatcgaccgttgcgctccgctgcgcaggatcgaaaaagacttcacttgcgcttgctgcaaagctgtcgaccgttggcgccgtgttcgtagcgttgatgactgtgtaagtttcgttcgcacccgtaggtgtcacatccacaatcgggttggacgcgaggtcagcaatattcgtgccctgattaagctccagtccaatgacagcattcgtaacattggtcaggtcaccgcccgatacactgacatagtattcattcggggaaacaaccgcgtaagaacgggtataagaagaaatgcccgtaatacggaagtccgaagcgtcgacattctggacatcctcatcaaaggttaccagccattccagctgatcagcatccgtcgtttcattcgtaggcctgtggcgttcaatactcgcaatacgcggcggcgttgtatcacctgctgccgcactccaggtgatctgcaccgtatcctgagcaacaccgccattctggtcgttgatcgtcagattccagacttgaacaccggcgaacgcaggcggggcgatttgccagacagggttacgagacccgctgacggtaatctgggaagacgggccggagacacgtcgccagtaataggtgaagttgtcgccatcagcgtcataggagccacgaccatccagctggccaaacgtgtctgtgcccagcgtataggtcacatcagcgccggcatcagccacaggcggcgtgtttggctgtccaccaatgttgatcattccgccaatggtggcacatgcgccgcccgtcgtgatcattgcagccgtgtcgagctcgaccgtcgcggccaaaccaccggcaaagtcgcccgggctagcagcgccaatgtcccgaaggccgaagtaaatcggctgatcgtaattatacgtcgttggcaggctgaccgtgacctgccccatggactgataattgcccacccgaacacggtaattgctgtccgcagcaaccggcgtcacatctgacaggtaaatgccgcgctcgatatggtcatcgccgcttacgtcgtcatactcgccgtagagcgcgtattcaccattgcgaagcgtcacatgacacgcaccggcattggtcgtgtagatcagagagccaggctgcggtgaacgggttacgtccatagctgccgcttcgcccgcgatcagaacggatgccgtcgtcagaagggccgtagcgagctttgccgacgcccccggcctcgcatttttagcctgagtttttctggttattttggatttcattttagtccccagtttgttgtctgcctgaactcaaaaggggagagcccggcagtgtgcggggtcctaaagcgttggtgatttgaggggcatcccgcaaatgtgggggtgtgcgatatcgtcgtaaggctctatacgaactgaaaattttccgggattcagaatgcgctcgacgggcacaattgcgttttcagtactgatactgctggtcggcggggcagcaggcttcggcgtatcacgccttgtgcctgacaccgcatctgacgctccgcaaactcccgctgtcagtcagacaagcgcaggcgatctgaacggcatgcgtatgctggaggaccttcaatgcgttcgcggagagtataagcggattgtggtgcgcggcgaagaagacggcttttcgtcatccggtgatgaagcgatcacccgtagcccattgcacgactttatggaaaaccgtttcgggcgtcggggcgccgttggcattgaccggagttatgatgacggccggctggatcaggttctgctggattcgctcgtcctgccatcaaacgtggccaatggcgtgattgcacttggcatccgcgaacgatcccttccgcgcaatgacacgatcacaattggtgaccttttcaccaagacccagctgggccatgcacatgtggaaaccttctcgcgcatcggcgttgaagacacatccccatggcagcaggacggcaatctcatctttgcccgcctgcgtgacctgacctttgcagagggcgtcaatcaggaaggtcaagctgttccggcagactactccaacctgctcgactggatacgcggcgcacagaactggcgctctattgagtatgccatcagcgaagacacgatggtcgattttgtcggcgttgccgtctgtctggagccagatacatcttcaggcacaaccttccttgcaacgcctattccgaacacggacgaaatcgttcgcctcggctgcagcgacccgcaaggcaatagcctctgcaacccttatgtcggcgatacccaatgttcaaccgagctcccgctcgcctgcctgcatgaggaattccggtctgcaccggaggggctggtcgcagaaaacctgcagggcgcatggacaggcgcatccatcagcttcaccgagcctgttgccggtgacctcattgatacccagtcggacgggcacgcgctttgtcaggcaagcttcggcgcagactggcgcatggtgaacattcatgatgggctgatgattgatgaaatcctcggcatgggctcgttagccgcgcctacgtccgtctgggtcgactcacaaaaccagcgctatggcaattgctggaagctcgatgacgccggaggcgcacgatagccatgacagcatctgtgatctctgtcggcattctggaagacgatgacattctgcgtgattacatcgtgtcgatcatcgaagccgaaaccgcgttgcagctccggttcgccgcgacgacagtcgccgaagcgatgcaggcgcttgatgagggccttgtgcccgatgtctgccttgtcgatctgcaactgcctgacgggtccggcactgaactggttgaacgcctcacaaaagaaggccgcagcaaggcacttatcctgaccattctgggggaccgccatagcgttcaggccgcgcttgaatccggcgctaacggttatctcttgaaggactcagagccggaaatgatcatccgccacatccgggaaacggcctgtggcgcagcgccgatgagcgcgcaggttacgccgcatttattgtccatgatccgcaataaagacgtcaaaccaccggcgccggcggacacgaaagccggcgaaccggggcaggatacgccgcttactcaaagagagaccgagttactcacactctttgccaagggtctgtcgcagatcgaagcagcggagctgatggatatttccccgaacactgtgcgccattattcgaaagccattcaccgcaagctgaatgtgaaatccaaatcggaagccgttttcgaggccattcagatgggctggatcattatctgatcatcggcctgttccaatggcacccggataatcacgcgcgtgccgtctccacaaccactcggttcaaagctgacagacccattgagcatctctgcacggcggcgaagattgcgaatgcctttgcccggcgtgtccagacgctctgctggaatacctaccccgtcatcttcgatatggatcacaagctcgccttgtgcctgtcgttcttcaatccgtacagagacatattgcgccttggcgtgtcggatcgcgttcgtcagcgactcctgaatcatgcgatagagattgagcgtagaacctgagccgcgaatatcgccattgataacttccggctgtctccagtcgaaagtcagccccgccgaaaccagctgcgcctctgcccgcacatgaaaggcgctgagcacggcaaccagatcatcacccatatggtcaatagaatcgacgatcagccgcaaatcgttcagcgacgactgtatctcttccagcatgcggcttttgttcaaccgtccgctgcgcacctgcaccagaagcgataatagctgcccgccaagcccatcatgaatgtcacgggtaaagcgctggcgttcctccatgatcgcccgattacgcatttcaaaggcgataagccggctcttttcatcgagctcgagcgcctgctcctgtactttacgcgtcagcgcatccacttcggatcggtgggcccaccattgaagcaagacatttccgccgctctcgatcagaatgaacaggctgaggccgagccagaacaatgccttcaccgtcatcacaggcagaaaagacagcggcaggacggcattgataaccagaactccgccggcacaaacggtcagaatgagcaggccaagtccggccagcctgccgcagtaaaatctcggcccgacgcgacaacgataggcgtaaatgcccgtcagcaacgcgatgacaaaaactaatcccagtgctgcaagaccggcccatgatggcccaatgagagtggcgccccagccggcaagataaacctcggcaaacaaaagcgcgcccatgagcgcaaaacctccattggccttcattcgctttggcactgtgacggcggccagcagcgccacagaaagtacgataccggccatcagaataccgacccgcatgagcgcgttcagccagccattatagcgctcgacgctgcccgcgagtgtctcaaaatcgcccgtgtaaatctgccggatgtcactgcgaaacgggtccagatcagacacgatctcgatccggtttgtgcccggcaccaacaggttctgcggcacaggcgcaacgcgccaatacccgccaagcccgggaaacggcgtggaaatggcaaacgcaccccagacctctacaccattgaccagcagataggtcggcccacccgcgccaagataggcaattccgagattttcgtgttccagcagctccgcctgtcgggcccgccagatatagcgataccgcccctcagactgcagaccagcgcggctagtcaggctgtgggcctcggaaaagtctgacacgcgtcggttcatataagcggaggtgtcagcgataaccgaaacgtctgaacgcgggacgcggtcccctctgggtgagagcacggcagtccagagcgcgacgcctaaaatgcccagcaaaatcaatacaccggacagaccttcccatgaacgaagtgatcgcagattgaacgccatatcttcacaccggaaacgctaaacaacaaagagcgttgatgcccgtgcgaacgccagcaagtcaattcccgcaaatagggggctgtcaggaaatattccgcatttttagagaaaaggcgttaagaggacccgagtcctgaaactgatttcaataaaataacaataaatcagttacttacaagccccgaatccgtccggtacaaatgcaattggtacaacttttgtacctgagcttgttcgtatctcagttatcctccaagcgacggagatagccagcacgcacatcgatcaactccggtagtggcgtaggatcaatcttggctccatgaaagttccggtatgttgtatctttcacattcttcgagacgaccaccgaggcatcctcgaaccacagcaagcctgcatcgaacaatttatgaagatcagcgcgaagacagattccattctctggatcgtcgcggtgtaaggtgctttcgttatacgggataatgtgcgcggcctctaaggtctggacgacactcgccccactgattgcgcactggtggttatagcgtgccaacacaccgtccctaaacttcttctgtccaaccctcgcgacgacggtgttgagccgctcctcgatggccctctccgcctctactctattcagtagatgacggacgttagctcgcttcatatttgtctgttgaatgcccatcgcgtcgaaccactcagcgcgtgcctccggatcaagatagagcgttcgacggcgtgaatcactatggatcctttgggcaacccgtgtttcgtcaaagggtggcgactgaagctgtttgaagtggaccttcggtttacacaaggccacgtcccttaactgcaacagcatgtctttggcttcctgtgcagagctcacctgagcgagggtgccggtggccgtcagcccttctcccgaaggggcctcctcttcgtggacccacaccagaacttcgtcaccctcacgcgggatcactgagctctttgtgctaccttctggcaaagtgacgtctgcgggcacgtcgaaccatccgtgctcccattgctcggctttggtcggacgccccatcccatcagggcacttcaaggagtttatcttaaccaaaaatgtttctggcacagcaccctcgaattccaacgttcgccagcccgctttgactaatcgggtttctcatacatcgcccgaatgtcttcagcacgccagaccgtcacgccatagccaagcttgattgacttcggaaaacgtccatccttcacaccctgccaccacgtcgactttgagaccggtataggcccctcgggggctaggatctgtttgatgcggacgaagccggtctttggaaattcactcatgacgaacgaccatgtttgatccagtgccactggggccacactaatgaattcaagcccacggtcaaaagtaaaaagggccacccgtaggtgacccttacatttcgtggaccttcacaaggaagtccttgttaccggaaggcctgacttttccagagtgctagaaatgttcttaaaagatacatacgggagcgctcaagtaaaccggaaatagtgtactggttaaaaaaaaacaccatgaacgccctagcgccgcatctccacctcataccaaaccaaaagtgacgctccacctgtttcttatagctttcttattgtgcatctagcttctcacagcttgacgaaccgccataaatcgtcaccctttttcagtggcacacaacaacgacaaaacaaaattcttcggggacaacccaaaaattctatcagtagtatattattttacgtacggcttggggagctaacattgcaacacgcttatcgcctagggatcgacttaggaacaaactcaatcggctgggcggcggttaaattgaatgacaggcttgaaccaggcccaatgctcgacatgggcgttcgcattttttcagatgctcgcaacccgaaagacaagtcttcgaatgctgctcagagaagagagccacgtagtctgcggcgcaatcgcgacagacgcctccaacgcaagcagcgctttatgaatgcacttgtcgctcaaggactaatgccagtcgagcgggaaggccgcaaacgcttggaagcggtagacccatggattctccgcgcaaaagctctgcaccaacaacttacgccattcgaaattggaagagcgctgttccacctccaacaacgcagaggtttcaaatcgaatcgcaaaactgacgcaggcgattctgaggcgggaaaggtctattctggaatagcagccagcaaagagagacttcgcgcatcgggtaaggacagcctcggcgactacttcggctcactcagattggcccaagaagaagctaactcaaagttggatcaagggcagcgcctacccatgccgcagtcacgtgtcagaacgacagggcaaggcagcaacgcagcgtacgattattatccacagcgcgaaatgatcttggatgaatttgatctcatttgggagagccaaaagcactaccatccggatttgttatcgccgtccgcccatgaaaagctgagaggaattcttgcttggcagagaccactgaaagcgcagcccaagggaaaatgtacgttattaccggggtgcccaagggcggcgaaagcgatggcctccagccaattcgttcggattgcacaagaggtgaacaatctcacggtaggagtagtgggcgagagcaagcgcccgctatctccagaggaacgctccatcgtcgcagaggcactcttgaagcctactgcgaaatcagctcgcaagtcattcgaccagatccgaaagctgctcaaacttccggcttctgtaaagttcaacctcgaaagcgagaaacgcacattcctcgaaggcgatgtcaccgctgcccggatgatgcaaacaactgcatgggggcaagactggttcgagctatccatcgagaagcaggacttaatcgtcgaaaacctgcttgagacagaagacgaaacgcagcttgtggggtggctggaaagtgagtttaacctatccggtgaaacggcattaaacgtcagccgcgttcggttacctgacggatacggcaaactctcaaccaaagccaatacgcgcctcgcaccggaattgagcaagggcttattgtacgatcaggcagtcaacgcagccggtatgggagaccactctcagcgcggcgacggcgtggttcacgaagatcacctgccctattatggcgaggtgttgaaccgacatacagcgctggagaaagcaaatccaaagaacgacgaagagcgtttcggacgggtcgccaatccaacagtgcacgtggcgctcaacgagcttcgcaaagtggtgaacgatcttattcgtcgctatggcccgcccacccaagtcgtgctggaaatggcacgcgagttacccatgtccgaccgaggcctgaatgatctggagcgcgatcagcggctaaaccagcatgctaacgaacagaggcgcgaacagttagccagtctgagcgtcagcgacactcacgagaaccggctgaagctcagactgttcgaagaacttgatccgcttcgcaaggcttgtgtgttcacgggacagcctatttcgctgtctacactgttttccgacgaaatcgagatcgagcatctgctccctttctctcgaacgctcgatgacagctttgcaaacaaagttttatcccttcggcaggccaaccgggagaaaggcaatcgaacacccttcgaagcattcaactcgtccgctggctacgactgggaggcgatcacccaacgcgccgaagttctgccttcgaataaacgttggcggttcaacccagatgcgatggaaaagtttgaagcagacagcgacttcctacccagaatgctcaacgatacgcggtacattaccagcctaggcaagtcttacattgaagggctattcggaggtcagggctcaccgggccagacgaacagcgtttgggttgttaacggtcgactgacagctgatctgcgccatttcagcggattcaacgggatactcagtgacagcaaccgaaaggaccgctcagaccatcgtcaccacgccattgatgcactagtggtcgcgttgacagatagatcgatgatcaaacgcgtcgccgacctcgccaagctggatgacaaaccgcggtatagcgaagtcatgaatgagctggccgagcccctcaaaagatacttcaagcctgtctcagactggcgggataaaatgactgtgtcgcacaaaccggaccacgggttccaggctggcatgcacaatgacacagctttcggcctcaccggagagacggacagcaaaggacaacccatactggtgacacgaaaaccgctatcctcattcgcgaacccaaaggacttgttatcgatcagagacccggatctgagagacgagctttacgcggcatctgaaggtttgagcggcgcggacttcgtcaacgccgtagtcaccacggggctccagatgcacccgcaggttaaaagcgcacgtgtcatcacgccaatgaaatcaacgtcttttgtgactatttcaaatggcaaggatggagtgaaagcctataagggcgacagcaactactgctacgacatctgggttgaccaaaagggcaaatggaccggcaacgtggttactacattcgaagcttaccagcgggcacaaacagatcctgattggtggcgcaggcccacactagagaacggcacaaagcttattatgcgccttcgaaagggcgacatgctcgaactggatggaccttccggtcgccgcaaagtgatcgtcttcaagttcacaacgggcaaaatcgacatggccgagcactatcaagccaatgcatccgcgagggttcgcgccaaccacttagaagcaataaggatggctccaagcgcgcttcaaagggcatccgccgtcgttttgcatgtttcaccaagtggcagagtaaaaaaggcctactgaaaatggcacagtgattgcttgctatccagaaggtgattcaggagcaagtaatccagatgttgaaccgcattgtcgaaatcgcgagcgacgggatccacgcttccctcaatcgcggttttttgcaactccgcaggagtaaggaaattgtcggtcaagttccgcttccggacatcgggggacttgttattcgcggctatggtgccagcatttccctcaatcttgttagtcgattgtcggaacttaaaatcccgatcgtgttgtgcggaacagatcagtccccgtctgcggtcgtctggccgctagcaggccatcacgccgcaagtgaattaatcgaagctcaagcccagctcagcttgccgcgcaaaaagcggctatggcagtccatcgtgaaggccaagattgaggcacaggccagaaccctgctttggttcggaaaagacgcaaacgaccttctggcaatgaaagagcgtgtgcaatcaggtgatccagagaatttggaggctcaggcagcaaagcgttactggaagcggctcatggaagaaattgagccacacttcagcagatcacgtggcgaaggctttacgaatgctgcgctgaattacggctacactgtcctcagggcgggcatggcacgatcaattctggcatccggcctgcacccaggcttctcggttcatcataaaagctctggggacagcttgaggctggcagatgatttgatggaaccctacaggccgctagttgatctagttgtctaccaaatttcctctgatgagaacgaagcgaatttaacgcccgatcacaagcagagactggtgaaagttctgtccatggatctgatcacaagcgtcggcattacgccattgcaaacaagcatggatcggttggctcagaattaccgcagcgtgtgcctaggccaatctcgcacacttacgtttgcccaaggaccatcaagctcagaatgggaggcgaggtgactgggttaacttacctgtcttcgtatcagctcatgtggatgatggtgttgtttgatcttccggtgcagacaccgaaggaaaagaaagcgtatgtggattttcgtaatttcctattggatatgtctttctctatggcacaatactccgtgtatgttcgacatacttcaggaagggaccagattgcgcctatcgtccgaaaaattgaagccgccgttcctgatgaaggacgggtcgacatactgcaatttactgaccgtcagtatgctgacatcgtctctctcagggggcgaaggggaaaacaaacgcctcaaaaccccagtcaattggcattgttttagatgcgccggggccgattttatcaagaaaatatcccaaaatttcaatcaaaacaggcgcctgcattcaggttggttctagcactctggaaaagtcaggccaaccggaacagcgcctagacggtctcattgagaattcgcgttctagcactctggaaaagtcaggccaaccggaacggcaagcattcggtatcagtcttttaaaccgttctagcactctggaaaagtcaggccaaccggaacatgatcggcgagcacaagctaataccgcctgttctagcactctggaaaagtcaggccaaccggaactgaatatcctcgaccgaggcgactgtagtcgttctagcactctggaaaagtcaggccaaccggaacgaaaccaccgcagcttcagataccgaatgagttctagcactctggaaaagtcaggccaaccggaactaaatacctcaatacgccgtcagggcgcgtgttctagcactctggaaaagtcaggccaaccggaacccggtttggacaacagaagatagacgggcggttctagcactctggaaaagtcaggccaaccggaacgttgggcttggttagggcttcggctgtgaagttctagcactctggaaaagtcaggcataattttaccaaaaaatctgagagcctatctgatgggggactctctgtggaatccccccgtacccccctcgttatctttgacaccgacctgaaagaagaaagctaatcgctaaactaccagatgatcggttaggcggttaacaaggcccctgccttttggggtcagtccaactcggatcatgcgtagatcgttgggatcgggtgttctggtaagtagccctacggatttgcgagaattttccgaaggcgcttcgccagatttacggtttccgagtcggcggtcgctcattgaaagaactatccggctcatggaaggtctgtagatacctatgctatccgctatttcgcccacggaaggttcttcgccatgcgtgcttatgtgcttggccacgctaaaaagcgcagcagcgtagctagccggaaaatcgggttcaatcattcgaagctcattgataatgcgagttagagatagaatcgccttctggtccatagatctgctcgttactaatgacaatgcgctctgcggcttactcctcacctgcgagcaggtccgcattaaacatattgaaaacaacacactaaatagcagtcaagttaaaatcgaaatcgctaaaacctacaccctaccatcagttgccattagatgattcacaagaccaagtcctagtgacgccttatgcagcatacggattaaagcatcataagagtgggtattgacttttgaagccccaagcatcactaactcaagactctattgaagcttggagttggacatgatcattggctatgcacgaacatcaacggcagaccaaagcgcgggaatggaagctcagcaaagggatctggaaggggctggagcggaacgcatctttgccgaacagatttcttcagtcgcgaacagaccagccctagagcaagctctggacttcatcagggatggggacacgatcatcgtgaccaagctagatcgccttgcgcgatccatccgtgatctgatggaaatcgttgagcggatccagacaaagggcgctaagcttcgtatcttgggtatggatctggatacgggatcggcgacaggaaagctgatgctcggcatactcggctcggtggctgagttcgaacgcgagattatgctcgagagacaacgcgaagggattgccaaggccaaggctgagggaaagtacaagggacgcgctccgaccgctcagaagaaagctgagagcgtcctgaggctacttaaagaagggctcacggaagtcgaagtcgcggaacaactggacataagccgttccagtgtccagcggatcaaacgacagaacaaacctgagaccgtctaacactcatactgcctgagcctccctgttcttgtcagctactgagggacgtcaattccgcacactgaggaatgcctcttcaaccagcttgcaggcttcctcgatgtcctctccgaagattctcaggacacgcccacggctctgagggtacttgtgtagttcggtgacatgcttctgcgtcgtcgtcgacccgcgtgcaactggaacatctcgctcccatcgcttgtgtgttcctgaagccaacctgtgaaccagcttcgcagcttgaacacggcgaaactctacgctctcttcgggagcgggatccgcctcaatagcgagaccaatcacgagccacgcctctatgaccttcagagggctcacagaagactctctgagcctcgcccacgcctttctcgctctttctgatggtgacataccagccagacgaaacgcctctgtatgagtccctgagcggctgtagagcccttctatgcgctgcaccccattctttaccaacacatgatctgagtttcgctttagccaagctctcacgacctttcggtggggctttagctgcgtggcggtgtaggacttcttgtaagggcttccgtgcctactgtactggtcagcatgtcgtctgcagaagcgcctatcaagtccattctctgagcccgctctagctggatgaggacacccaatcacacgacagtatcgatacatgtgatcttcggtctttgcccgtttagcgacgtccttgcctttgctcatcgatctacctcaggccagtcctgggtgatcaccggaagcacaccaaggcggtctttaaaggccccttcgaagatgctcatcccggcatcagccttagacaccggaacgatcaaagcatcatgcagaggtaaggcggttatccctgcctcatagcagcgctcagtagcattgatgataatctcactctcatcgaacatgaagcgagccccctgaggctcctcagccagaagatacttagcgataggctcgttgtgccgacacatggcctcatagacccttcggtgtttgtctggtcctttgacatgatgagaaacggaattgggaagccgtgcacccttcttcggcacgtcccacaagaacttcatcatagcgatcttgagctcatcgcgaggcacgtaagagaactccagtggcacgtatggatcgtgtgggatcactagaccttcatgagcgtaggcaatggacggcatcgcagacttgagatccagctcagcgataggctcaccgtctaacagtaaacctgaacggcgacggaccttctcaacagataaccagaaagctgggcccgtaagccttccaccacacaccaaacttccgtcaaggaagtacctcctcacagaacgtctatgggtgtctatggatgggtgttcggttgacacctgatcaatcctcgccgccgcgaaacactcattcagacgcctcacctgttctttcaatcgctgagtttctgatgtgtcgggtaccttaagaatttcacggctgccgtcactttctctctttgcccctctcagctcgaccagatcttcggcgtggcttgaatgacgacctacgtcatcgatagtaacacccaactccttcattctaaggaggagcttatcacccgcctttagtgtggatctcttcgcctcaccgtagtttttccctaactcgacttttagccagccagtagcctgcaagtctttgagacgatcagggacacctcggttgatggctggagctttcttacctgtgagagcctcattggacagggctatagacaggtccagagcgtgggcatctgcaagtgtgtgtgccaccacgtcacagatcaaagcttcgaccgtagacttctccctattggtcttcctcaacgcgttagcgcttcgacgtcgcctctcatcaaactgatcttgcaaggcttcctcacagatcgccttagccttctctgtaagagcattggcataaggatcccatgatcgatgtcgtcggtcttggttagtcatagagtcgtctttgagtgatgattggagagggggatagcgacggcggctaccccctacttaggggacacatagaggactgatagcgagactatgagtgcctcttagtgaaggactatgagtgaggtgattaccactgtggtggtggtatcactctgcctgcaggacacctcagaggctacctatagaaatcatacagtaagactaagagtagcaaccatgagatatcctatagccaacctgtacccatcactaagagtattactgagagggggcctagagtcccacgggacagttaaggcgtgactagccaatccggagctcctcttctgtgtactcgattgcgtcgacattcccgagattaggcagagccgcctcgagtgcggctagcgcccggtccaaaggcaattcagatgagccatagtcgtctttctttgcgtgtcctaagaagcgctcacgcgtaaactcattgacggtctccgtgagatccagagccgcagccatcgtgtgtctgaatgaatatgtcacaagagcttcggttttcagaatgcccgcagcccgaatgcatttattcacacgtgccgagagattgttgtttttccgctcgctgccttcacgtggagccagaatcggaaacaagaagccctctccaactctttcgacgctccttttagctgcctccagagcgccgccaaccaacggcactcttcgcgttgactgctcgttcttcaaacgaacattctcagtccacctaacgtaaacatacgggatagggcctgacaggacgacatcctgcacccgcagccccgcaatctccccgggacgacaaccagtaaacataaggagatgaatgacatcgacggtttcttcagacacacgagatgtctcaagatagcgctcaattgctcgaaggtgacttgtaagaaacggtttccgtccgattggcttcttcgccgctttaggcactttcaatctcgcaaagggattatcgccctcaatcatgccatgatcaagcaacacattgaacgtcgccttcagcgttcctatccgctttgacacggtagacccagattgaccacgcacactcgcaagatgctgcgcccaacgattggcgtctaaacgcgtaaggtctgtgatcggaacgtcttcaaagaattctatagcctgatctttggctgacttttcagattgcgtggcgacgccgctgcgttggtgttcgacatagtagtcaattgctcggctgatagtcattttcagctgaggcattttgcctttgttgaggacctcgatcttgaacttttgctcagccgtcagctgcttaggatgcccgaactcatccacaccgaactgtttagaagcctcttcaatgattgcgtctaattcgaagtcggctacagtttcctcaacctcaattgcgcccagagacgtgccttcggccataaaactgacagctacctgacttaggttattgcgttctctagcataccattcagcgacagccgcatgagcctgctcttcagtcatctgctcaagtcgaccagagcgaacagagtttactcgctcatcaaaaatggagttgagctcagccgctttaatcgcggcctgctgctgcgtgagaccactggaaaatgtttgctttaattctctgggaagttccgcaaaggcagcacgaacatcgtcgggccatttccgtctgaacctgtatttgccgtcttttccgagcttaacgttcttgatcatgatgcccatgaagatagccttttgtacctgagtttgtacccagaactcggctctttaggcatttttccacatgaaatcagcgcactaggcgggttcagttggtgcggttaagaggactcgaacctccacgggtcgccccacacggacctgaaccgtgcgcgtctaccaattccgccataaccgcacgctgaattggaagcgcggtgtatatcgatctgtcgaattcccgtcaacacagaaccgcggctcagcgtgaaaaaagagtatcgccctactcctgccaatttgagcagctcccaagcagataccgttttccaaacacccgtgcaggctctacaatatcacagcacactcaaatggagccatgctatggccgatacgctgaccgagacgaacgacccgattgcgagaatgcgcgcgatccggcgagatattcatgcccaccccgagctcgcctttcaggaaaaccggacctccgatctggtggcagaagcgctgacccgtgcagggatagaggtccatcgggggcttgccgaaaccggcgttgttggcacgctgaaaaatggcggcgggccagtgatcggtcttcgcgcggatatggacgcgctcccaattgaagaacaatccggcgcggcgcactgctccacccatcacggcgttatgcacgcctgcggacatgacgggcacacagccatgctgatcggcgccgctgaggcgctcgcggcatcacgtaatttcaagggcaccatacatttcatcttccagccggctgaagaaaatttcggcggcggcaagcgcatggtggaggaaggcctgttcaagctattcccgtgcgacgctgtatttgcgcttcacaactggccaggcttgcctgccgggcggatcgccgttcagccaggcccgatgatggcgtcatatgatagcttcaccttcacgctgaagggcgtgggcgggcacgctgccatgccggagacgacgaaggacccggtcaccacggcagccgaactcgtcctcgcgctacagacgattgtcagccgcaagatcagcccgcacgaccccgcagttctgacgatcacccaaatgcatggcgggcacacattcaacgttatccctgaagagatgaaggtgatgggcacagtgcgctgcttctccggcgaggtgcgcgactttattcgcgccgagatgctgcatgtcgcagaagctgtgtgcggcgcccacggtgtcagcgtcagccttgcgtatgaggaaggctatccgagcaccatcaatacgccagccgaggccgactatgcccgacgagtcgcaagtgagctggtcggcgcggaccatgtcgacaccggcttccggccgagcatggcatcagaagatttctcgctcatgctgcaggaagtccccggcgcctacatctggctgggtgcagggcttgaaaccaaaccgctacaccaccctgaatacgattttaacgatgatacgctggaaacaggccgcgaccttctcatccggctggcgacgaattttccagacggcatttagaagcgaacttgaagcggctcttcccggttatcccgggaaggtctgcacaccaatcttgtacaagcggtcgccatcaataatcaggcaggccgagctttcctgcccctgaacgtgacaccagaccggcgcatccatgctttgaaaacgcagatactcgccgcgatccacccactcttccggataaaacgggaactcaccacccgggaagtctgcaccctccggccattcaggaagctctgaacttgtgaatgcgccaccgccaaaccgaacgccgatcagctcatccagaaaatctgccatgctgcgctcgtcagtcacttcatagaaaccgaagagataccgcgctggtgtcgcgtgcgaatacaaaggcgcgccatcaccatcgcgcacaatgatcagtgccacgctattggcgcagtcgtcgcctatcgcgacggcctcagcgatattgtcgccgaatgaaactgattctgacgatgttgttgcgcacccgtccgcgaaagctgcgccactgcttagcgcaaggaacccgaatgcggctattgctgtcttgatcatagatttccccctcttttcatcagcttagaagaaacccactaaaaagatcaatcgtatcagctgcgatttgacggccctgcgaccgaaaccgtgaaaatcaaaacgccccaccccgcgatgaagaaaacgggatggggcgtcctgcagaacagacgtcgagggacgtctggggaggagctggttgtctagctttgtgggccgtcaggaatggtggaagcatcccctacagtgatctcttcatcaaacacggccaccgcgccggattccggcgtgtaagctggccactcaaacccgttattacaggtaatcgtggtggatgacggattcatatgcatgaaattggtccagcaggaattcacaatgtcggcataggcctcgtcttctacagtggtgcgaccagcgccccagcttgaggttttaagcgagtcgaatgtgtacatcagttcggcagagtggatcgggccgttgccccaggcggcctcgcggaattcaggcatatagcggaagtggtagaggaaggctggcgcgccctcatcacccgtttctgcggcaagctgggtcgctcgggagaaaccgccttcgcccatgtttgaaccgaccagaaccggcacatcagcctcgcgcccggcatccatcgctgcgcgcggtgagaccgtattgaacgtgccatcaattgcgccagagataccgcggcgcagcgccggattgtaagtcagcgactgagccgagatgctgcgcagcatgtcagctgtcgcatccgcaggtacatccaaggtcgccatgccttccacgccgagctgctcagcggcagtgagttcccggcccggagacacgaatgcgccggactggacaatcgccttatcgaacaggccttcagccgacgg

SEQ ID NO: 1009 - DNA, 13644 bp, synthetic construct
  misc_feature 1..13644: note = Synthetic
  source 1..13644: mol_type = other DNA
cggggttgcattgatttgtcgagcagtaagagcgtcttgacgctccgaaccgtgcttccttcaaaaataagaaggcgagccatgatagctcgccttcgcatttcgtggatttcctaaggagtaatccttgttaacggaaagtccgacttttccagagtgctagaaatgcattcaaattataagtcagacattacagcaagtccagcactctggaaaagtcaggccaaccgcaactaaatcaaacgacagaacggtgaaacgggttctggaatcgtggtttttgggtgccatctcttcgaatgatatgctcgcctgcgggttgatggcgttagcccgttaggcgcaaactcttctgctcatacctatcctccataatcatacttgacttctagcgccgcccaacggcaaagtcaattagtttgatttagggggctaaaaatgaagtatcgcaaatgaagtatcgcatcggaattgatcttggcactaactctctgggatgggcggctattgagctttccggtgacgcgccagacgcactcacgcccggcccccttcttggcatgggcgtccggatcttttcggacgcccgcaatcccaaggacaaatcctccaatgcggcacaacggcgtggcccgcgttcggcacggcgcaaccgggatcgcaaggaagcacgtggccgcgccatgcttcatgcgctcactgcagccgggctcatgccgcctgaaggcgccgaacgcaaagcgctggaagagcttgacccatggatcctgcgcgccaaggcgctgcatcagtcccttacgccttttgagatcggccgggcgctcttccacctgcaacaaaggcgaggcttcaaatcaaatcgcaagaccgatggtgacgatgaaggggccatgtttgccgcgattgaggccgcacgcgaaaagatgcgcgcaacaggggcgaatacgctgggggagatgtttggggcaccacgacttgcacagttggaggcaaatcgcaaaacacctgcaggttcacgtgctcctatgcctcaggcgcgggtcaaagcccaccgcgaaggctcaaaaatggcctatgactattatccttcacgcgccatgatcctcgacgaattcgaacagatctggaaccaccaggcgcctcaccaccctacattcatgacggcagacgcccatgataccatccggcacgtcattgtgtatcagcggaagttgaagccacaacaggcaggcaagtgcacattcctgccggatcagcctcgcgcaccaaaggcgctgccctccacgcaatatgcccgcattctgcaagaggtgaacaatctcagcgttggcgcgactggcgaggtttcccgcacgctaacccgtgatgaacgagcgcaactggtcgatttccttgtccacccatcctccaaggcggcaaagcgcaccttcaaggcaatccgcaaacgtctcaacctgccgaactcgcaaaagttcaatattgaaagtgccaagcgcgaccatctggtgggtgacaccacgggggccatcctgatgcaaacggatgtctggggtgatggctggttcgacctgaaccggacaacgcaggatgaaattgtcctcaaactgattgagactgaacaggaagccgatcttgtcgactggctcacccggaagcatggcctgtctgaggatcaagccaaagctgtctcgcgcgcccgtctggccgatagccatggcaaactctctgcgcaggcactgagccgggtcatcccgcgcctagaggctggcgaaaggtatgatgaagccgcgcaagcagagttcggagaccatcgcgcaatgggcgatggggtaatccacgaagatggcttgccctactacggcgaaatcctgtcacggcacacagcctttgaaagggataaccctcggaatgatgaagaacgctatggccgggttgccaacccgaccgtgcatgtggcgctcaatgagctgaaaaaggtgatcaacgatctgatccgccgctggggaccgccagagcaggtcgtgcttgagctggcacgagacctgcccctgtccgaccggagacggcgcgagctggaagctctgctaaagaaaaaccaggatctcaacgacaagcggaacgcatatcttaccgccaacggatattctccaaactatgaaaaccgcctgaaactgcgtctctacgaagaggcgatggatgcgtttggcgggaccgttgtgtgcgcgttttccggcacgcctatcaacaagaccgacctgttttcagatgatgtggagatcgaacacatcctgccgctgtcacgcacgctcgatgacagctttgcaaacaaggtccttgcgacgcgagaggccaatcgtatcaagcgcaaccagaccccttttaaagccttcggcgacagtcccgcaggctatgactgggagcagataagcctgagggcgagtgaccttcccgcatccaaggcctggcgctttgatcccgatgcaatggaacactgggaagcgcgtggcggtgatttcctggcccgccagctcaatgacacccgctatatcgctcggctcagcaagacatttgttgaagccctttacggcgggcaaggcgtgaaagggcagagccgcaaggtctgggtcgtgcccgggcagctcacagcagatctccgccactttgcaggcttcaacactttgacaggcctgacaggtggcaaccggaaagaccggaccgatcatcgccaccatgccgttgatgcgctggtcgtcgccctcacggaccaggccatggtgaagcgcgcttccgacctggcaaaacaggaagacgcggccgcccatcatgagatcatgcaggccatggctgaacccctgaaacgttatcgcgcctcagccgaggacaggctttccaagctggtcgtgtctcacaagcctgatcacggtttccaggacgccatgcataacgacacagcttatggcatcactgggcaaagcgacgccaagggccagatgatactggtgacacgcaagcttctgtcggatctggaaccgaaggatctggactcgatcgtcgatccccagctgcgcgatcactttaacacggaaacgcaggggctctccggcaaggatttcacacaggccttgtgcgagaccggagagggcatgcgcccacccgtgcgccgtgttcgcgtcgccaccccgatgaaagagtccagctttgtcaccatcaagcatggtaagaaccggcaacactcaaaagcctacaagggcgatggaaactattgttacgatatcttccaggatcagaaagggtgttggaccggcgaagttgtcaccacctttcaggcataccagcttgcgcaagcggatccggactggtggctaaagccaacacggcaagatggtcagtctctactgatgcgcctacgcaaaggcgatatgctagaaattgacagtccggccggagaccggcggtgcgtaacgatttacaaattctcggcaggcaaaataaacatggcagatcaccatgaggctaacgcatcggctcgcgttcgcgcaaaagaactggccggttaccagatgtccccgtcatccctccaaagggccaatgcggtcaggatcaccgtcagcccctcaggcaagataaaacgacacaaggcatagaaattgcaacttctgcggtaatccggagaagttatatgcagaacagaatagtcgaagtcgctacagataatgtgcatctgtctctctttcgcggcttcatgaagctttctcgcgaacgggaagaaatcggccgtgttgccctgcctgatattggcggactggtcgtgcgcggctatggcgcttccatctcgctcaatctggccgcccgccttgcagcagagaacataccggttgtgctttgcggtgtggatcaatcaccagcgtcgataatctggcccgtcgccggacaccatgcccaggggaacattattgaggcgcagggacagctaagcctgccacaacgcaagcgcctctggcaagctcttgttcgcgctaagatcaacgcgcagggacaagcactgagcgcggcgggtgagcattcggcagacttgatcgaaatggccaaggctgttcgctcaggcgatccggacaatcttgaagctcaggccgcccgaaaatactggccgcgaatgatgggcaaacttgaagactcgtttacccgttctcgtcaggcaaacggactaaacgcatggctcaattatggctacacggttttgcgtgcaggggcagcgcgtagcctgctagcggccggcctccatcccagcctctccattcagcatgccagtcgtggggagcctctgcggctcagctccgacatgatggaaccattcagaccctgggtagacctgacaatcaggcgcctcgcagaatgcgaaagggacgaattacccgctcttgatcgttatcgtaaaagtcggattgttcaggtcctgtctctggacctgcagggcccgcaaggggcaagtcctgtgcagacctgcatgaatcgccaggctcaaagccttgccagaatatgcctaggagaagcgcgcactcttgaactgccagcaggtctggctctggaattgtcaggaggcgtcaagtgagggcgctaacgcacctttcagcgtatcagcacatgtgggttatggtcttgttcgatttaccggtcacaacgaaagaggaacggcgtgcttacactcagttccgggactttttactggatcaaagtttcaccatggcccaatactcagtgtatattcgccacaccacaggacgcgcacaacttgcccctatcataaggtccatagaggccgcggtcccgcccgaagggaaggtcgacatcttgcaattcacggaccggcaatatgccgatattgtctcactgcgaggtcgacggcgcactgattcgcgtgaaaacccagaccaactagtgatgttttgaggatgacacgtcgtttttcttcagtgttattcggtaaaatttcactttatatcaacgacttgccacctcatcgggtctagcactctggaaaagccggaccaaccgcaaccgtctgtggggatcaccttgggcattgtttggtctagcactctggaaaagccggaccaaccgcaactcgccgtccagagctgcgaaggaaggcttcggtctagcactctggaaaagccggaccaaccgcaacgccttgaaggcacagacgatatacgatgaaggtctagcactctggaaaagccggaccaaccgcaacttgccgttgcgcatgaccacctcagtaaccggtctagcactctggaaaagccggaccaaccgcaaccactgtcgtcagacgatggccgggcattatggtctagcactctggaaaagccggaccaaccgcaacccggtataggtgtgtgggcaggggagatcaggtctagcactctggaaaagccggaccaaccgcaacgatatgcccgagatggccaaaggaaagcctggtctagcactctggaaaagccggaccaaccgcaacgggatcatcctttgcatggaatggcgggaaggtctagcactctggaaaagccggaccaaccgcaaccgacacggttcgaggcgtatctcacgacagggtctagcactctggaaaagccggaccaaccgcaacccaattcgggatgtgcaggaaggctatcctggtctagcactctggaaaagccggaccaaccgcaacgatggtcaaagcactgagttgaagtggattggtctagcactctggaaaagccggaccaaccgcaaccgtttgcggcagttctctatcaacttattcggtctagcactctggaaaagccggaccaaccgcaacccgaacagcgcttgaaagaaaccgcccaggggtctaggctcaggactcattgttcacaaccagaatgcgacggtagcggcgatgcagattgccgagaagaaggtgtgggcgcaccggtcgtaacgtgttgcgacacgtcgccagtccttgagttttgcgaacaggttctcgatcttgtggcgctggcggtagagggccttgtcataggggtaaggccgtttgcggcttctcgatgaggggatgcagggcgcgatcccctttgcggtgagggcctgacggaaccaggtgctgtcatagccgcggtcgccgatcaggtgtgaggcgggcggcaggatgtcgagcagcaggcgtgcgcccttgtggtcgctcatctggccctccgaaagatgcaggaggatggggcggccctgactgtcgcaaaccgcatgcagcttggagttcagcccgcccttggtgcgcccgataaggcggggaacatccccttttttaacaggctcgccgccgtgcggtgggccttcagatgggtggcgtcgatcatgatccggtccggcggcgggcctgccccggcaagggcggtgaagatgcggtcgaacacgcccatccggctccagcggatgaagcggttatacagcgtcttgtgcgggccatagtccttcggcgcatccttccattgcagaccgtgcttgatgacatagacaatcccgctcaccacacgccggtcatccacccgcgcaaccccgtgtgccagcggaaaatacggcgagatccgcgccatctgacgttcgctcagcaaaaacaaatcacgcatcacgacatcctcctgaatatcgtgaatcacaacccaatcgaaattaataggtcctgagcctagcactctggaaaagccggaccaaccgcaacccaccattgaaggcaccggcacgttcaaccggtctagcactctggaaaaaggccgaccaatcatattctatcatcctacaggccaatcatcacatgctccaatacattgaattttattatttattctgaagccccggtttcatgacggagaaaaggctcacttcaaggcatgggcggcacaccagcgaatcagaccgagaaagtgaattcaaccaataggttacgcgggcaagcagacccacacgcttcccagcgagtggtgcagatctggtgcggagaagaaattttcagacatcttcgcgtcaatgcgggcgcggaaatatcatataaaaacaatcctgtaggatggtggagctggatgatgaaacatccaaccagctctttgaggttctgagcgattgggaagaccagcttcgtgatgtggacttctcggttctggatgaggaggcgccaccggaggaggaaagcccggtgcccaagccgggcaagcatggagggccgactccatgctagacgattacaaaggcacatgcaggcaggcggtttgagcgtaaccgcgacctgcacggcaagggcgcgtcgaaacacccttcaccgctgtcgctgcgcctcacgcatgaggaacgggcgcagttagagcgcgatgcgggcgacaggacgctgagcagctatattcgctggcggctgttcggggagcaaatagagccctggccctctcgccgtccaaaacgcaaaagccacaagccgggcgtggatcatgtcatcctcgcccaattgctcggcgcgctcggcaagtcgcggctggcctccaatctcaaccagattgccaaggccgcgaatatcggcgcgctgccggtcacggaagagctggaagccgagttgcacacggcctgcgccgagattggcgagatgcgtgacacgctcatgacggcgctcggtaaggcctcggcatgatcctcgtcggcaatcaaaggggtggtgcgcgcgatctggcgcgccacctgatgaaggatgagaacgaccatgtgcatgtccatgaaattcgcggcttcgtggccgacgacctcatgggcgcgttcaaggaagccgaggcgctgagcaaaggcacacgctgccgccagttcctgttctcgctttcgctcaatccgccacaggatgagcgctgctccattgcctcttttgaggctgctattgcgcaggccgaagagcgcctgggcctgacagaccagccccgcgcgattgtcttccatgagaaggaaggtcgccgtcatgcgcatgcggtctggtcgcgcatcgacaccgagcagatgaaagcggtgcagctctcgcactcgaaaaccaaactcgcggcgctgtcgaaacagctctatcttgatcatggctggcggttgcccgccggtcatatcgaccgctctttgcgcgatccccccaacttcacgctggaagaatggcaacaggccaaacgaacggggcaagacccgcgcgcgatcaaaacggcgatcaaggaagcctgggcggtctcagacgatcaggcgagtttcacccaagcgctgcgggagcgcggctatactctggcgcgcggcaatcggcgcagttttgtggcggtggatgccttcggcgaagtttattccgtgccgcgccagatcggcgtgaaaaccaaggacgtcagagaccggctcggcaaagccgacaccctgccggatgtggacattgtgaagtccgagaaggccgacgcgctgagcaacaaattgacgggtttcgtgaacgagatagacgcgcaagccgagcgccagaaagcggcattcaagcagaagctccacgacctccgcacccgccagcgcagcgaacgtagagcgctgattgaggcgcagcagcagcgccgcacgctagaagctcaaacccgccaggcccgcttccgcaaaggcctcaaaggcgtctgggacatcctgcgcggcgaacactggcgtatctcgcaagagaacaaacgcgacgcccaagccgccctgaaacgcgatcaggccgaatttgaggcgcagattgagaagcacctcgatgagcggcagacgctgaagctggaattggctcaggccaagagggttgccgagaacctgaatactcagcgcgccaacttggtggaagagctagaaaagtcgatgcaagcgactccgcaaaaacggcccgcacctcaaaaacaaatgcgcatgtgagtggtatgggaaagtggcgccaacttgagtgagacagcagaatcgcgtgtgattctcttctgagaaagttaggttcgccatgtcagatgatttacttattacgatgcccgcaagtcctgctcgtcttattcttgaaggcgaccgactcatggtggcgcggctgctcaagttaaagaattttgccgatcactgtcaaaaacaaggcatatccgtaaacaagaagcgcctgctcaaccttgagcgtcttggtgcgtttaaacccatcgttcgttttgtgaatgacggtagcattagtgccggcatgcgtttcccaaacagcgatgtgggcgagtggtttgatcaaggtatcgcaatcgattgtctggcaccgggcaccgaatacaatatgcctgcggaagacgtagaaaccgaagcgttctattcgccgtttcaaatctttgatttgatctgtgcccttacaggcctgacgataaacgtgcagctagatgaatatctagagcagcaaaccccgcctgttgattggcaggccagggcaggtcactgggtgcaattcgctgagcaatgcctagcaggttgccgcaacagctccttccgagccgcagtctctgtgctgtgccaatatatttcgaacagatactatcctcatacccaaggaaatcgcaggacaatctcagtcccaagagactgtttggctgtaggggggtggataaatattattggggtgggttggcagtgggaagaagaggccgccaattttgatccaaagcaagtcgaaacagaatttcagctcacggaaaggaaattagagcatgcttacaatgcgatagccactgcagcaaattctaaagacccaatcgaaaaatgggcaaatcttgtcgagtttatttcgatcaaacaaaagaacgcgcttaaaggtgatgccttgttggctttcaacctccggtgtgcggccaatatgataaggcgccttcataaagacctgtacggcgtcgaccttccccctagccatgaggtaaatacggaagttatctcccattcccctgagttagaacaaagagatgactgccgcaggcatttggagtttgtggtcaaccaatatgatctcaatccacaaccgaaactcgtgcttcttgtcgaaggtgagagtgaggtcgcgctgattgatacgatctttcagcccttattcggacatcatcccggaactgctggaattgaaatcatcaacctacgcggcgtggacaacgctactggtaacaaaaaatatgaccgcttcacggccatcgtccggttgatagattatcttcatcaccatcagagcatgacataccttttgctggacgatgagaactatgctcggaagctacaggaggcggcggaacacaaaccctcgctactgagcagcaaccgcttggcgatggcacctgaccatgtgagactgtggggtgtgtgcttagagttcgacaatttttctaatacagaaattgcaaaagccctgaccaagataggaaatggcgcgaagttctctcccgctgaaattgccctggcgcgagaagattctaatccaggaaaaagcctttcagatatatacgccgcaaaaacttctcgaagtttgaacaagccagatttggcgagagttttaggtcagattcttattgatcctaagacgcggaaaaagcccgcgaaaaggccgattgtggaagtcctgagaactgcccgcaaattggctgttcgcaatccttttccaaccactcacgaaatttgggttcgcaatcagaattcatctgtcctcggagggcagagagtcagtgatgatttaatttctgacagcaacgcggatcagtagtgctcttcaagcagaccaaatgcccgcgactcgcgtataattagaaaacgaagcgggcaaagaccatgacatcttatgcacacaagagaattctgagcacacttgatcgaataggcccctatccggctgacaaaggcaagctggagcagtggttagagggagaaggtcatttaaagtttgtacgtgataacgcgacagatgatgaattgattctatacgcctcaagcaactctgtgtttgtccatactgttgccgtcccaagcgacaacctagagccgcttcaaaaaagtgatttgctgacttggagccataatccattcacggtctgcgcgagcgtttggtggaggtcgggcgaagaaaagcatctaggcttcgaacgagggataacaacagccgggtctgattcactcgatggcggtcacaacttggtttttatgcggagcttcgaggggtggagcgacgagccctcgacctcaattgaattgcttcaagagttcgaacacacagcagccataaggtggagagcagagcgcaacgcgtattgcaagttcgatgagaatggcgatttttgcgatgtggtttcagttacgcgccgagaagaacggcaccccgtaactcttattactgcaaagcaagatgaacttgttgaatatctggtcgcgtctcgtcagacgcttgttcagatgtttgattttacattactcaatcacgataccttccgcagctggggcgatggggaagaagtaaattctgatgaggatgatcagttcttctatcgcagcaaaattgtcgaaggagaatgcgcttatcatagaggcgttcaaatcttgaagcctagattgtcgcgggacgaattgcttgaaaaactcacaaacccatatccacgcgaggaacggggcgtagagtttctagcctttgattggcgtcatggggaagtacgtaagatatcaactgccccaggttcaacgacgaactacttccaaatggccgataatgatcttccgcacgagctttcgatggcattttttcgcccggaggttttgtcaaaatacaaagctgatcgtgacaaatatacggttggggatcgaaccattcattgccgctctgcatggagcatgagaggcattgatgtgaacgaagccgggcaggtgcacgcatatatttgcgatcttgctgacctgccgtatcaggaacaaatccactggcaatcatataatattgagccagaagccccaatctcaaaacgcgccttcaccaacgacttcaaaggcgaatggtggactgaaccagacccttatcgtggagtgttggcacgggcgcgagaatgggatcgtcggcaagtatcttggtggacgctgaaagacaggtcacttctagaccgtacagctctgcctgtgacggacaatcgcggagagtgggctgaggcctttatggatctgacgaagctcttcaatgagggatttgtgatcaaggcgatacgagtaattttgaaagagcggagcatagattttgacccaaaggatcaaagcttggtgctgcttgagaaattgcttgcaagtgcgagcgatggggatgaaccgccaaaacttaatggcctaaggatggctcagaaaatccgctccaaggtcaaaggtcatgctggaagcagcgaagcaattgaactggcaaaagatgccctcgctaatcacgaaacatttgcgcgccatgtgcagcatgtctccgctgaaattcttgaggagttgcatcttattgaaggtgccttccatggctcagaagcctgaacagaccgtgaggccttttagttagttttgacaccgagccactgatgcgcatccaatccgcgcagggttggtctccatgaaatggtcgatgggtcttgggagcgctgaaagctcctgaggtgatgggtgcagggagagcgaagtctccttgctggcgggtgtcgggggccattaccctgaccagtgatgcaaaggctggacgcttgcgagggattgaccggcgatacggtctcttggcggctgaggggtggcctggttgtcgtggaattggagaggatttggagggggagaatacggtcatattcactgccccgtaatagcctcggaaatggaacgcagacaggttgccttgaagtcgccaatgggcggaagggggtccacgggggaagagcgcagcggctccccctggcaagaggcgtgtactacacgcacatcttgcacatcacccaattcatccccgcgcaccatgtatgacggttggggccagatgcttgcccctcacacaaagcggactcggaaccggacatgaggtctgctcaagaggtcagaatattgagctaattcctagctttagggtgcctgttttccggactcaaaagcggacaatacgagccgagtgcgacggccatcaactatggaatccacaaggctctcaatcgtcccccagctgggccgcgacatccatacgcttatgcaggacacgaacgatcaggattgaatcgccgtccagaacatagatgatcaagtgctcttcatgttgggcgatccggacgggcggatcaaagtcgctgcgttccggatgaagctgcggcctatccgcaagcaatgcgaatttagcctctatgccagataggtatcgccgccgctgggcgctgccataggtctgctgtgtatagcggccaatgcccttgatatcttcacgcgccagattgctaacgcggtagccaaccgtcattctgcatccaactcggcttgaatggcatccatgctgaatgcgtcatccacgccgcttgtaagacccgcagtgatcgcggcctgtagcgctttatgtttggcctcgtgctc

SEQ ID NO: 1010 - DNA, 9836 bp, synthetic construct
  source 1..9836: mol_type = other DNA
  misc_feature 1..9836: note = Synthetic
ggcccattttcccgacaccattgccgagctgtatgaaccggacaacatgcccgccaacctgcgggccgcccatgacttcaacgatgaaaaggtggaacgcatcttcatcggccgccgcttcaaaaacgacagcgaacgcctggaaaaactcttcaccatgtatacaaaaatgattatattatgattatggcaataatgtcagacagtcaaggaatataatatgacagaagatgaacaacgactggccgatgacaagatgaaggcggatatttacaagtgcattgcggaagctaataactttcaaatgaatgctataaaaacgtatagtgataagcaatttactgacattaaagcccgttggtttccttatataggatttacaacacttggaatgacactcggcgctcttcttattaaggtgtttggaatttaataatgaacaatagagataaaatattaagcattattcctgctagtttgattttggcggtaattgcaatgcttatagaaagattttggatttaatgacacaagaagagcaatgatcgcaggcgcggcgtgagcatcaagaatgtgaccggcaaaattagccagggtcaggactcattaaatccagtatgtgacgatggccgcaatgaggacagcagagaaaaaagtgtgcgcgcatctgtcataacgggttgcaactctgcgccaatccttgagccttgcgaacacattttcgaccttatgtgtcccgcccctaggttctcgaccgcgttttcaatcatgacctattgatcatcagcgtcagacatctgcgtggcggtgtctacatccgcctgtgtcggcctgtacggcgccccctgcgtctggatgaaatcaagagcctgttgtcgttccgccataacatcggcgttgttcgtaagctcgaccaagtggtcataggcctccagggctttatcataagtgccgagtgtcatgcgtgatcgggccagcaacagccagccctgttcgtccccgggcgagtcattcaggcgcgtctccagtcgtgcgaccaacgcctcaagggacggggcttcctgtggttcgggtcccatgggcacgatgttgtcagaccggcttaattccggtgccccgatcagggcgtaaagcccgacagttccgaacagaattgtcccggagatggccacggagagccctttgtttttttgcaggaaagggtgcgccaaaataaatccggttgcgcacgcaatccacatggtgacagcccaaatcacggcgcagcccgatcatccgggcgtgttgaaacccgccgccataaaaatatgaaaaacatgatcaacaccagaaacggtccggcccagagtgcccatgtattgggctgaaccggcggacgcagcaggacgtaatcgccgtaacgatcccgcacatattccatcacttcctcagggctgtccccggccacaagacgacgtctgaccagaagccgcatatctccggccagatcggcatccgagtcttcgatggattgactccggcatacgacacagcgcaatccacgcccgatttcgcgagcctgtttttcaatgtcgggcggaaaaatgtccggtccggtttgcgcactcaccggcgcggccaaaaacaacagggacagaagtgatgcgaatatcctcatgattgcgccttgatctgctcaatcgcgggccttagccttgttttccagacatcgtccgacacgatgccgacgtgcctgtaacgaatattaccgtctctatcgacaacgaaggtttccggtgccccggtaatgcccagatcaatagccagccggctgtaaggatcgtaaatcacacgtgcataaggatttccatgtgtgtcgagccattgcaggcctttggaacggctgtcgcgccagttaatgccgataatgtttacgccggatccggataattccatcagcttgggatgttcctgcacacaggccatacaccaggacccgaacacattcaccaaggaaacccggtcacccagaacatctttcgtgagggtcgcatccgcgttgtggagatcggacagttcgaattccggaaaaggtttattgatcagctccgacggcaaaatacgcggatcgcgggtcagacccagcgcaagcgccccgacaataccggcaaagacgacaagaggcaaaaagcctttcataaattcaggtaccattggcttccactccgggtcctgtgcgcctgtccgtcatggagacaaatccggccgcggccatgagcaacgcgccgatccagatccagatgacgaaagggtgcacatgggcacgcacaatccatccgtcctgcggattgccttcgccaatagcggcaaacagcgtatccgcgaccgcgagacgaaacccggcctctgtcgtaaacatttcccgcacgggataaaaccgccgctctgtcgaaagggagacgagttccctgccgtttttggacacggacacatctcctgtcaaagcttcatagtttgcctccctgtcgagcatcacattatccaatgtgaattcataacccgacaccgtgattgactcacctgttttcagacgccccatactgtcatcctgtccaatggccatcatggatataccaaacgcacagatagcgagacccatatgggccagcacaaacccctgttttgacgccgtcacacgcggcgcattccgaaaggcctttatgacggcaaaccccagataggtcgacagggcaaggcccacggcgcctcctgcatttttccaggtgagcaaagccgtaagtgtgacgattacaataatgaccgcactggtactgaagaatccttttaaccggcccggatcatccgtgcgccatttaagaagcggcccgacagccataaaaacaattaacaggaacatgaccggtacaaaagtcaaattgaaatacggcgcgccgaccgtgatcttgtccccgctgacaatatcaatgaaaagcggataaaatgtcccgagaaaaacggttgctgtggccgtgagtaacagcacattgttcattaaaagcgctccgccgcgggagacaggcgcaatagcggctgttttcatgattttatgtgacctcagggcataaagcacgagagctccgcctgtggcgataccaagcaaaaccaggatagcaatgccgcgggccggatcaacggcgaaggcatgcacagacaccagcacgcccgagcgcacaatgaaagttccggtcagggagagggaaaaggctgcaatagcgagcaggattgtccagttggccagggtgtgtcgttgccccaaaaccattatggaatgtaacagtgccgttccgatcagccacggcatgaaggagacgttttcgaccggatcccacatccaccaaccgccccagccgagttcgtaataggcccagaaacttccgattgtgataccgatggtcagaaagctccacgacaacagcacccagggtcgtaaccatcgtgcccagtttgcatggacacggccttcaaccagggcggcaacggcaaaggaaaaggacatggaaaaacccacatagccgaggtataaaaacggcgggtgaacggcgagaccggggtcttgcaatagcgggttcagtcccattccgtccggaggtacagggttgagcctttcaaacgggtttgaggtcagcaggacaaataacagaaacccgaaacccagcatgccttgtacagccagcgcccgggctttgagcggcgcaggcagggattttccgaacatgggcaccagtgcgccgtagatggccagaattaaaacccagagaaggatagatccttcgtgattgccccagaccccgctgattttgtaaagaagcggcttcgcggaatgggaatgggccgcggccagcctgacgctgaaatccgattgcaaaaatgtaaccgtcaacagggcgaatgaaacggcaatcaaggcgcactgcatgacagccgcacgatccccgaaccgcatcatttcagtatgtgatgattgtgctccgatcaagggcaccgatgactgtaaaaatgcaaccatcaaggctgcgattaaaaccagatgtccgatttctgcaatcacatgattgtgattactgccggcagagagccttggcaaattcagattttgtccaggtctgttatttcgccgttgccatagcagctatatcaatcggtgacagaaaaatcatgctgtcatgataacgtcccgaaaaaccgggttgacaggcaaaccaggcatgcagtaaggaccgctatcgcagagttgcgtagagggtaattcatcttcgcgaaaccatggcttttgaaactttggctgctttcctgtgcctgccgttaggcggcaagggcgtcagccggtgttcagggcctgatccagaaagagaggctaaccttgagaggtaattttttgatgaagatggccatgagggcggttttgaggcccatcatccagtctgttttcaaatctgtttccaaaacaaagaagtccaaaaaaaacaggtccggtagagggggcctgtagagaggcaaaccagtcaacagggttggtgttgtcaatccggacttgaacatgaggatggcgtggagtgtgcggagcgcgagacaaccggtcgtgcgttttgccgccttggtggtgtttcgagtctgtaaggctgggcgaagtcgcgcaccgggtccgtcggtggtgaaagcctgcgcgacggaaccggctctcggctctgtgggttctgcctgcagtaatgctgatactgccgtaacgaggcccggcatctgaacgacggattcccgaaaaaagaaagcgagccgtggctcgctttcgcatttcgtggatttcctgaagaggagtgatccttattaacagaaagtccgacttttccagagtgcaggaaatgcgggagcacatgtatgcagcttgcgttgatgtgtcaaccccctaatacatgaaaaagggatatttatgatgaaataccggcttggcattgatcttggcacaaattcactgggatgggcggctgttcgactgatggaagaacagcatgatcgcctcagccccggtccgctcctggacatgggcgtcaggatattttccgacgcgcgtaaccccaaggacaagtcttccaatgcggctcagcggcgagggccgcgcggggcccgacgcaatcttgatcgcaaatcgggtcgcaaaagacacatgctgcatgctctggttcgggccggtcttatgccgacagacgagccgtcccaaaaggagcttgaaaagctggatccctggattttacgctaccgcgccctgaacgaaaaactgaccccccatgaaatcgggcgggctctgtttcacctccagcaacggcggggcttcaagtcaaaccgcaagactgacggggacgaagccggtgccatgtacaatgcaatgctatccatcaggcccgcgccaggatgaaggagcacgacgcccgcacattgggcgagttgtttggacgtccccggcacgaacagaaacaggccaacgaagatgccccacaccgtggtggaaaacccatgccgcaggcccgcgtgaaagccagggtcgaaaagtccaaaatggtctatgactattaccccgaccgtgccatgattctggatgaatttgaacagatctgggaagcacaaaccccatatcacccggacatcctgaccggtgaagctcacgactccattcgccatgtgatagaatatcagcgcccgctcaagccgcaaaaagccgggaggtgcacatttttaccggagcaggaacgcgcgcccaaagccctgccgtcggcgcaatatgcccgcatattacaggaagtgaataacctgaaggtcggcgccaccggtgaggtttcgcgcccccttgaccgcgaacagtgtcagacagtgatcgactttctgatccggccctcctccaaaacagccaaacgaacattcaagttgattcgcaaaaaactcaaactcccggaatcacaaaggttcagccatgaatccccaaagcgggaccatcttaagggtgacctcaccgccgccggacttatgcagaaagaggcttgggggccggactggtttgacctcggtcgcgcaacacaggatgacatcgtcatgaagctgctggatacggagcaggagcaggacattgttgactggctggtgggcgaatacgggatggatgaaccccgggcccaacatatatcccgcctgaatttgcccgatgctcacggtaaattatccagagcggctctggacaggatcatcccccgtcttgaagcgggagaacgctatgatgaagccgcccggcaggaatttcgcgaccatcgggccatgggtgatggcgagattcatgaaaaactgccctattacggggaaattctgaaccggcacacagcctttgagaaggacgaccctcaaaacgacgaggaacaatatggccgggtggccaatcctacggttcatgtcgccctgaatgaattacgtaaagtcatcaatgatctcatccgtcgctggggaccgcctgaacaggtggtactggaactggcccgggatctccccctgtcagaccggggcatgcgggaactggaaagagagcaggtaaaaaaccaggaagctaatgacaagcgcaatacctggctggaggagcagaaactgccgaccaattatgagcaccgcctgaaactccgcctgtacgaggaagcggaggaggcctttggcgggattgctcaatgtgtgtttacaggcaagactatttccaaaaccgcacttttttcggccgatatagaaatcgaacatatcctgcctgtgtcacgcactctggatgacagttttgccaacaaggttctgtgcatacgcgatgccaaccgggtcaagaaaaaccagaccccctatgaggctttcggccacagcccgcccggttatgattgggagaacatcggattacgcgctgctgaacttcccggttccaaaggctggcgatttgctccggacgccatggaacaatgggaaagccggggcgacttcctggatcgacagctcactgacacgcgctctatcgcaaccttgggcaagaaatttgtggaaggtctgtacggcggccagggcagtgccggacaaacacgccaagtctgggtcatacccgggcagttgacatcggacatacggcattttgcgggttttaacactttgacgggcctgacaggcagcaacagcaaagaccgcacagaccatcgccatcatgccgttgatgctctggttattgccctgacggatcaggccatggtcaaacgggctgccggtctggcaaaacgcgaagatgcggcggcccatcatgacatcatgcggaagatggccgatccgctcaaacgctatcgcagatcagccgaagaccggctgtcaaaactgaccgtctcccacaaaccggatcacggttttcaggacgccatgcacaatgatacggcctacggcctgaccggagagaccgatgaaaaaggcaatgcgttgctggtcacgcgcaaacccctggacagtctgtccaagcccgccgatcttgataaaatccgcgatgaacatctcagaagatttttgatgctgaagttgatatccccagccctaggatctgccgatcttgataaaatccccgatgaacgcctcaggaaggaatttgcccgggccaccatgggtttgaccggcaaggattttacccaggccctgacacaggccggtcgtcacatgtccccgcccgtttacagtgtgagggtgcttgacccgatgaaacccgcatcttttgtcagggtggagcacggggacggacacagcaaagcctatatgggcagcagcaattactgttatgacatctttatgggtgagaaaggcaaatggagcggtgaggttatcaccacatttcaggcctatcagatggcccgggacaatcccgattggtggcacaacctcgggggccgtgacggacaccccctcatcatgcgtattcgcaagggtgatatgctggaattggaaacagaccccggaaaacccattagggtcgttgtgtataaattttcgacaggcaagatatttatgcacgaacactttgaagccaacgcatcggcccggatagcggaaaaggaattattgggatatcagatggcaccttcttccctgcaaagggccaaagccgtacgtctcactgtaagtccgtccggcaaggttacacgccatagactctaacagcctgaatgctgcataacgctcttgactacggagtttttatgcaaaaccgcatcgttgaaatcgccacggatgatgtgcatctctccctgttccgggggttcgtcaaactgaccagaacaggagaggagatcgggcgggtcggtctgccggaaatcggcgccctgatcatacgcggatacggggcgtccgtatcccttaatctggccgcccggctggctgaagagaacattcccctgatcctgtgcggaccggatcaaaatccggcctccgttgtctggcccgtgtcaggtcaccacagccaaggccatgtcatcgaagcacaggcggcgttgaaacaaccccggaagaaacgcctctggcaagcgttgatcaaggccaaaatcctggcgcaggcacaggcgctggcggccgaaggtgaagtcgctgcggatctgtttgaaatagccgaacgtgtccgctccggagacccggataatcaggaagccttcgccgcccgccgctattggccgcgcatgatgggccggttgcaggacaattttcgtcgtgatacgtcgggctccggcatcaatggctggctgaattacggttatgcggtgctcagggccggtgccgcgcgcagcatactggccgcaggcttgcatcccagcctgtccataaatcacatcagccgcggcgaatccctgcgtcttgcctctgatattatggagccttttcgcccgtgggtggatctgaccgtcagacgcctggtcctgaacagtgatgcagatgatttctccggactggagccgcatcagaagtcagcgattgtcagggtgttatcccttgatttgcaggggtcctacggggccagccccctgcaggtatgtctggatcgcctctgtcagagtttggtcggcctgtgtctgggtgagcgccgtaccctggaattgccgacaggcctgtcacacattgagaacagggaaacggtgtgagggcgctttcgcacctctccgcatatcagcatatgtgggttatggttttgttcgatttaccgacatctacacagacggaacggcgggcctatacccaatttcgcaactttcttctagatcaaagtttcaccatggcccaatactccgtttatatccggcacaccacaggacgcgcccaaatcaggcccattatacgcaaggtggaagccgccatgccccccgagggcaaggtggatattttgcaatttaccgaccgccaatatgctgatattgtcagcctgagaggaaagcgccgtcgtgattcgcgcgaaaatcccgaccagttcctcatgttctgaaggaaaataatatggttttcacaccgaaatacgacataaaaaccatatatttcaagcacttgccgcaaccattggtctagcactctggaaaagagggatcaactgtaaccaggtagacgtcaaccgcacaagcacagtaggtctagcactctggaaaagagggatcaactgtaacatcactcacttgtgttgtatagcctgtctgggtctagcactctggaaaagagggatcaactgtaacaggggttgaaagctgggcatcataggactaggtctagcactctggaaaaga

SEQ ID NO: 1011 - DNA, 24857 bp, synthetic construct
  source 1..24857: mol_type = other DNA
  misc_feature 1..24857: note = Synthetic
ttatcggggcattataatcgtatgaagcaaccatagaaccgaacggaggcgcattggcaccgccccattgcccaaaagaagttccgccatgtgccatgtaaagactgaacgaaattttacggtccagcatgtcttttaagctgcctataaaactgctgatggatctggtttcgtgcgcacgaccccaatagtcaaaccagcctgtccagtattcactgcacatttgcggagcgttgggatagacttctttatatttttgaaactgctgatcggtatttgaacctgcaccaaagtttaatgcggtataaacgccttcaacatcgtatttaaagaaatttgaactccagtcacaacggaataattgtactttgtcaaatccggaagaacggacagcattgcgtacctgctccatatagctcacatcctgaccgaaaaccccatattcgttttcgacctgaaccatgatgatatttccgccattctgaatttgtaaaggggcgagttctttgccaacacgctttaggtaattaacagaacgctccataaaatacgaatcttttgaagttcgtacctgtatatcatttttcttcaataaccaccatggcaaaccgcccatatcccattcggcacaggcataaggacctggacgtacaatacagtacattccgtttttttgaacgagacggacaaattcggcaacgtctttttgttctgtaaaatcaaatttatcaggctgctgttcgtgaaaattccaaaataggtaaatacaaatcgtattcatgcccatagctttgcacatttggattctgtgttcccaatactctcgtggaatcctcggaaaatgaagttcgccggcacgaacgataaaaggtttgccgtttagcagaaaggttttgtctccggcaacgaatgtcccttttttttgttctgactgtgcattagcggttaatgtcataaaaaaaacaagggcaagaataagttttgatattttcatgttttttatttcaaatctgaatttgatggttgttttaatgatgattttttgacggtcagaaagtaaaatgtttcttttttagccccgattgcaatggaaatccttatatggcggggttcgccatgtaagattgtaatgaaaagcgggacaaaatttcctgaaaaacctgattgttctgcttcaaaaaataataacgcttagtttttcaaaactacatttactttgtattctaccaaaattacgggctttttaatttctaaaaaacttttgttattgccaaaatcaggcagcacttccttttcgagatagcttagataaggagcgtctttggccattggaaggaaatggaagtacatatcgtttgtttttaaagcttcctgatattttttcagtccgattgtccagggtttgctggtgtacagatcatcggtctgtaattctccgttcatcatacagatgccgcgatcgccacgatagtcaaaagtgacgaaaatatcattgactttggacaaatcaacgctgccggctttaattacaaaatggctgttgtctgcctgtattagatttatgaacggctcagctttgggtaaattgatgtgccaggtattgctattttttagaggagatttgcctttagtagctttcccttcttttgtacttagatttgctgaagccggataaacagtcaaatcgatattttcttcattattgctgattaaagtcagttcgtcgttatcttctaagaccaatgccttactgatgatcaatttttcttcattgtctttgcctgataaataagtgttttgagcatcattattagaaagaattaaaaacgaaactccatttatctggaattccgtcattttatctgaagcaaaggctataacggtattgccatttcgtacagtagttttaattccggtacctgtgacttttgcttttcctttaaaaacgatctccggagtaatgccatcaattgtagtcatcacattgtactttttgcccttattggtaaaacggcaaaacggctgtacagtagccatacgaataggtatatcatcaaaatttacattgaaagggaagatagcggaactgcccgctttaagtgtaaaagtacctgtttccggaaaagttatggttcctgttttggttgtaatattaatttttaggttctgcagatcattcattacaacatgatcctgaaaattgtgcatgaacaaatatcctttgtcaccgtcgcttcgaacagcgtaacgcagcgttttggtgtcttcagctttgatactttcgtttgtagctggaaaaacagggtataaaggagctaaatcattgccgtacgttttcagtaaataattgatgagttttaatggataataacccgaacttacctttccgaattcgccaataggagcctgatagtcgtatgatttattgttcagaccggtgccttcggtaaataagtaattgcctaccgatggcgttgtgcctccgtgatacatataaaatcccagtccgttggtgccacttcctaccgtacggaccatcatgggcaaaaagctttctcctttgacccttggacgtctggaataagttactgccatacctgttcccaattcagcagccaatgaaggataaaggtttacatcataacttacaggtgaatagtccggatttttgtgaatgtttttaaaaagataaaaaggcgaggggttattactcgcagtccagaatggataagcatatccggccatcacagggatagagcctttttcgacaatagtagcaaaaccccagcctgtagcggtataaataggtgcaataagtcctgctttgatagctaattgtttaagggttttcatgtggtcgcggccaacatcggcaaattcgttccccaggtcattaatgccaactccgtcctgaacaattttgcggtcacggcctgcagcagttctttcttttggagcgtcctgataagtgaatgcccagggagcagaggagtgctggtattcgttttccaactgtactccaataattggtccaccgtctttgaacataagtcctttcagctgtttgccgatttcctgatataagcgatttgcataaaaaagataggctttatcgttgcttctgacatcgattggacgaccgtagagccagtcaggaagtcctccgtttcgtatttctccgtgggcgaaaggtccaacccgcattaagacattaagtccgtttttggcacataattccgtaaaatgacgtacatccagatctcctgtccagttaaaagtgccttctttgaactcgtgcatattccagaaaacataggtagccactacggtaattccgcccgctttcattttttttaactgctcatcccaatactgatgaggataccggctaaaatgaaattcgcctacaaccggaataaaaggttcgttgtttttttcgatataaaaactgttaacgctgatattgtctccttttacattgcttccacccaaatccagatgaccacgaatggggtcaaatttagaagctgtaacatcaatcttgtaattgttttgagcctttagatcaatcggatttaccagaaacaacagtgtcgttattcctaatattttaatgaatataatttttttcatagaggagaatttggatccttaaaaaatcacaggataagaatggcaatttagagcaaataattttatactgatatggaatatattactttattactggattatattctgattttatcttaaatgatataattatttccgaaatttgaatttgacaaaaatgatgttatggcaaaaattaaggatgggtttattggcgaacgcgctatagttgtgccttcaccggttattgaagattttaagaaaacagatttaggctctttattatacatcacagatattggttattatccgaaagcgtcttttcattttagaaaaagaaaaaaagaagaagtatctcaatatgtatttatttatttattgtattaaaggtgagggatggtttgaaaccgatagtcagactcaaaaaatatctgccggacaggtttttgttttgccaaaagaaagggaacacagctacggaagcaatttgaaaaatccatggactatttattggtgtcactttgatggtgaaaaagcagctttttttgccgaaggattttataaaccgcttcatatttcatccgaaaaagaggcacgtattgaagatcagctgaagttatttgaagaactattttctatcctgaataatggttttagcaaagagaatctcaattttagtgttactactttttttcattttctcggatcattgaaatatttagggactttccgcgccagtaataatgccaatatggagcatcaacagctcgatatggtcgataatgccatttattatatgcgtgaaaatattcgaaaaagaattaccctcaaacaaattgcggattatgttgggtattcagtgtcttatttttcggcaaaatttcaaagcaaaacgggatattcgccattaaattatcatatccatttgaaaatacaggaagcctgccattacctcgatttttcaaatatgaaaatcaatcagattagtatgctggttggttttgatgatcctctttattttgctcgtatctttcgcaaaacaatggggagttccccaagtgaataccgtacaaaagataaaagttgattgtgttgctataaaactcgtttgaggagttgaaaaatagtgtcaggatgagcggagtcgaagcccctttaaatgaaggattgcatatcataacttgacatttcatatcattattaggcaatatgtctgattatgataactaatggcaaaagctgataatacaagctatgcagaaggatttatatttgtcaaaccttaaaaattcagattttttaaagtgctattcatctaacccaataccaatttaaataatgactattaaaaatattttttacgcatttggtttcgcaatattatttgcaaacggactaaatgcacagaaggactccggcagagtgaagtacaatttcaattacggttggaaattaaatgtaggtgatgctgagcaagccaaagagacaatttatgaagacaaaacatggtctaatgtaaatctgccttttgcctggaatcagacagaagccttcaaagtagatatttctcatttgtctaccggaattgcctggtacagaaaaacgtttcaactgccaaaagacaccagtgacaaaaaagtttttatagaatttgaaggtgttcgccaaatgggtgaagtgtatgtaaacggaaaatttgcaggacgtcacgaaaacggagcgatggcttttggtctggatatttcggcctttgtaaatccttttcctcaggaaaatgtgattgctgtaaaaaccgataatgactggagatacaaagagaaagctacggattcaggctttcagtggaatgataaaaactttaatgccaattatggagggattccaaaaaatgtattcctgcatattaaatcaaaagtataccaaaccttacccttgtattctttccttggaactacaggaacttatgtgtatgccagtgattttaatattactcaaaaaaaagcaacagtaaatattgcgtctcaggtaaaaaatgaagaatccaaatcggttaaagtgcaactgaaagtgaatataaaagatttggaagggaaagaagttactacattttttggagaaactattactttggctcccaatgaaacgaaagatttaaaaacttctaaagctttacaaaacctgaatttctggagttggggttatggatatttgtacacagtaacttcagaattattagttgataaccaatcggttgataaggcagaaattaaaacaggttttcgcaaaaccgaattcaaaaacggaatggtttatttgaatgatcgcgtgattatgatgcacggttatgcgcaacgtaccagtaacgaatggccatcgattggaatgtctgctccggcatggctgagtgattactctaacagtttgatggtaaaaagcaatggaaatttagtacgctggatgcacatcacgccctggaaacaagatgtggagtcatgtgacagagtagggcttatacaggcaatgccggcaggtgattctgaaaaagatgtaactggaagacgttgggaacagcgtacagaattgatgcgtgacgctattatttacaatcgaaacaacccgagtattttgttttacgaatcaggaaacgaaagtatttcggatgagcacatgagcgaaatgaaagcgattagagataaatatgatccttttggaggtcgtgcaataggttcgagagaaatgctcgacagcaaagtagccgaatatggcggtgaaatgctttatattaacaaaagtgttcatatcccaatgtgggctaccgaatacagcagggacgagggtttacgtaaatattgggatgagtttactccacctttccacaaagaaggaacaggaggaaccaatcatacgaatgtaaacggaacaaaagtagccgatgcgagcgcgtacaatcacaatcaggatgctcatgctattgaagatgtagtgcgttggtacgactattgggaagcccgtccgggaacaggaaatcgtgtaagttcaggtggtgtaaatattatttttagtgattcaaatacccactacagggggcaggaaaactaccgccgaagcggagaggccgatccaatgcgtattcctaaagacggattttatgcgcaccaggttatttgggatggctgggttgataccgaaaaaccagcagcgcacatcatcggacattggaattatgaaaatggggaaacaaaagatattacggtagtttcaaccgccgatgctgtagaattgtttgttaatggcaaaagcttaggaaaaggagttcagtcaaaaaggtttttgtacacttttaaaaatgtagctttccaacctggaaacataaaagcagttggttatgataaatcaggtataaaagtttgtgaagacgaaattaaaacggctggaaatccggttggacttaaattaaccagtatcgagagaccaggcggaatgttggccaatgctaatgatttggcaatcattcaggtagaagtagtggatgaaaaaggaaaccgttgtccaactgcaatgaatatgattgattttgaggtgcagggtcagggtacttttgtaggcggtattgcccagggaccggataattatataggttcaaaaaatcttcctgtagaatgcggggtgaaccgaatttttgtaagatcaaccgaaacagcaggagttatcaatattaaagcttcttctcagtcacttaaaagtatgactacagaggtaaaaacagttaaaaccgatttagaaaaattgtctgtaaaattaacgtctgacaacttgccttctttcacagaaaaaggccctacgccaaaatcaccatcgtttaagaaaaccagaactcctttaacgattattggcgctaaaaccgattcgaatctggcagatgctgctaaaagctatgatgacaacgaattgagcgaatggtctaatggggatgggatagccaaaattgaatatgaattggaacgaaatgcaactatcaatcaggtggtgctgaaactatccggatggagaagcaaaaaatatccacttcgtatttcaatagacggcaagaaagtttttgaaggaactactccgaccagtttgggctatgtaacattagatattaaaccaacaaaaggaaagaaagtccaaatagaattgatggaaaattctaaaaacagtaatgatattaatctggttgaaattaccggaaaagttgatgacggcggtctgaaaaaaacaaacagtaaaatgccgcaattgccaattgtagaaatagaattttatgagccagttaagtagataaaaagataaaaataagtttggttagtttttagtgtagcctgtcaggtattcagtattcctgacaggcttttttaaaagttttcaaacaaatctgaataatgttttttgaagcaggaaaaggcaggtgtttttcagtaaacatcgtcccactttccactacaaacgaagttcactgaactccaattgaaataaaagctaagtgaagtaatctctcttatgctgaacaccagcacaagaggattttcgtttcacacgagcggagcgaactgacgaagtaatcggggcaaaaggaaacatttttgcttttttattatcatcactaaaatacttaataattgaatcaaactaatgccaggctgagcggagtcgaagcctttctttagtcgatttatccaataggttcaaaacattcaatttcaatgaaaaaaatattcaaaacagtactgttgctattatttctaaacggctattctcaaaacacagttccggaaaaaccgcttgaattatatttactcataggtcagtccaatatggcagggcgtggagcacttgataaccaaagccaactcccatccgaagttattttgatgctggacaaaaacaatgactggattccagccaaagacccgatgcattttgacaaaccttcggcaggagtaggaccgggaattagttttgcacaaacgatgctcgaaggcaaaaatggagtaaaaataggtttgattccctgtgcgtggggaggatcacctataaaagtatggaaatccggagctaaatattttaataatttcccgtatgatgaagctatttcccgtaccaaaattgctatgcaaaaaggagttctcaaaggcattctctggcatcagggagaatcagataacgatgctgtaaaatcacaagtatatctggaaaaattaaaagaactggttgccagtttaagaaaagatttgaatgcacccaatctcccttttgtagcaggagaaattggccgttttaataaagaagattatattaataaaataataaatacaattccgaacgaaattgaaaactcagcggcagtttcttccgaaggattaacagacaaaggagatcatctgcattttgatagtccgtctgccagagaacttgggaaacgttatgctgttgccatgcagcaattattaaaagaaactccttctttaaaaacatcaaaaaagaaacctaaagtagtactgacttttgatgatgccgaaatcagccactataacaatgttgctccattattgaaaaaatacggttttggtgctactttttttgtctgcgaatttccgtttaaaaagcctgaagagaaaaaggaatacatgacatggaatcagattcaggaactctataaacaagactttgaaattgggaatcatacaggacatcacaaaaatgtcacaaaattaagtcccgaagatatcaacaaagaaatcgcttacgtagaagaaaaatgcgctgaatttaaaattcctaaacctatttcatttgcttatccaggcaatcgttatgataccatttcacaaggaattttaaaaaaacggggttataaatatgcaagggcaggaggaagtaccttgtacgatatcgcagaagattccagactggcgattccgagctacactgtggcctcaaccgataagcttgaggtacgggttaaaactgctttacaaaatctaaaacaaggagatataatcgtattgacttttcacggtgtccctgacgttgtgcatcctgattattctacttcagtagagtttttagaagaactgctgcagtacataaaagaaaaagattttcaggttgtggcgatgagaaatattctgactgaataaaatattaagaagaacataaaaaaagtcccaccgaagcaggactaaagattttcatctacggcatatagccttattgtgataagattaaagattagaaattttaatcagttgtaaatgtatgttaaaaagaattataacgcaatgaggaaaaccgtaatagtgttaattttttttatattaaatttcaggcggattaaattttaagagatatggcaaaaattttaggattagatttaggtacgaactcgattgggtgggcggttgtagatgatatggataaaaaaataattgattcaggagtgcggattttccctgaaggagttgttgcaaaaactattggtactggagataaagaagaaagcaaaaacgcaagtaggcgaaatagccgtcaacagcgacgtggtttttatcgtaaaaggttaaggaaaataaaattactgagaactcttattaatcttgatatgtgcccccttaaaaacgaggaacttgatatttggagtaaatgggataagcagaaaaagaaagaaggcagaatggctccagaaattcatttacctgaaagtcattcttattgtttgtggttgaaacaaaatccttatttgttaagagataaatcattaaatgaagatttaactctacaagagtttggcaggattttatatcatttaatacaaagaagaggttttttaagtaatagaaaagggaaagatgatggaaagatttataaagggaaagatggtgtaaaaggtattgaggaaactcaaaaagaattacaaaattcaacattaggaaaatatttgttcaatattttgccaaaagatggagaaccttttaagttaattcaggatgaaaatggtaatgaattgcgagttcggtctagatatactttgcgcgatatgtatgtagcagaatttgaagcaatttggaatagacaggcttgcaatttaggtcttgaaaccattaagtgctcaaatgagaaaaaagttttgttaaaaggcggtttgaaaagcaaaagaaataatagtaaaatagaacatctaaaaaagataaaaggagaagagaatattgaagtaattgagttaaatgataaattgtcaaaaaatgataagcagaaatatttgcttaaaattaaaacaaaactttctttaaaagaatttttggcgggtagaatagacaaagatgaggagggagttgtgaaattcaagagtaatgaaagtgttttgttttggcaaagagctttacgttcacaaaaaggacttcttgctaaatgtagatttgaacctgatttgaaagatgaaaatggtaagtttatacaaaagggtaaaactccctgtcacatatcacatcctttatatgaagagtatcgtgcattacaatatatcaataacattgaatatggtaagaaacaacgattggaagaatcacagcgattgcaagtgttggaactaataaattctaaagacaagaaatttgattttatagagataaaaaagaaattgaaattggaatatgaaacttttaattatgaagacgactcactagttgttggtaattatacaacaaaatatctgaatgctttattcccaaaatcgatacttgaaaaagaatttttaataatagtaaataaggaagagaaattagaatatggctatgagcgtatttggcatttatttcatttttgtgaagacaatgataagttaatctgtagtttagaaaaactgattaaagagacaaaaatagattatattttaaataaagcaataattgaaaaaatagaaaaagtaaatttaaaagaagactattcaagtgtttctctgaaagctataaaaaacattttgccctatctaaaaaagggattgcgtttaagtgatgctgtcatattagcaggtgtcagaaatgcttttggtaaaaaatgggaattatataaaaatgaccatattgaattagagaaagatttattgaaaataaatcacgaaaaatccaataaagaaggagaagcaattgagaaaataaaagtatatctaattgaaaacaaatatggctttgtcgaagaggatgttcgatttaaaaaattgtatcaccatagccaagagattattcaagtaaaacaaaaagataaaattgataccgttcaaaatttaaggaatccaattgtgcaacaaggagtaaatgaaactaaacgtattgtaaatgaattgattgctcaaaaaggaaagtttgatcaaattaggattgaacttggacgtgatttaaagaatagtaaaacgaaaagagaagaattaggttataaaattagagaaaatgataagaaaaatgaaaaggcaaaggaattattgatagaatttggtttgcgacaaagcagagagaatatccaaaaagtgttattgtatcaagaaatgccgatttctatttgtccttatactaacaaaacgataaatattaatgatttacttggtaggggaaataaatttcagatagaacatatcattccaaaatcaatttctttagacgatagttttgcaaataaaacattgtgtgattcaaaatttaatggtttaaaaggaaatagaacccctcacgatttttatgaaattaacaaagatccaaatctttggggaggtgcgaaatcatgggaagaaattgaacgacgtgtttttaaggttttgccctatccaaaagcaaagcgatttgtgtcgaaaacaaaatttgaaaccaacgattttattcaacgacaattaaatgacactcgttatataagtaaaaaaacgagcgaaattttatctcaagtttgttccgatgttcgtgtgatgccaggaagtttaaccgccgaattgcgtcgactttgggggttgaataatattttacaacccattattacagtagatattccaaatttacatattgaagagaataaacatataccgcactatgttgttttagacaatgataaaaagcctgttttgtcacaacgaatttattatgacagaccaacaactaataaaaatgaaacacttttatctggaaatatcgataagggagtttttaaatcgaaggaacagtatgttaaatttcaggttgatgcaccagatttagaaaatggcgattattgggcaaagttagttttgtctaggcccaaaaatattgtacaagtatttaaagacaagccaagtactttagaaaatgaaattgttttaaggggtaagattgaaagagataaattcaaaaatgatggattgaatgctataaatgcgactggcaaggaaaatggaatttattgggcaacatttactattgaaaaaaaagaatttaaaaaacctgctaaagaagagcaacccaagaaaaatggaaagcaaatacttctatttggggaagtaaaagacggtcttttctcctcgtatatttatgaatgcgaaacagaaattgaagatggaaagtattggcttatcatagatgtggattttgaaaaggttgattttgaaaaagccttaaacgaaagacctttagttagagaaaatcaaatattgattcaaggaactacaaatgatgaaaatatatttgtttctgatatggataatcaacatcattttgaaatggaagaaggcaaagggaaatattatgttttgtttgacatcgtttctgaagtaactgaattttcacctgttaaaaccgctaaaccagttcttgaagaaggacaaacaatagttgaaggtacaacttggattgataaatatacgggcgaaataaaatttgacccaatcaaaaaccgagaagatcatcgccatcacgccattgatgctttagttattgccttaacgaaagaatcttttttccaacggttgagcaaacaaaacgcttcaactgaaaacaaaaaaagagggaatgaacacgaaaaagaacatttagattttccggaaccttggaatggttttcataacgatgccaaaaatgtcataaatggtatcctgatttcccacaagcaaaacaaaaacatcttaacaaaaatcaccaagaaaattactaaaaatggacaaacgtttaaaagtgagggtatggcagtaagagggcaattgcacgaaactactttttatggaaagaatttacattgtaaagagaaggaaatcatacagcgtttaccaatttcaaagttgaaatttgcgccagcaaaaggaggtggagcaagtatttatgatataattgatgataatattagaaaattaattatttcaagtgttacaaattctttcaaacaaattcttcaaaaatataatgatgtaagtacaacctttgaggaaattaaagagttaaagaaaaaatataataaaggtaaaattgatgaagccatagaaaaactaggtgtaattgaaaaaatggaaacagattcgaatagattacaaaaaaaatcagaaattgataaaaatcagaaagaaataaataggattaaatcaacaataagcgaaacaattgaaagttttctaaaagatgagacgttttatttgccaaatgaaggaaaaagattcaaacggctaaataaaattgacgttggcaaagaaagaaatcctgttccaataaaaaaagtacgaataaaaaaagtaatgaaaaatgcagaaacaataaatcaaaaaattggacagtatgtaaaccctggaaacaatcatcatatattaatctataaagacgaaaatgaggagttgaaagatgatattactaatttttggaaagttgtggaaagagtaaaacaaaaagatgaaatctataaactacctgaaatagaaattgataaaccagcccctaaagaacttatattaacttttcaggaaaacgatatgtttttgttagggatttctaatgatgagtacaatgacaataaactagaccatacttttttaagtaattatttgtatcgggttcagaaaatttcagatggagattattcgtttaggcaccatattgcatcaacagttacaaataaaatggaggagattagaataacaagtatgaaaaagtatcacgagatgaatccaataaaagtagaaatttctgtcttaggaaaaatttcaaaaatgtaatctcattttaaaatttcggtgcaaatttacaccaatctatattacttgttatattagcgacgatttagttgagattgttacaatgattaggagacaggatcattaaaagttcattgacataagcttttcaaatgcttaaaccttttaaaccagaactgaaaggtatcgcatccgcccagcagggatacagcagctttaagttgtggtttgattaaagattagaaaacacgatatgtgcaatcgaaaactcagttcaaaaggactggttgtggtttgattaaagattagaaaacacgatatgtcgcctgttgctacatagtgtatgtcgtatgttgtggtttgattaaagattagaaaacacgatatggatagcgtttagctttctgtcaacaataccgttgtggtttgattaaagattagaaaacacgatatctttcataatcctttcttcgaatcaattttagttgtggtttgattaaagattagaaaacacgatatcttttttatggttttaaaaccaagcgtacaagttgtggtttgattaaagattagaaaacacgatatcaagtaaaaaagaaggttggatatcaaccgagttgtggtttgattaaagattagaaaacacgatatcttaatgaattcaactgtttctaactgataagttgtggtttgattaaagattagaaaacacgatatcttcttgcttcacgccctttgttattgttttgttgtggtttgattaaagattagaaaacacgatatccaattacgcaaactggtagagatacgatcgttgtggtttgattaaagattagaaaacacgatatcattgcttctacgaacgatgttccagaaggagttgtggtttgattaaagattagaaaacacgatatcgaatataccaataaaggacttggtttggtagttgtggtttgattaaagattagaaaacacgatatcttttttcctatttctaatttgttcatttgtgttgtggtttgattaaagattagaaaacacgatatcaaaatcgccgagcttgctttagggtttggcgttgtggtttgattaaagattagaaaacacgatatctctaagagttggaaaaataagaccttcacggttgtggtttgattaaagattagaaaacacgatatctcccggagttccaaaatgtacgcctcggcggttgtggtttgattaaagattagaaaacacgatatcttgttagggcatttggttataaaacctaccgttgtggtttgattaaagattagaaaacacgatatcttcgtcggcacaaagccacggcccatcctggttgtggtttgattaaagattagaaaacacgatatccgtctgtaaagaacacgtgagctatatcccgttgtggtttgattaaagattagaaaacacgatatctttcacatcttcgagaaactcggatatttcgttgtggtttgattaaagattagaaaacacgatatcctcctgatccaccaaggccttgcgttgctcgttgtggtttgattaaagattagaaaacacgatatccgtctcggtcggttcatacttgccgtgatagttgtggtttgattaaagattagaaaacacgatatcaccgaggggacaacgtgggaccgcaaaggcgttgtggtttgattaaagattagaaaacacgatatcagcgatgacgtcgaatggatgacagaattagttgtggtttgattaaagattagaaaacacgatatcttcattaattgcatttgtgttattgctgttgttgtggtttgattaaagattagaaaacacgatatctcggggggagatattaacgctaaaggttatgttgtggtttgattaaagattagaaaacacgatatcaggtggttttggtgatataattatgaatccgttgtggtttgattaaagattagaaaacacgatatcaataaattccctgtgtcaatcgtcgttagcgttgtggtttgattaaagattagaaaacacgatatcttgaccccaagacaggattaaaagccccttgttgtggtttgattaaagattagaaaacacgatatcgaatgtcgttaacatcacgggttaaatagcgttgtggtttgattaaagattagaaaacacgatatcgcggccgttttctttttatcctgtagctctgttgtggtttgattaaagattagaaaacacgatatctttcacatcttcgagaaactcggatatttcgttgtggtttgattaaagattagaaaacacgatatcgacccggttacgggggcttatcctttagcggttgtggtttgattaaagattagaaaacacgatatcgcaattacgcaaactggtagagatacaattgttgtggtttgattaaagattagaaaacacgatatcgcgtcgaaaatgtatttttaaacattagccgttgtggtttgattaaagattagaaaacacgatatcgtagtaattacaactcctattatgacgtacgttgtggtttgattaaagattagaaaacacgatatcttagctggtcgcgaatctcttttagctcctgttgtggtttgattaaagattagaaaacacgatatctcgcctaatattgaaaagtaggtaccggttgttgtggtttgattaaagattagaaaacacgatatcgtttcgaaacctcataaaactgagatctgagttgtggtttgattaaagattagaaaacacgatatcttaacgttcgctttccctaccgccgtttctgttgtggtttgattaaagattagaaaacacgatatcggggcataacggatgtgtttctgtccggttgttgtggtttgattaaagattagaaaacacgatatcagagcggggaaaataatgagctatctaaatgttgtggtttgattaaagattagaaaacacgatatcaaaacaatataatttgtatggtgatttattgttgtggtttgattaaagattagaaaacacgatatctcgttgaaaagcggagcgaacaggtcaatggttgtggtttgattaaagattagaaaacacgatatcaaaatgacgttcaatagcagaacgtttaacgttgtggtttgattaaagattagaaaacacgatatcaaaagaaaaggaagcacaataacaacaatagttgtggtttgattaaagattagaaaacacgatatcaaaatgacgttcaatagcagaacgtttaacgttgtggtttgattaaagattagaaaacacgatatcaaacatcctcagcccatttaatcaaaaactgttgtggtttgattaaagattagaaaacacgatatcacgcagtagccgttaagaaaatagataagggttgtggtttgattaaagattagaaaacacgatatcattagggctttaccctctgcgctcttacccgttgtggtttgattaaagattagaaaacacgatatcaaaatgacattcaatagcaggacgtttaatgttgtggtttgattaaagattagaaaacacgatatctccgagaaagatggagaaaaaggacgggagttgtggtttgattaaagattagaaaacacgatatcggtcgtaggtcattgtcatctgtaacgcctgttgtggtttgattaaagattagaaaacacgatatctcaaacgtagggatttatgggcctaacggtgttgtggtttgattaaagattagaaaacacgatatctggtttaggattgaccgacgtgcacatgtgttgtggtttgattaaagattagaaaacacgatatctacttaaacataagaggattaggacaggcagttgtggtttgattaaagattagaaaacacgatatcttgtcatagctaaggtactacaacaaccccgttgtggtttgattaaagattagaaaacacgatatcccacgacccccataaacttggtagtatctggttgtggtttgattaaagattagaaaacacgatatcttcgagccgccgtaggctatatcgttaaccgttgtggtttgattaaagattagaaaacacgatatccgctggtaacgtcgagcttatcgccgtattgttgtggtttgattaaagattagaaaacacgatatcgttcctcattcttgttgggcatataagatcgttgtggtttgattaaagattagaaaacacgatatcgccgcagcgagcgccattttcggcgaaagtgttgtggtttgattaaagattagaaaacacgatatcggggcataacggatgtgtttctgtccagttgttgtggtttgattaaagattagaaaacacgatatcacatcgacgcaaaaagcgcagatcgtacaagttgtggtttgattaaagattagaaaacacgatatctttcacatcttcgagaaactcggatattccgttgtggtttgattaaagattagaaaacacgatatctgtcgttctcgtctaccagcgtaggcgatcgttgtggtttgattaaagattagaaaacacgatatcgatacgctgcacaaagccagaccacgtgaagttgtggtttgattaaagattagaaaacacgatatcagttggcttgtttccttctgataatcatggaattaaattgaattatcgtgtaaaaaaatgcttcttttttggattgataacccaggattgaagcatttttttatttgtaataatttgtgattcagtatttttatgatgaaaaatttgattggttttgagaaggggcaggtcgcgacctgcctgtacagatatgcatgtttgttgaatgtccgtgcagatgcaattataaattgattgataatgaaaaatagaaaaagaaacagaatgcagggattcgattattccagcgataatttatatttcgtcacgatatgtgttcaggatagaatatgttgttttggatacgtggggacggtagggacaggtcgcgacctgtccgtacatcattccaatgaaaatcattccaatgaaaatcattccaatgaaaatcattccaatgaaaatcattccaatgaaaatatcattccaatgaaaatcattccaatgaaaatcattccaatgaaaatcattccaatgaaaatcattccaatgaaaatgatttgggagatgtaaaaatgaatttgaatgaatttggagaaatcgtaaagaagcaaattgaatggctgaccgagcaatataaatatgttgaaattcataattatgtcgtgatgcctaatcatgttcatatgattattgaaattgatagaaataaattaatggtagggacagaagggacagctcgcgagctgtccgtacaggcgcagggcgaagaaatcaaaataaaatcagtatcgagtttaatgggagcgttaaaaacaacatcgtcaaagttgattcatcggtctggttttgaagatttttcctggcagcgttcttttcatgatcatattattcgaaacgagaagtcatatcaaaacattagcaattatattgatttgaatcctgaaaaatggaaatcagacactttttttaattgttaaaacagttccaattgtgtaggctgaggtgctgaagggacttctgctttgccccagaaattttgaatgttgccaaattgtttatcggtaattcttaaaacactaacttttccaagcgggggaagcagtttgtgaattcgtttttcatgaacgtcggcactttcgctgctggcacaatgacggacataaaccgaatactgcatcatcgaaaatccatccttcagcaaattatttcggaatccggatgcatttcgtcggtctttttttgtttctgtaggcagatcaaaaaaaacaaacagccacattattcgatatccgttaagctccacaatgcgggatatttaattttttttcgatttcctgaaaagcattgctgtaaagagcttgcggttttttgcagagctatcattaagggacttttttcgtctttaaaataaacggttcgggttagtatctgcagtaattcagccttaatagccgtgtttaattcctgctcgtcaaaacattgcattatttcaaaaactttttcatcaacaacaggacgaaaaggttccataatatcatccgctaatgcaaaagcattgtatttgcttttatgatggattcctaatgtatttaataaaccacttcccgacaaagctcttgcagttgctgctcttaaaatagcataaccgtaattaagaaagttattagggtagtctccgtatctttctctcttgattccgttcatttccatatttggctgaggaaaatatttccagtattgctgcgcagctactccttccatattagtcgaatcgccgctcaggactttgccggcaagaaaggcaaagctgttttttgaatgagtaattttctccagtaactgtccctgatttttaattttttcagttatggtctgctgccataattgtttttttaaaggaagtgaagcttcaatctggtttttaaatatctcctgctgaatatgatggctgttgaggtttagaagcattccgttgggaagatgattctttccgcaaataataacagatgtattgttttcaataagaagattcattgccggaatactcaagtagatttcattgtggtcaaggacaagaaatccaatgtcctctattggaattgtactttctttagtttcagactttaataccagctgattgtatttggtcgttaaggaaaacttgttttcaataaaaatagttcttttaagcataaccttaattttatagtttgcttaaagttcggtttttaaataaaattcattttacggttttccttatttttgaagtatcgattcagaagatacatttgattataaagatttaattggaataaaaacctgaaggctgaataacgactggtgtaatccctgcattcagatcaactcctacagggtgtaaacgtcctgaaagattgatggctgagaaattcaggttttttaaaaaagtcctcactgtgtgtttggaaccggtatggtttgcaatataaaagatctcgtcttttttttctttcagatcgtctttttttgattcaagtctgacagggtggaaaagttttacaacatgggcggatggaagcagtgatgcggtaatttgataagtaagggcattagatattcctgataaaagggattgcggattaaatataagaccactggtatataatattattttgccgctcatatcaggcagatttcgaatcacagattccagattatctttaggaacgaagaaaataatgatatctgccgatgcagtttcacacaatggtcccagttttatatttgaaccaattttggcaatagtatctctcacaaggctattacctctaggattgtttaccataacttcatatcctgccagtgccgatctgcgggctaattctaatgtgagggatccaattcctatgattccaattttcataacatttgttttggttagtattgagattagataagataagataggtgtcgaatgcagtttgtttttagtatttgtttattattaaaaatgtgttagttaaattactgaaatttcaggaaatgatagcaggtagatttacctgttttttatttttttgaagaggttggggtaaaaaaagcaatataaaaacttctgaatatcctgactcttagttttaaagtgatttttaaagaagtcctgagtttttgaaattgcctaaaaatcagaataattctaactgattgtttggtgggatagatttgtttttaggaggcttagcatttccaaaaacggttttgcctccatatttataagattcatccctttctttttggatgagcgcatcaagattgtcattaggagtaaaactttcttctgcttttctggaaatttctgaaagtttacgtatcgcttctattttgtcgttgttgccaatttttgctcgatgaatagctctttgcagagtatcaatagtttcatcgtaaatttttacaggtacgggaaacggatgtccgtcttttccgccatgggcaaacgaaaaacgggcagggtcatcaaatctggtaggagttccgtaaataatttcgcttaccagtgccagggactgtagtgctcttggtcccataccttttaagagtaaaagttcttcaaaatcttcgggtctgttttcatgagtggtccacaacatcgcaccaagtcttttcatatttacatcttcaactcttatgtcatgatgtgccgacatagaaaggtactgtatttctttcataatttttgtcggagactctttagacagttctaaaattcctgctcttgatttttcggcagttccggctgtgaggttcagaatcgtaccctgattctctccatatataaaagtatgtggttcgttaataaaagattttaaatcctgagaatgccaatgatatcttcttgcagttttagaataaggattcatgccttgctggatgactgcccattgtcctctattgtccacaataaaattatgctggtacaattgaaacccgtcctgaatagcagtattatcaactttggccgtaagcctgctgcaatttgcgagactatttccgtcgagtcctgtgcgctcacctacatacaagagttcttgaggcgttttcatagaatgagtacccttacctccgcagatataaatgccaagttctttagaatgtggattgacagactttttcaaagctccaagaacagaagtagtaatacctgaggaatgccagtccatacccatcacagcaccaaagctttggaaccaaaacgggttgcttagtttactgatgacttcagacgtcgaaaactccattgctatagtttctacaatagccagccctaactttgacatacgttcagcaagccataaagggacatggccataatgaagcggaagatcagctgtaccggaacgtttcatgaggtaaatttaaaagtatacaaaattagccgattactgatatattgtgtgttaataaaagcagaaatggctttatcttaaaaaacgatgtattgtgtctataatgtttttgttaaaggaagggtaaatttaaaagaactcccttttcctaattcgctttctacccaaattttgcctttatgtttatttacaaattccttacaaagtaataatcccaatccacttcctgtttcattttcggttcctttttgtatggactttcggtttattttaaacagtgtttctttgatattatcaggaactccggttccgttatcagtgattgctatttctgctttttgatctgtttttgatagtctaattttaatttcgccgtttttatcggtaaatttaattgcattgctcagtaaatttcgtaaaacggtatcaatcatatttttgtctgcctctgcttcaataagatcagccggttcaaatacaatgcttatatttttatttgacgccgaatttctgctgagttcaatattttcctcaatcaaattgtttagtaatatattttttggagagaatgttatcattccggtttgcatttgcgaccattctaataagttttccagcaatttgtaaatatttttatttgaatcgtgcagtgtttctgaaatttccctgatttcttcacgattgtattcttctatattttcaattaaaacttcagagagagaaacagatgatcctaatggtccccttaaatcatgggcgataatagaaaaaaactggtttttatcgtttaaaagtttctgaattttatggtcttgtttttcttttaccaacaataaaaaaccaacaatcccaatcagacttaccatgaataaaccaatacagtacaaactatccagtaaattgtcggaaaagacctgctcttgcggataaagatatcggtaaacggttcgtattataattaggatttcaaatgcgacataacaaaggacataaaaggttttgaagaaacttttcttcttttcgataaaataactgattgtggccg

SEQ ID NO: 1012 - DNA, 24767 bp, synthetic construct
  misc_feature 1..24767: note = Synthetic
  source 1..24767: mol_type = other DNA
atcgaagacatgttagccaatacaagagaacttgatggccaatctgataaaaaaaaccaacaagattttgccttatggaaacgggccgaacccgaacacatcatgaggtggccttcgccttggagcgatggttttccaggttggcatctagagtgtactgccatgagtaccaaatatttaggcactcattttgacattcacggcggcggaatggatttaaaatttccgcatcacgaatgtgaaattgctcaaaatcaagctgcaacaggccatacaccagtcaattattggatgcatgccaatatgctgactttaaatggtaaaaaaatggctaaatcaacaggtaataatatattacctggcgaaatacttacaggagaaaatccttttttaagtaaagcttttcctgctacggtcgctcgtttttttatgttgcaagcccattatcgtagcaatttagatttttcaaacgaggccattttggcagccgaaaaaggatttaatcgattgatggaagcattacatttgctaaaagatattcaaccgcaaaaacaaacctctatcgatttaaaaacttggaaatcaaattgttatgaggctatgaacgacgattttaatgccccaattttaatagcaaatctatttgaggctgtaaaatatatcaatttgctcaacgacaaaaaagaaacaattcatgcagacgatttagccgattttacaaaaacgttacatgcctttgtttttgatgttttaggactcgaagacacaaaagcaagtaccaatcaaagtaacaaacttgaaaatgtggttcaaatactcatcgaaatgagaaaagaagcccgagacaataaagattttgctttgtctgatcaaatcagaaaccaattgttagccataggtatccaacttaaagacggtaaagaaggcacaacttttagtgtttaaaaataattttgatgaatgtaacaaaaccttttatttttctagttcggttctatcaagtggccatttcgccatttactccagcctcttgccggtttgaaccaacttgttctacttatatgattcaatccctgcaaaagcatggattaataaaagggggatattatggtatcaaaagaattttgagttgtaatccttggggaaagtcaggatatgatccaataaaataataaattaaaaaataatattaataatgaatatagcttttagtatagtttggaatccttctgaaggaatagatttgggtttttttatgattaggttttacagtttgatgtttgtcgtggcctttggattaggctggtggatcatgaaaaaaatatttgatagagaaaacgaatctattgataaactggatagcttatttgtatggacagtagttgctactttgcttggggcaagactaggtcatgttattttttatcagccagaattatttttagacgatcctttaagtattttattaccaataagaacgcaacccgattttaaatttactggatatgcaggacttgcaagtcatggagctgctatttctattataattatgatgtatttttttagcaaaaaaatcatgaaaaaatctgttttatgggttttggatagggtagttattccagtagcaagtggtgctatttttgtaagacttggaaatttctttaattcagaaatttatggaaaaccaacagatggtaatcatttttatgctataaaatttgtaagagaagaagaattttggcaaaaccataatttgatggaaatgactcaagcacaatcagaaaatgaggcctataatgtaattgccaataactcaaaatttactgaagttttaaatgaaatacctttcagacatccatctcaattatacgaatcttttgcttatatttttgtgttttttatattatattttctttattggaaaacagatgcacgcaaaaaagagggatttttgtttggtatgtttttaatcacactttggcccattcgatttgttgtagagtttgtaaaagccagtcaaggtggttttgaaaatactttaggtcatttttcaacaggacaatggttaagtattccttttattattttaggtttggtgtatgtatttagaaataatacaaaaaaagatgaaatatattaatacaatatggaaataattatcagaaatgcagttgaaaatgatttagaggccattttgaaaattgtcaatcatgctattttacatactacttcaaattattcttatgatattcaaactttagctgatcaaaaaaaatggtttatcgataaaaaagataaagggttacctattttggttgccgaatttcaaaatcaagtgcttggttttgcaacttatggaagttttagagaaaaaataggctaccaatataccatagaacattcggtttatgtaatagatgattatataggaaaaggtattggtaagttattattatcaaaattaatttatcttgcaaaaaaacaaggatatcattgcatgattggggctatcgatgcaacaaaccaaaatagtattcaatttcatcaaaaatttggattccaaatatcaggtcatatcaaagaagtaggttttaaatttaaccaatggctggatttggttttgatgcaattaattttacaataacgcttctttaaacactttcaaacattttgctctggcttcttgatggtttacaataggctttgggtaatttaattcttgatattctggaacccatttttgaatatatttacaatttgcatcaaattttttggtttgctccattgggttaaatattctaaaatagggtgcagcatctacaccacaacctgctgcccattgccaatttccaacattgcttgattgctcataatctaataattttgatgcaaaataggcttctccccatctccaatctataagtaaatgtttgcataaaaaacttgcaactatcattctaactctattatgtaggtatcctgtagcgtttaactcacgcatgcctgcatccacaatagggtaacctgtttgtcctatacaccatttttcaaaatacatttcattgttgtcccatggtatgttttcatattttggtctaaaacataagtgggttgtgtgtggataatgccaaataacattcataaaaaattccctccaaattaattcatttagataagtttcattttcaatatcaatgatatttctaataatttctcttatagatatagttccaaaccgtaggtgaggcgctgcattggaagttttagcaagatatggaaaatttctattcaattcatagttttcaatcaattcgtggccaatagcaataggtaaaactttctgcaatgatttttgaaatccaattttttctaatgataaaaaagggtaggagtgaggttgtaaatgttgcaaataatcttctgaatatgctacattgattaaatttttatggaatttctgtttccatttttttgaatatggagtaaaaacaacatacgggctgccatcttctttgacaatttcatttttttcaaaaatgacctgatctttataagcttttaatggaatttgatgttcttgtaataaatagtaaatttttttatctcgttctcgagcagcaggttcataatctttgtttatatatactgatgtaataatattatttgtaattaattctttccatatttcaatagggtcaccataaaaagtagcaatagaactattgtatttttggaattcatcattcattttttgtaatgaatcatgtataaaatcaacccttgcatcatttttttcgagttgttgcaaaatgttatgatcaaaaataaatatcggcaaaacggattggttttcttgtaacgcatgatacaatccaacattatctgtccatcttaaatcccttctaaaccaaaatattgtcatattattttattttaattcgccaaacatgcttgttaaagtcgtttttctaaattcaaaaatctccttaagtttaggtgctactaatatgggatgtatcatttgtcctacaatacctaatggtaatttgtaatctacaatatcttccatttctattcctcctggaattgctttgaaaaaatgtttatgatgccataatgaataaggaccaaatcgttgttcatctacaaaataatgtttatcatctacctgagtaatttctgtaacccattttgtaggtattcctgctatgggggttacaatatattgaataatttgtcctgcaaacatgggtttgtcatcgcctgaaagggttttgaaacccatatatggaggcgttattttttttaaattggctggatttgaaaaaaactcccaagcttgatctaaactaatgggaagtttttgtttggtttctaatctgtatattttcatggttacttttattgtgtcaaaaatgattaaaatgaatttaagaatctatttttggtgtaaaagtaataaaaatgtttaattaaaacacaaaaagattaaacaatatatttttttttaaacatcatgcttttcagatggcaactcaaaaatttctaaattaaaatagggcacggcagcaataaagtggtcgaataaatcagatacgatatattcataattttcccattttttatcttttgaaaaagcatatatttcaagcggaattccatgttgtgtgggttgtaattgtctgcaaaccaaaaacatatcttgattgattgcggcatgtctttctaaatattttgttatataaactctaaataaacccaaattagtaagatttcttccgtttactaatacgtctttattaatttgatgattcgcattatagatgtcaatttctgattgtttttgggaaatataatgatgaatcaattgaatttttgataaattttcgatttctatgtctgataaaaaatgaacactatgcgatttaatcaataaaaaacgttttatcctccttccagatgaattttgcatccctcgccagtttttaaatgaatctgatatcaaactatatgtaggaatagttgtagtagtcaaatcaaaattacgaacttttaccgtagctaaattgatttcaatcacatcgccatctgcaccaaatttgtcgaatgttacccaatcgccaatgcgaaccatatcatttaatgacacctgaacactagctacaaaacccaaaatagtatctctaaaaatcaataatataacagcagaaacagctccaaaagctgtaaataaagtatttgtttttatttcaaataattctaatataattacaaataatcctatcatccaaagaatgatcataaatacttgaatataactgtctatgggtttatcgctatattggggtattaattttaaataatctcttaatgcattgaatatggttctgatgatccataaggtaagcaaaacaatataaatacctataaatttaccaaaaaaaccttcccaatatacataatcatttaaaattataggaactgatttataaataaataaaagtggtattaaataggaaatgtattttgctgttttgtttgcaattaaaaaatcatcaaactttgagtgggttctttgtgcaattattgctaaaacacttactaaaataaacctaaaaattttataaattagataggcaaacaaccataaaataatgatattcactatcaaactactataagatgcaaccgtatcatgccatcctatttttttgaaaagcggataacaccacccaaatattttgtttataaatttaagcattttttaaatatttattttcaatataaaatgttccaaacggtacaaaagaagccaaacatactatcgaaaatattttaaatgaccaattttgtttgtattttactataactgcaagcaaaatataagcaataaacaaaataccatgtgccatacctataggcctaatataggcatcgttttgaaaaaaacgtctcatgggcatagcaaagaaaaacaaggcaagcaacgacaacccttctaaaatagcaatgtatttaaataattttaacatagttttttttttgggtacaaaattaataatttgcaaacaactcggctgctaaatagctgttttttatgaattatttaataattgattcctaaacagcaaaatcgactttgaatgtaataatttaatattatatttatcaattttattttaaaataaaaataataatactatattgagtataattcatcaataattaaataaaattaaaatttatattgataatagttcaataaaataatatatatacataaatttaacattatttataaaatttattgattttacatctgctttaaatcactttttttaaattattatcaaataataggttttttaaacgtacttttgcaaaaatcaatttttatcaaatgtcatacccattagttgaagccgaattagacgaaaaaaaagttttatatgattatcaagaatacgatattgatgccatttttgaaagaatagacaaccaaaaaagcaattttcatttgctgtaccaattgcctacgggtggtggtaaaacagtcgttttttctgaaatagttagaaggtatattaaaaaaaataataaaaaagtagtaattttaactcatagaattgagctttgcaaacaaacttcaaaaatgctcaagggttttggtgtaaaaaataaaattgtaaacagcaaaatcaaagatttgccagaccagcatgaatattcttgttttgtagccatggtagaaaccttaaaaaataggttaaatgatgaaaaattattgatagatgatgtaggtttattaataattgacgaagctcattataattcttttagaaaattatttagttcttttgaaaattcttttattcttggcgttacggccactcctttaagttccaatgttgggcttccaatgcacgaaaattatgatgaattaatcgtaggagataccatacaaaacttgatagataatggctttttagcaaaagctactacctatagttatgatgttggacttacttcattaaaagtaggtataaatggcgattatacagtaaaatcgtcagacgatttatatactaatatggcaatgcaagaaaaattattgcacgcttacgccgagaaatctttaggcaaaaaaacattaattttcaacaacggtatcaacacctcgctatatgtttatgaaacttttagagaagcaggctatgacattagacatttagataataccaatagtaacgaagaacgtaaagaaattttgcattggtttaaaaaaacgccacatgctattcttacttctgttggaattttgacaacaggttttgacgaacctaccgtagagaccatcatcctaaatagggctacaaaatcattaacgttatattaccaaatgatagggcgagggtctcgtcgattgcccaacaaagacagttttacggtaatcgatttgggtaacaatgctgcccgatttggtttgtggaacgagcccatcaattggcaacatatttttaaatcgccagagttttacctcgaaaatctaagagacgatgccgaaattgaaatgaattttaaatatgtaatgcctgatgaattacgtcaaaaattcagtaaaactcccgatgttacttttgatgtggacgacgaacacaaattggccatcaagttcaatttgcgttcaaaaattgtactcgaaaaatcgctcgaccagcatgcggccatgtgtgtagataataccgaaacacttcaagaagcccgtgcattagccaaagaattattagcagatatagaaagtagaataaaaaaatattcaaattgtttgagtcaatgtagtaaaaattatagagaatggctagtcgatgattatattaaaaacctcaatttattgatagggaagaagtatcgtgaaaaaattatgaacgaaccagattaattttttagggagcttgatcccgcttttcgttacaatcttttgtggcgaaccccgccacaaaaggattttcactacaatcggggctagattcattttcaaaagtaacgctttcttaaaacaatattttcatgtcaaattttatcgatttaggtttaataattgcttttgttgaaacgcttaaaagtctgaatatcaatacaccaactgaaattcaacaacaagttattccacaaattctacaagcacaacatgatgtagtaggcatagcacacacaggtcacggaaaaacagttgcttttggtgtacccattttgcaacaaatagacgtgcaaaaccttcatgttcaagctgttatattagcaccaaccagagaactaggacaacaaataacgcaccaactacaacaatttgctcaacatcattcgtcaatcaacattttggctacttgtggaggcaatccaataaaaccacaaattgcggccttgcaaaataacccccaaattgtggtagctacgccaggtcgattgctagatttactcgaacaaaaggtactcaacttgcaacacgtgcaatttgtagttttggatgaagcagacgaaatgatggccatattacacgacagtttgacaaaaatcgaacaatatttgcccaaaaataaacgacagttcttgtttacagcaacatattcggggggattaaaacagttggtacaacaaaatttttcaaaaaatactgctattatcacatcggttgtaggtacaaaaaccaatacaaacatcaaacaccattatgtaatagtagatccaatagaaaaattagcagtattattacatttattaaattcaaaaccaaatcaaaaaggaattattttttgtaaaacaaaagcagctgtcaataaattagccaaaaatttagccatcaaaaagtttacctcgggtgccattcacagtagtttgacacagcctataagagacaaaatgatgtcgcaatttagagcaggacatattcctattttagtagccacagacttggccgcacgtggtatcgatatagatgacattcaatatattgtaaattatcacttaccagatacgttagaaacatacattcaccgcagtggcagaagtgcccgaaatactcacaaaggcttggtttacaacatcatacaagaagaggaattagcccaattgcaaactattgaaaaagcgattgagttgcccattttaaaatatgaaaaacctgacaataaaagtattgaagataataatacgatgatatgggccaaacaaatttataaaaccaaacccaatcatcaaatatctaatgaattgaaaaacgacattaaagcaatttttcatcatttaacaaaagatgaattgattgataaaattctggccaatcacttgcaacaaaacgctaaaaagtaaccaatatctaagccaatatgctccttttttggttcttattatttgaactataattaatattatgtaaaatagaaaattacaattattcattttgcctaacgcatgcctttcacatgatacagagcattgttacagatttattttaaaatatagttaaaaaataaatacaattttataaagcaagtattataaataaaaaaatgttttattgaaaaatttgcatctcacaacttgatttttcagatgatttcaattataaatataatagtaaatttatatttacctaaatcaaacttatttgattccatttttttatcaggaattcatttgcaaatgtgaaatgagtctataatatcgaatttatttatcttttatatttgaatttaatatttagctgtattttacaaaagtataaagcaattgattaggggcttttttttataagaaatggataaaaaaacagttgaaacaaggtaaaaataacacaataaacgttccaaaaaagctgccccccctcctactcttttagtggtattttattacaaaaaaaagtcccaccgaagcaggactaaagattttacatctacggcatatagccttattgtgataagattaaagattagaaatattaatcatgctgcaaatatataaaacatttttaaatgtatatagcgaaaaaactttttttttaaaatattttttccaatatatttacaaaaaatttgaaaacacaaaaatggcaaaaatattaggattagatttaggcacaaacagcattggctgggcggtggtggatgacacaaaaaacaaaattattgacgctggagtaagaatttttccagaaggtgtgaaatcagataccatcggaaaaggagataaggaggaaagcaaaaacgctaagcgaagaacaagcagacaaaccagaagagggttttacagaaaaaggcttaggaaaattaaactattaagaacacttataaattttaatatgtgtcctttgaaacatgaagaactagatgtttggagtaaatgggataaaattaaaaagaaagaaggtagaatggcacctgaacttttcttacctgataatcatccttattgtttatggttaaagcaaaatccttatgaattaagaaataaagcactaattgaagatgtaacactatatgaatatggaagagtcttatatcatttaattcaaagacgtggttttttaagtaatagaaaaggaaaggatgacggtaaaatttacaaagggaaagaaggaattaaaggaatagaagatacacaaaaggagatacagaactctactttaggaaaatatttgtttgatattttgccaaaagagggagagccatttaaaattatacaagatgaaaagggtaatgaattaagggttcgttctcgatatacattacgagatatgtatattgctgaatttgaagcaatatggaatagacaagcaccacagttaggacttgataagattgattacttaaatgagaaaaagattttactaaaaggaggattaaaaaataaaaggaataataataaaattgaatatttcaaaaagagtaaagggatagataatgtagaaattattgaaataaaagatgaattgtctaatacggataaagaaaaatttattttaaaagtaatttcaaaaatacctttgaaagagtttttaggagggagaattgaaaaagatgaagatgaaaatatcaaatttaaaagcaatgatagtgttttgttttggcaacgcccattgcgatctcaaaaaaatttactttctaaatgtcgatttgagccagatttaaaagatgacaatggaaagtttattcaaaaaggaaagacaccatgtcatttatcacatcttttgtttgaagaattcagagcttatggatatattaataatattgaatatggaaaaaaacaaaaattagaagaaactcaacgggagcaagtcttagaattaattaattctaaagacagtaatttcaagttttctgaagttaaaaagaaattaaaattggagtatgaaacttttaattttgatgacgatgctccggttaatggaaattatacaacaaaacatctaaattcattatttccaaaagaaattcttgaaaaagaatatgttatcaaagttaataatattgatattgttgaatatggttatgaacgcatttggcatttatttcattattgcgatgataatgatgttttaatcgaaaaattgcaaaaggaatatggtttagaagaaaagaatattgaaaaagtttctaaaacaaatttaaaagaaggatattcaaatgtttctttaaaagcaattaaaaatattttgccttatctaaaggaaggaagaagattgagtgatgcggtaattcttggtggcgttagaaatgcttttggaaaaaagtgggaattatacaaagaagatcataaggaattagagaaagatttattgaaaataaatcaagataaatctaacaaagaaggcgaagccatagaaaagattaaacattatttaatcgaaaataaatatggttttgttgaaaatgatattagatttaaaaagttataccatcatagtcaagaagtgatcgaggttaaacaaaaagataaaatagaagatattgataatttaagaaatcctatagtccaacaaggagtaaatgaggtaaaacgattagtcaatttattaattgaagaacatggtaaatttgaccaaataagggttgagttaggaagagatttaaagaacaacaaaatgaaacgtcaagaattaacttataaaatctctcaaaacactgctaaaaatgaaaatgcaaaacagctattaaccgagtatgcattaagacatagtagagaaaatattcaaaaagtactattgtatcaagaactgcaagaaagaggaactattgctgtttgtccgtacacaaataaaacgataaatatttctgatgtactaggaagggcaaacaaaattcaaattgaacatataataccaaaaagtatttcattggatgatagttttgctaataaaaccttatgtgatgcaaaatttaatggactaaaaggtgagcgcactccttatgaattttatcaaataaataaagatgtaaatttatggggtggtgcaaaaacttgggaagaaattgaaagaagagtttttactgtgttgccttatcctaaagcaaaacgatttacttcaaaaacaaaatttgataaaaacgattttatagaaagacaacttaacgatactcgttatataagtaaaaaaactgcggaaattttatctcaaatttgtggtgatgttcgagtaatgccaggaagtttaacagctgaattaagaagactgtggggcttgaataatattttacaaccagcctttacaattgatattccaaatttgcatattgacgaaaataaacacattcctcattatgtagttttagataaagataaaaatccaattgcttctcaaaaaatttataatgaaaaacctaaattaaaaccaaatgaaacaaccttgtttggtaaagttgataaaggtatttttaaatcaaaagagcaatatataaaatttcaagttgacacgcctgaattaataaatggcgaatattgggcaaaactgttgttgtcaaatcctaaaagtattgttagggtttttaaagaaaaaccagaaaatacagaagatgaaatagtagttagaggtaaaatagagaaagaaaagtttaagcatgaagggttaaacacaatcaatgcacaagggaaagacaatggtgtttattgggcaaaactaactatttcaaataaagaatttaaaaaacctataaaagaagaccaacctaagaaaaatggaaaacaaatcttgttatttggagaagtaaaagaaggtgtattttcttcttacgtatatcaatgtgatgctgaaaaagtagaagatggtaaatattggttagtccttgatattgattttgaaaaagttgattttgaaaaagctttaaatgacaaatcaaccgtaaaagaaaatcaaattgtaatccagggaattacaaatgatgataatgtatttgtttctgatatggacaaccaacatcagtttacaatgaatgaaggcaaaggcaaatattatgtattgtttgatattatttctgaagtagatgatttttatcctgtaaaaacggaaatccctaaaatagaagaaggacaagcattagtggaaggtactgtgtgggtagataaatattcgggtgaaataaagtttgaccccaaaaagaatagagaagaccatcgtcatcacgctatagatgctttagtaattgcgttaacaaaagaaacttattttcaacagttaagtaaacacaatgcctcgtctgaaaacaaaaaaagaggcatagaatatgataacgaccaattagattttgcagaaccatggaatggttttcataccgatgctcaaaaaacaataaatagtattttaatttctcataaacagaatagaaatatactaactaaaatcaccaagaagattacaaaaaatggtaaaacctataaaagtgaaggaatggcggttagaggacaattgcacaaagaatttgtctttggttttagaactccaccaaatggagatgaaggttatcacataagaaaatctgtggaaagtttggttacagataaacagataaataaaattgtagacacaagcatcagagaaataattataaaagcaagaagagccgaaattccattgtataaagaaattgaaaacttgtcaaaacaattgaaaaatccaaggctatctgaaatcgaagaaaaaaacattaatgataaaataagtcaattaagaaatgatattaaacaattatatacgttacctaataaaaaaggtgatccaattccaataaaaaaagtaagagttgccgaagaaatggggaaagcacagaaattaaaatcttctataaatcaatttgttaatccaaggaataaccatcatattgttatttataaagatgaagaaggacagcttaaagacacagttactaatttttggaaagtagtagaaagagtaaaacaaaaagaagaaatttataggattccatctcccgtagttggtcaatctgttccaaaagaacttattttaacctttcaagaaaatgatatgttcatacttggactttctgaagatgaatataatgataacattaataactcatcatttttaagtaattatttgtatagagttcaaaaaatatctgatggagattattcattcagacatcatttagcatccacagtaacaaataaaaaagaagaaataaggattgcaagtatgaaaaaattccaagaaatgaacccaattaaaattgtagttaatatattgggtaaaaacaagtaattattatcatgatctttgacatattgtttgaaaaatttcaaatgcttactattttaaaaaaaacgtttaaacgcttcttataaatgatttcttatttaaaagaaatgagtaaaagcttcttataaatgtttgctaatttaaaagaaatgagtaaacattttttataaatgcctactagtttaaagaaaataagtaaacgttttttataaatgcacactagtttagaggaaatgagtaaacattttttataaatgcacactagtttagaggaaataagtaaacgtttgttataaagacttactggtttagagtaaatagttcaacatttataataaatgctgattagtaattaatgaagtagtcttaatttacatgaaagtgttaaataactgtaaaatatttttataaaacaactattattattaattttatttaaaatttttaaaacacaaaacaatggcaagaaaaaaattaattagagtgcccgaccttgataaaggagccactcgattggcatcagtaaaaagtatcgatcctgttatcgatttgggtaacggcattactgctgccaattatgaaacacaaattaacttgttacgcaccaagttaaacagttacaacaccgctttgagtaccattgacgaattgtataacgagtgtatttcacaaattgatgtgttaagagattggaacgacagggtattaactggtgttgcaaccaaatttggcaaaaacagttcgcagtatgaaatggcaggaggagttaaaaaaagcgaacgtaaaaagcaaacaccaaaacctagtgcctaaagatcaaaatcccaatgtaaagattgggatttttttatgggtacaaaaaaagttttttttaaattataatttacacccaacctaaaaaataaatccgattaactatttttggtgtatatttgcaccactaaatcatattatcatggcaagacaaagtatcaccctagccaatcaaaacgatgagtggctaaagcaacaagtggctaaggaagaatttaccagcaaaagcgaagcggtaaatcatctcatcaagctagcacgggagctagaggcatatcatgactatgtgcaaatgaaaattgacagaggtttaactagtggttttagtaccaaaaccaaagaacaactattggctgagttcaaagaaagactaaaaattgtataaatatgaaatcgccattaacaacttgtttgcgcaagcaaaccccaattaataaaaaggcgataccataacttgtcccgaaaatgcgggacgggatatgatcgctaacaaataaatttacatatatgaataataatatgatagaatttaatgaagggcatcatacttattttgtttacataattaccaataagtttcgctcaacttattacattggaatgacaaataacttgggattgcgattacttcaacataaagaaaatatagaaaaaggaattaaaacatttgcctctaaatacaatattgagtttttggtattttacgaaaagtttacttgggttcaaaaggcaatagaaagagaaaaagaattaaaagggtggaaaagagaaaaaaaattagaattaattagaaattttaatccaaattttgaatttttaaacgatcgatttatgtaagaaaataaatgattcgatttgtcattccgacgaaggaggaatcacataacatgagtaacaaatgcgattcctcctccgtcggaatgacaaaaaggagacaaaaagttctttgacatacgttttcatggtcttaaacagccaaaccacaaagacgatgtaagagtaatctgtgcatcagtggcaattttaaagttgtggtttacaaacaccaaaataatattttttattggtgtgtttgtgaatttatttgattaaagattagaaaacacgatatgcaatagtacaaacacaatcatcactgccttgttgtggtttacaaacaccaaaataatattttttattggagtgtttgtgaatttatttgattaaagattagaaaacacgatatgtggtgctacttttggagcaatagtggctgggttgtggtttacaaacaccaaaataatattttttataggtgtgtttgtgaatttatttgattaaagattagaaaacacgatatgtgaatggattcttgctagagaaaaagacatgttgtggtttgattaaagattagaaaacacgatatgtgaatccattgaatcaatgtccgcagatacgttgtggtttgattaaagattagaaaacacgatatgtgcacggataaccgaaaaaataagtctgatgttgtggtttgattaaagattagaaaacacgatatgctttgccttcaaatgaattaatggcatcaagttgtggtttgattaaagattagaaaacacgatatgagtttctaaattgaaagatttagaacacttgttgtggtttgattaaagattagaaaacacgatatgaatggttaagacggcttggaggctctgaaagttgtggtttgattaaagattagaaaacacgatatgtacattggaactgcaccgtgttagcagttgttgtggtttgattaaagattagaaaacacgatatgcgtacttttaaggagcagactgatttatggttgtggtttgattaaagattagaaaacacgatatgagatagaagctacatcagcttatttcgacagttgtggtttgattaaagattagaaaacacgatatgaacgcagtaatagttaaatcagaccttgatgttgtggtttgattaaagattagaaaacacgatatgttttgtacctgtggaattaaagttaccccggttgtggtttgattaaagattagaaaacacgatatgaatgcaacaaaaggaatttcaaaccaaagtgttgtggtttgattaaagattagaaaacacgatatgtcaaatatgaaaatatccaaagcaagaaaagttgtggtttgattaaagattagaaaacacgatatggcatttttcaaaacaaaataagaaaggcttgttgtggtttgattaaagattagaaaacacgatatgttatctcgtgtgaactggatgagaccgacagttgtggtttgattaaagattagaaaacacgatatgtttacagccgataagttggaaagcatttccgttgtggtttgattaaagattagaaaacacgatatgtttacagccgataagttggaaagcattgccgttgtggtttgattaaagattagaaaacacgatatgatagtaagcctaatttttctaggcgtggcagttgtggtttgattaaagattagaaaacacgatatggttttgaatttaaaagaaaaaacccttaaagttgtggtttgattaaagattagaaaacacgatatgagttggcttgttgccttctgatattcaagggattaattgtaaatatcgttataaaaaatgcctctttataggactgataaccctatattgaggcattttttgttttctaaaacagctctagctgtacaggcattggtacttttggcaacggagcttggccccaataattcataatattgccaaactgtttgtcggttatccgtacaacactcaccttgcctagtgggggcaacaattgtacgatacgtttttcgtgtacgtcggcactctcgctactggcacaatgtcttgtatatacagaatattgcatcatcgtaaatccgtcgttcaataatttgtttctaaaaaccgaggcatctttacggtttttttttgttgctgtgggcaggtcaaaaaatacaaacaaccacattatccgatatccgttgagttccataacttggcatattttatttttttgcgttcgcccgtataacattgttgtagcgagctggctgttttttgtaaagccaccatcaaagggcttttttcgttttcaaaatacactgttcgggttagcagttgcaacaactcggcttttagggtggtgttcaactcttgttcttcaaatttttgcatcatctcaaatactttttcgtccaccagcggtctgtagggttccataatgtcgtctgcaagggcaaaggcgttgtatttgtttttgtgatgaatgcctagcgtattgagcaagccactgccagataaggctcgtgctgtggcggctcgtaaaatggcatagccataatttagaaaattgttgggatagttaccaaatcgctctcgcttaaaatcaaattcaaaaaaccgctgccagtattggctagccgctaccccttccatgttggtactgtcgccactcaaaacttttgaggctaaaaaatcaaagtggttttttttgccttccattcgttccaaaaggcttccttggtttttaattttttcgacaattgtttgttgccacaattgttttttgagcggtacactggcttccaattggtttctaaaaatctcttgttgcacgtggtggctgttgagattcataaacattccttgtggcaaatgattttgatgacatacaatgatggcggcattgttttctatcaacaaattcatggctctgatgctcaaatacacctctggattatcgacaactacaaatcctaaatcttcgattggaatggtggtttctctccattcggttttgataaccaattgacggtttttggtagaaacagaggctttgttttctaataaaatagtacgttttaacatatttaagtatttaaaattgaagctattaaaacggaataatgattattattgttgtatttgatactccttttttaaagcctttaatccaaaaatatgttgaggtttaactattgatattgtttgaaattttgataaataattacttgttgcaactgttttttaaaagaagtttattattacaaataaagtggcttttttgcagacgctgcgttagggatagtagtggaaatccttttttggggcagggcttttttttggccctgccccaaaaaagattgcaacggatagcccggccccttgtgggaacgcccaaaaaaggtttgtggttttgtagtgaagtttttttttgatattattcatcaagtaaattgtgtgtagggttgtggtttgaaattgtttgcaccgttcaaagtattttgctacatttgccataaaataatgcaccaatgaacaatcccgtagcagataaaatagcagattttttatcggattttaaaccatttaacttattgagccacagcgatttgttgttggtgtccagagaagtgaaaatattgtacaaagataagggcaaaacgttgtttcaggtaaacgatgcgttgcacgattgtttttatgtgatttattcgggaagtgtcaaattgacggtgtttgcagatgccgaggaaacgttgttgaacaagtgtcagaggggggatatttttgggttgaggcctttttttgcaaaaaacaactacatgatgacggccacggcccgagaagatgctatggtgtatgcgattccgttggcggtttttaaaccactattggcttcaaacacagaggttttggattatttattggaaagttttgcctcggtgtctagtacgtccaaagatagtaaaaacacgatttcggatgccatttcgatgacagaaaatgggtcggaaattcagtattttcaggcattaaactattccaaaacaaccttgcaggtggtagtagagcaaacgatacatcaggtggcacagttgattagtgaaaaaaatactgattattcgcttgtaatagaaaataatttaccaattggtattgtaaccgatgaagattttcggtcgaaagttgcaacaggccgctaccctattttgtcctcaatagacaaaatcatgtcgtcgcccgtgataacggttaccgaaaacatttcgttgacagaggctcaattgttgatgctcaaaaacagtgttacccacttgtgtgtaacagaagatgggagcgacaagtcggtggtaaagggaattattacacaaaatgatttaattgtagcacattctaacaatcctggggttttgttgaaagaaataaagaaggcaaaaagtactaaagaattgaaaaatattcaggaaaaattgtatgaattgatacaaacttctatttcaaaaaacatacctatacaaagtattgccatgatagtgggcgaaatattttttgcgttaaataaaagggttattgagctggctattatggagttggggactcctccaactacttttgcatggtttagtatgggcagtcaggctcgaaaagaacaaattttgcaaacagatcaggatagttttttggtgtttgatgatgttgcggccgatatgtaccgcaatgtgaaagattattttttgaaattgtcaaaaaaagtaaccacaacgctcgaaaaaatagggtatccaatgtgtgccaatggtcatgtggccagcaattatatttggtgtaagtcgttgagcgactggactaaacagtttaacaattggataaatactccaggagaaaacacagacgatgtatgtagtgttttttttgattttgaattgatttatggcgaagtaaaaatagaagaaaccttacagaatattgtgtttaaagaacgaaaatccaatcatttgttttatgattatttaggtaacgaagccataaaaaaaccagcccccttgaattttttcaaaaaatttaatttggaagaagaaggtgccgaaaaagggaaatttgatatcaaaacccgagggctactgccgctggtagatgcggcaaggttgtttgtattgagtcaaaacatcaaaggcaatggtcatacctactttaggttcaagcagttagcacatttgaatccgcagcatcaagcattatttttgaattgtgccgaggcctttatcacgctttctaaatttagaattttggatggattgaaaaatgatagccaggggcagtatatagatttagaagaattttcaaagttggataaagaaaaattaaaaaatgctttattgagtttgaaagatttagaagaaatcatcaaagaacaatttcaactaacccatttttcgtaattatgctagactggctcatcaatatcggaagcaattatccagatttttggaaaacatatacagaaaaatttcaaaccaaatccaaacagtttgttgttttgagtatagaaacctcgggtttgaatccaacagaggattacatcatgtctgttggggctattgttatcaaccaaaatgaaattttagtacggcaggtttttgattttaatttgaatgaattttcatacaatttagaagagcaattgaatgcaaaagaacaagaacttatcatcaattttattgattttataggtaatgctacacttataggtcatagaattcattttgatattgctatattaaatgaatatctcaaaaaaatgcaatgcggccgactgaaaaatgaggcattggatgtagaagtgatgtataaaaaatggaaagatactaatgaaaaaacttttacagtagaagaattattacaagaatttaagatagaaaaaagcgaaagaaatacggcttcggaggacgcattgtctctcgctgtgttgtttttgaaattaaaatcaaaactgaatatgccttagattttgccataatacatggctttcacaatgccgtctgaaagtccaattttgggaacataaatgttttgtgctttgctccatttcatggcattcaaatacaatttcatggcaggaatgataacgtctgctctatcaggattgaggcccaactcagcaatacgttgttcataagtcaaattgttgagtattgtaaattgagcatttaagtaaatatatgttaaaggtttttcttgtgatttaccagacattttaaataatttgttaatatttccaccagaacctatcaaggaaatactatcataaccagatgtattgtttacaatccatttttcaatttctttccaaacgatgtcgcttaccacttcgttgagcaatcgaaccgtacccgctttaaaggatttagaagcaataattttgccgtcggaaaacaacgaaaactctgtactaccaccaccaacatctacatacaaatatgttttttctgtttttaataagaaatgcaaatcggttgatgcgatgatggccgcctcttttttgccatcaatgatgtcgatgtcgatttcggcttcttttttgataatgtccacaacctctttgccattataagcctctctcatggccgaagtggcacaggccaaataactttctaccttatgaactttcatcaacaatttaaaagctttcatggcatcgaccattctttcaatattttcggaagttatttctcctaccgtaaaggcatcctgacctaaacgaataggtaccctaaccaacgaacttttgttaaactgggtttgtttgcctttgtattcgataatattagtaatgagcaaccgcatggcattagaaccgatatctattgcggcatacttttttatttttatatgttctgttgtactcatttaatttttttttgataaaatctataagattctaattgagccctaaatacaggttcgttgtcttttcttatacggtatttattatctaaattttcagaatgaagccttacttttacatttcctttccaacccaaatcaaaactatcaatcaaatcctgtttgattttggggtcgtatattgggcaagtaacttcgaccctaccatctaaatttcgggccataaaatcggccgacgaaataaatacatcaggttttccgccgtttccaaaaataaataaccgtgtgtgttccaagtagttatctactatactaatggcttcaatattgtcgctcaagccttttttgccaggaatcaaagagcaaattcctcttacaattaactgaattttgacccctgccctactggcttcatacaatttgtctatcatttgaaaatctgacaaactattcatttttagttttataaaagtaggaataccggcaagtgctaatttgatttctttatctatcaatttaaccaattttgagcgggtataatgtggtgaaactattaagtgttggtagcggtgtattctaaaatttacttcaaaaaaatcgaaaacttttgaaatatctttaagaatttgctgatgacttgttaataatgtaacgtcggtataaacttttgccgttgattcattaaaattgccagtagatacaaaaccatatcgttttaatttgccttcttctattctatcaatcacacaaattttgctatgtactttaagcccttttaccccaaaaatcaattcaataccttcagtttgcatttgttctgcataagaaatattgctggcctcgtcaaaacgggcttgtaattcaatttgaaccactacttttttgccgtttttggcagcattgattaaagaactaataatttgagaatttttagacaatcgatataaagtaatcttgatacttgttacttgagggtctagagcagcttctcgtaaaaatttaataatataagaaaatgtttgataaggtgcgtttacaagataatctttttctcctatttttttcattatattttcgtccaaactcaatccaggtactaataatggtggattcgttttatacaataaatccttacgacccaagtcgggaaaatccatataatctcttctgttgtggtacctcccccccggaatgatactatccgaagcatctattcccattttttttaggaaaaactttaaggtatctttttcaatagattggtcatatataaaccgaacgggctcccctattcttctttctttgacactagtagcaattttttcgagcatgcttttactcaaatcgctatctatttccaattgagcatcacgagtaattttgatcatgtgtgccgacacttgttcgtagtcaaaaatattaaagatgctttgaagatgcagcctaatcacatcgtcaatcatgataa

SEQ ID NO: 1013 - DNA, 24695 bp, synthetic construct
  source 1..24695: mol_type = other DNA
  misc_feature 1..24695: note = Synthetic
tcattattacaaatgccggcacagtgatgatattccacaaacggcgcatcataaaaagatactgctcgcgtagaataatttttttttcttccgtaaaagaatctgtgtctttgtaataaacaaataagcgcacaaggtaaaaaatccccgcaaaataactgaccataaaaatgatgtgaagcgctttgataataaggtataacatagttttttctattttgcaaatttagtatttttttttcacgccaagattttttcttaataaataccaagatttttcacgcaatgagcgcaaagtttttcacgcaatgagcgcaaagtttttcatgcaatgagcgcaatgtttttcacgcaatgagcgcaaagttttttacgcaatgagcgcaaagtttttcacgcaatgagcgcaaagtttttcacgcaatgagcgcaaagtttttcatggaatgagcgcaaagtttttcatggaatgagcgcaatgttttttacgcaatgagcgcaatgtttttcacgcgatgagcgcaatgttttttacgcaatgagcgcaatgttttttacgcaattagcgcaaagttttttcaaagtttaatattggagtttcaaactgccaaaaaatatttattttaattttaaaaattaagaaaattccacgaaaataccttcgccaagattgatgcccaaaagtgttttagcgccgttgtttttattgcctttataaatgctgatttctaataaatctgcatcattaaaaatcgcaatagatttgccgtggtattgcgtttcattttcccaatttgggatgaaggcagtgtagcgctcgtaaatattattgagcgaaaggtttctgaatttcacgatgtaactatcgtgcgccgcatttattttttcaaaaaacttttttgaaatgttggaaatagcgtttccgaaattatcaatgtacataatctgtccaacgatgattttttcagattcgttgtaaactgcgcgcggaaaggttagttgaacagggtctgttatttttctgccaatgacttctggcaaaccaccgttttgcaaatgtacggctgcaggagcgaaaatatcagtacttgcaaattttacttcatcatcaaaacggttgtttaaagtaatttcgtagattgcttcaggctttacatcaaagaaaattaatgacaataaaccgttgtctgcagcaataaaataatgcccgtttgctttatacaaaatagattttcggtctttagaataaaaactatccacagaaataatgtgaattgttcctaaaggaaaatggatgtaggaatttctcaccacgtaagcggtttccgtaaggtgaaaagcgtttatttcgtggctaatatctacaattttcgcatcttcattcatgctcaaaattttaccttttatagcagcaactctgtgatctacaagaccataatctgatgttaaagtaattaaaggcataaaaattttggttaaaaaacgaagtattttgttgggtgcaaatttaatttaattagttaagaataaaaagtttctcgcaattgattcaattaaaatagtgtgatttaaaatatttattttaaatttagtttatcaattttgtgatataaaatttaataaaaaagtgaatgcttgaactaaactacgaaatttctgaaatagatgtaaaatctttctacggtgttaataatcaattttttaatttaataaaatctagttttccgactttaaaaatcacgggaagagataattttatttttgctaaaggcaacagagaagcgctcgatatttttgaagtaaaattgaatgatttggtgtctttcattaaaaaatacaataccattaatataaaagatgtagaaagtattttgaggattaaagatgaacaggagaaaaaattggtttttgacaatgatgtaattgtaaaaggcataaacggaaaagttataaaagccaaaaccaccaatctaaaaaaactcgttaaagaaacggagaaaaaagatatggtttttgcgattgggccagctggaacaggaaaaacttacaccagtgttgctttggcggtgaaagcattaaaggaaaaagaggtaaaaagaattattttaacgcgacctgcagtggaagcgggcgaaagtttgggttttttacccggcgatttaaaggaaaaattagatccttatttgcaacccctttatgatgctttgcgcgatatgattccgcacgaaaaattggaaggttttatagaaaaaaatgtgatagaagtggcgccattggcatttatgcgaggaagaactttggatgaagcctttgtgattttagatgaagcccaaaatacaacccattcgcaaatgaaaatgtttctcaccagaatgggaatgaacgccaaattcattataaccggcgatccgagccaagtagatttgccgatgcgacaaaaatctggtcttcgggaagcgatgcgcattctagaaaatgtaaatgaaattggttttgtacatcttacagaagaagatgtagtgcgacatcccgtggtgcgaaaaataattgtggcttatgcggaggaagataagaagcaaagaatggattaaaaggtttatttttagaatattttataaaaaccactttttttagtggtttttttgcttttgtgatttatctcatattcccaatttgatacgaagttttgaactacttttgcagccaattttaaaaaaaaatcgaatgaaaaaattagtattagcaagtgctgtagcgctttttggcttgatgaatgcacagaaaggttctgttttagtgcaaggtgatatttcttataacacatctaaaactacttcaaatgcaactggagcaacatcagaaatgaaagcagatgttttcgcttttaatcctactgttggttatcagtttacagatcatctaactgcaggtgtaaaactaggtgtaggtacaagtacacaaacggtaagttttaatcagcaagggagttcaataaatactgaatctaaaaacaacgcttttcaatatggcatttttggcagatatagcatgcctcttagcgatttgttttctgtatatggagatttagatatttatgcaacaagtggtaaggtaacaagtccaaattttgttggaaatacggtttcttatacagatacaaaaacagaaggttttggtgtgagatttacaccaaatttgttcattaatatgaaaaattcttttgggcttaactttaatatcggaggaataggatatgaaaattctaaagtaaaaggtttggataccaaaacaaattcttttggtttttcttttggacaaggcgttactgttggtatttctaaaaactttaaatagtaatcatcaattaaattatttcattaaaaaaatcctaagcaagtcgcttaggatttttgatttttactatttagaatttattttccaaataaattgccgcccattccgggtacttttggcattcctttgctcatcatctgcatcatttgtttgccttgtgggccttgcatcattttcatcatttttcccatttgttcaaactgtttcatcaaagcatttacatcttcaatttttcttcctgcgccacgcgcaattctttgttttctggttgtgttaatgagtgacggtgttcttcgttcatctggtgtcatactgtgaatgatggcttcgatgtgtttaaaagcatcgtcattaatatctacatctttgatggcttttcccacaccaggaagcatgcccatcaaatctttcatatttcccatttttttgatttgattgatttgtttcaagaaatcatcaaaaccaaattcatttttggcaatttttttatggagttttttggcttcttcttcgtcgaattgctcttgggcgcgctctaccaaagagactacatcacccattcccaaaattcggtctgccattctttctggatagaataaatccagagcttccattttctctcctgtagaaataaattttatcggtttttcaacgacggttctaatcgtcaaagctgctccaccgcgtgtatcaccatctaatttcgttaaaactacaccatcaaaatttaaagtatcgttaaagctttttgcagtgtttacagcatcttgccccgtcatagaatcaactacgaaaagagtttcagtaggttttatagtttgatgaacagtttttatttcgttcatcatggcttcgtcaatagccaaacgtccggcggtatcaacaattacaacatcgtgcttattttctttggcaaaattaatcgcattctgggcaatagaagaagggtttttgttttcttcttccgtataaactgtgatgccaatttgctttcctaaaactttcaactgctcaattgccgctggtcggtaaacgtcacaagcaactaataatggattttttgcttttttttgttttaaataattggccaatttacccgaaaaagtagttttaccagaaccttgcaaacctgcaattaaaacaacacttggtttcccagaaagattgatgccttcttgcgaaccgcccattaattctaccaactcatcgtgaacaattttcgtcatcaattgtcccgggcttaaacttgttaaaacattctgtcctaaagctttatcttgaactcttttcgttaaatctttagcgattttataatttacatcggcatctacaagtgcgcggcgaatttctttcaccgtttctgccacatttatttccgtgatttttccgcggccttttatattgtggagtgctttatctaatttatcctgtaaactgttgaacataatttttatttaataatgttgcaaaaataaggaaataacaacataaaaaaaaacagagttgaaatcgtgtattataagaattaaatctgcaaattaagagactgcaaaaaattgaaaaaaatatttttttcatttagaaaaatcttcatttttactttataataccattttatctttgaattttccgaaaaataaaaatgctccataggagcaatatctttgtagaaaaaatgaataagattgaaaaagaactccggaggagttcaatcttttaaagtaattttattgacaaaatgatataagatattaagaataaaaaattagattagaatctgaaaacaaaaaaaagcacctaaaaaaggtgcttttaaaactatttagttaaaaattatctcgtaatctctctcccgatcaccaatctttggatttctgaagtgccttcgccaatggtgcaaagtttagaatctcggtaatatttttctgctggaaaatctttagtataaccataacctccaaaaatctgaacggcattgttagcgattctcacacaagcttccgaagcgtaaagttttgccattgcgccttctttagtcatcaccactttattatttttcatttctgatgcgcgttcaattaaaagttcagcggcatcaatttctgttgccatatcggccaacataaaattaatcgcttggaaactagagatagattttccaaattgatgtctttcttgcgcgtattttaaagcggctttgtaagcgccacgggcgagtcctaaacttaatgcagcaatagaaattctaccgccatcaagaattttcatggcttgtttaaaaccagaacctacttcgcctaaacgatttgcatcgggcactctcacattatcaaaaataagttcagcggtttctgaagcgcgcattcctagtttattttctttttttccagaagtaaaaccggccattcctttttctaaaacaaaagctgtagaattattttttgcccctttttcgcctgttcttgtcattacaactgcaatattgccagaaatagcgtgtgtgatgaaattttttgcaccattgatcacccattcatcgccatctttcacagccgttgtagacattccgcctgaatctgaccctgtgttgtgctcggttaatccccaagcgccgattacttttccggaagccaattgtggtaaccatttatggcgttgatcttcatttccgaattcgtaaatatgattggtacagagcgaattgtgcgcggcaacagataaaccgattgagggatctacttgtgaaatttcatctaaaatacttacatattcgtggtagcctaaaccagaaccaccatatttttcgggaattacgatacccataaaacccatttcacctagttggtgaaataaatcaacgggaaaggtttggctctcgtcccaatccataatgtgtggcctaatatttttttcagcaaaatctcttgcagtttctgcaatcattttgatgttttcttttgtttcaaaagtcataaaaattattttcgtaaatataagaatttaagatcgattataattttaaaaaaaatatgatattaaataggattttgagaaaagtatatgttttgaagtttttaagtggtgaactttacttctgaaatacgtataacatgatagtttttttggcgaaaagattaacgcatctcaacttgtaaagaaatcctaggtgttgcggaagcaggaacggagggcggattaagttgcccaaataaaatattgtaattcttaatttgtcttttaaattaatataatatttcaaaataaagttgtacttttgcaccacttttgtgggaagtattttgggaaagtaaagtcttaataattaacaacttccatatttttcaggttaccacatttaccaaaactgaaatttaaggaatacaaattttttttaatatgtcagaaacgacaaacacaccggaagaggttgtagaaagccaaagccaacacacacaaaaaaacgaggaggttttagtaaaccaaaacgtagcaccagaagcgtttgactgggaatcttttgaaagcggactaaacgctgaagatagaacagaaaaacaagaattagaagaaatttataatggctctctcaatgatttaggagattctgacattatcactggtaaagtggtaagattaacagatagagaagcgattgtagatattaattttaaatctgaaggtgtaatttctctaaacgaattccgttacaaccaagacctaaaagtaggtgatgaagtggaagtaatggtggacaaaagagaagataaaactggccaattgcaactatctcacaagaaagcgagaacattaaaagcatgggatagagtaaatgagcttcatgaatcaggcgaaattgttaatggtttagtaaaatctagaacaaaaggcggtatgattgtagatgtcttcggtttagaagcatttttaccaggttcgcaaattgatgtgaaaccgattaaagactacgatcaatttgttggaaaaacaatggaatttaaagttgtgaaaatcaacccagaatttaaaaacgttgttgtatctcacaaagcgcttatcgaagccgatatcgaaggtcagaaaaaagaaatcatcgcacaattagaaaaaggacaagtattagaaggaactgtgaaaaacatcacttcttatggtgtatttgtagatttaggtggtgtagatggtttgattcacattacagatttatcttggagcagagtaaaccatccatcagaagttctttctgacggtgaaactgtgaaagtggtaattcttgattttgatgaagataaaacaagaatccaattaggtatgaagcaacttgaggctcatccgtgggatgctttaggtgaaaatattaaaattggtgataaagtaaaaggaaaagtagttgttcttgcagattatggcgcattcgtagaggttgcaccaggtgtggaaggattaattcacgtttctgaaatgtcttggagcacgcacttaagaagcgccggagatttcgtgaaagtgggtgacgaagtagaagcagaagttttaaccttagatagagaagatagaaaaatttctcttggtatgaaacaactgaaccaagatccttggacgaatattgaatctaaatatccagttggttctacacacacaggaactgtgagaaacttcacaaactttggtgtttttgtagaattagaagaaggaattgacggattaatttatatttctgatctttcttggactaaaaaaatcaaacatccatcagaattttgcaacgttggcgataaattagatgtaatcgttcttgaacttgatgttcaagccagaagattatctttaggtcacaaacaattgcaagaaaatccttgggataaatttgaaaccaaatacgctgaaggaaccatccataacggaaaagcaactgatgtttttgataaaggagcagcggtgcagtttgaagatgcagaagttgaagcattttgcccagcaagattattagaaaaagaagatggttctaaaatcaaaaaaggagaagatgcagactttaaagttattgaattcaataaagaattcaaaagagtagtggtttcccacaccggcatctttaaagaagaagagaagaaaaacgtaaaagaatcttctagcaaatctgcaggtaaatctgctgcaatttcatctacaagtgaagaaaaatctacacttggtgatattgatgttttagcagaattaaaaaagaaaatggatgcaggtaaataattaaccttcattctatctttacataaggcgcttcacggtattcgtgaagcgctttttttataactttaaatatgttgtaactttatccctccaaaataagagatttttatgaattttaaaataacttcagaaggtaaaatatcaaaatattttatcagtcaagatatctttgattttgctcaggcctcaaagtttgtgcaaaattctgcatataaaagaaatactaataagttcaacaaactctgcgtttttgaagatttaggtggaacttgcagcacaaaacacgccttattaaaagaattagcagtagaaaataagcatgaagaaataaaattgatgcttggtatttttaatatgaattctcagaactcaacaaagatttcaaaagtgttagataaatatcatttaaccgaaatgccggaagcgcacaattatctaaaagtaggcgagaactatctagattttacaagaaaaaactcaaccccagaagattttttaaaagatttagttcaagaaattgaaattcaatctgatcaaacgatagagttcaaaacaaactatcatcaaacttatttaaagcaatatttgcaagagcatccagaaataaactttgcgttttctgaattttggcagattagagaagaatgtattgcagcgttgcaaacataaaaaaaaccaccgaaaattcggtggttttgtatctttataaaaagaagtattatcttctagcagcgtctttaattctcgcttttttaccacgaagattacggaagtaatagattcttgctcttcttactttacctcttctatccacttcaattttttgaagcgctggtaaatttaaagggaaaacgcgttctacaccaacatcaccactcatttttctgatggtaaacattttagtagcaccagtcccgcgaacttggatcactacacctttaaagaactgtgttcttgtttttgcaccctcactaatttcgtaataagcggtaattgtatcaccggctttaaattttgggaaatcttttttctcaatgtacttttcttgtacgtaattaattaaatccattgtttaattgtaaataatttttaagcaaagcaacgttcacgtctatcgtcagaggttagtttacaggctgcaaaaataaaataaatttttaaactgggcaatacaatttatatatttttaaagaattacagatttgcaaaaaaaaagtcccaccgaagcaggactaaagattttacatctacggcatatagccttattgtgataagattaaagactagaaattttaatcagttacaaatatagggaaaaactttttaacttgtttacggctagccgtaagatgcagaattattttttatttaactttaaagattgattaaaaatagtagagtaatggcaaaaatattaggtttagatttaggaacaaactccattggttgggcgattgtggatgataagaatagcaaaatacttgatacaggagttagaatttttcctgaaggagtagttgcaaaaactattggaagtggagataaagaagaaagtaaaaatgcgaaaaggcgagaaagccgtcaaacaaggagaggtttttatagaaaaagattgaggaaaataaaattattaagaacattgattaattttaaaatgtgcccgttggaacattttgaacttgatgtttggagtaaatgggacaaaataaaaaagaaggaaggtagaatggcacctgaattatttcttccagaaaatagtgcatataatctatggttgaaacaaaatccttacattttgagagacaaagcattatcgaaagatttaactttaactgaatttggaagagtcttatatcatcttatacaaagaagaggttttttaagtaatcgaaaagggaaagatgacggaaaaatttatggtggaaaagaaggtatagtcggaattgataaaactaatgaacaaattaagaattcaactttgggtaaatttttatttaaaatattaccaaaagagggcgagccatttaaaattatagaagatgaactaggaaatgaattacgtgtaagatcaagatatactttgcgagatatgtacattgcagaattcgaagcaatttggaatagacaagcaaaacatttaggtcttgataatatttattactccaatgtaaaaaatgttttattaaaaggcagtttaaaaaacaaaaaaaatgaacgaaaaatcaaccacctaaaaaaaataaaaggtaatggaaatattgagattataactttaaataataacctctcaaaaaatgaaaaaccgaagtatttattaaaaattgcaactaaacttccattaaaagaatttttagcaggaagaattgaaaaggatgaggatggtaaaattaaatttaaaagtaatgaaagtgtattgttttggcagcgaccattacgttctcaaaaaaagttgcttgcaaaatgtcgttttgaaccagatttaaaagatgataatggtaaatttattcagaaaggaaaaacaccttgtcatttatcacatcctttatatgaagaatatagagcctatcaatatgtgaataatattgaatatggaaagaaacaacgacttgaagaatcccaacgtaagcaagttatagacttgataaactctaaagacggtaattttaaatttagtgaaataaaaaagaagttaaagttatcctatgaaacttttaattattcagatgattcgtcagttaatggaaattatatgattaaaaatttgaactctattttcccaaaagaaatactagaaaaagaatttgtagtaaacgttaataaagaagatattatagaatatggttatgagcgcatttggcatttattccatttttgtgaagataatgatgttttaattaaaaaacttcaagataattttgatttatctgaaaatgatatagaaaaaatttcaaaaataaatttaaaagaaggatattctaatgtttctttaaaagcaattaaaaatattttaccttatttaaaagaaggtaaacttttaagtgatgcagtgattttaggaggtgtccgaaatgtttttgggaaaaaatggcatgagtttattgattttcacgaaaaaattgaaaaagatattttgtacataaatcatcaaaaatctaataaagagggtgaagccattgaaaaaataaaaaaatatttgatagattataaatttggttttactgaaaatgataatagatttaaaaaactttaccatcatagtcaagacgttgtagaagttaaacttcagaaaaaaattggacctgttgaagatttaagaaatccaattgttcagcaaggcgtaaatgaagtaagacgattagtaaatgaattattggatgtacatgggaaatttgaccaagttagagttgagttgggaagagatttaaaaaataacaaatctaaacgcgaagaaataggatataaaattcgtgaaaatactgccaaaaatgagaaagcaaaagaacttcttattgaatatggtttaagacaaagtagagacaatgtgcaaaaagttttattatttcaagaaatgttggatagaggaactgttgcagtttgtccttataccaataagacaattaatatttctgatgtgttgggaaatgaaaataaaatgcaaatagaacatattatacccaaaagtatttcgttggatgatagttttgcaaataaaaccttatgtgattcaaaatttaatggtttaaaaggtgaaagaacaccttatgagttttatcaaattaacaatgatgcgaatttgtggggaggttctaaatcttgggaagaaattgaacggcgaacatttcgaattttaccatattcaaaagcaaaacgcttcacatctaaaactaaatttgaaacaaatgattttattcaaagacaattaaatgatacaagatatataagtaaaaaaacaaaagaaattttatctcagatttgcgaagacgtaagagtaatgccaggaagtttaactgctgaattaagaaaattgtggggattaaacaatattttacatcctgcttttgttctagatttgcctgctcttcatattgatgcaaacaaacatattcctcattatgtcgttttggatgaggataatgtgccaattttatctcaacggatttataatgataagccgatattgaaagcaaatcaaacttctataactggctttgtagataatgaaatttttaaatcaaaagaaaaatatgtaaaatttgaagtaaaagcaccaaatttatcaaatggagaatattgggcaaaattacttttatcaaatccaaaaagtatagttcgtgtatttaaggaaaaaccaaaatcaactgaaaatgaaattgtggttcgggggaaaattgaaaaagaaaaatttaaacatgaaggattaagtggaataaatgcagaaggtaaagaaaacggaacttattgggcgaaattatcaatagtagataaaaaatttaaaaaaccgaaaaaagatgaccaaccaaagaaaaatggaaagcaaatcttactttttggagcggtaaaagaaggcgttttctcttcctatatgtacgaatgcgatgcagatcttgaagacggtaaatattggttaattcttgatattgattttgaaaatgtagaatttgaaaaagccttaaacgaacgaccagaagtactagaaaaccaaatattaattcaaggaattacgaatgatgaaaatgtttttgtttcagatatggactgtcaacatcaatttttaatgaatgagggcaaaggcaaatattacgtattgtttgatattatttcagaagtaaatgaattctatccaataaaaaccaaaagtcctgaattagaaaacggacaatctttaacagaaggaacaatttgggtagataaatatacaggagaaataaaatttgatccaaaaaaaaacagagaagaccatcgtcatcatgcaattgatgctttagtgatagcattaaccaaagaaacttatttccaacaattaagtagaagaaatgcttcatctgaaaataaaaagcgcggaaatgaatatgaaaaagaacaattagattttgcagaaccttggaaggaatttcatgttgatgcacaaaaatcaataaatagcattttgatttcgcataaacaaaacaaaaatattttaacaaaaataacaaagaaaatcactaaaaatggtaaaacatataaaagtgaaggaatgtcggttcgtgggcaattgcatgacaaaacctattatggtcataataaaaattgtaaagcagacgaatacgtttatagagttgatattaataatttaagtttttctcaattaacaaatatcatagatcttaatttaaaagcagttattgttgaaggcgttataaaaaaatttgaggaaagtgaaaaacttttattcaaaaaaatgaattcaaaagttcaaaatttagataaaagcaaagtgaaaaaaattaaggcaaaagttgataaaattttaaaagaaacatctttttttatgccaaatgaaggcaaaagatatattcgcctaaatataattgagcctgcaaattttgaaagaatgccagttccaattaaaaaagttagaattaggaaagtattaagaaatgcggaaaaattaaataatgaaataaaacaatttgttgatccgcaaaacaatcaccacgttttaatatacaaagacgaaaacggaaatttaaaagaagaagttgttactttctggactgtagttgaacgcaaaagaacaggtgaacccgtttataaattaccatctgatggcaaaaaaatagttacaactttgcaaataaatgatatgtttttgttgggattaaatgaagatgaaatcaattgggaaaatccaaattataaccatttaaaagagcatttgtatagagttcagaaatttacatctggtgatttttattttagaattgctaaaacatcatccatccaaaacggagaagaaaaacaacaaattaatagttttggtctagggaagaatggatggttaacacataatcccataaaagtaaaaatttcagtttcaggaaaaattttaaaagtatgaatcgttcagattttttaaaagcattcggtttaggttcggtaggtttagtcattccaaatacattatggtcgcaaaaaccagtaaaaatatatgacaattatgtgaaaggtttaatgcactaccaatttagaaaaattaaaaagcaattaactttaggtcaagaacttttacttgaaagagaaatagcgaatacttatgaccaatttgccgttgaggtttattttaatgaatacaaattaggttatttggctgcttatgaaaatattgcgattgccaatatgttagaccaaggtgttgaattttctgcatttataagtgaaattgacaaaaaaaatgaatttgaaggtttagcaattgaaatttacactaatattgtaattcaaaatccaaaaatactagaaaccgatttactggataaaagagcagatgatgccatagatcaatacagaattggcgcgaaatattaggaaattagaaagaagctctttgacatacagtttttcggaggtcataagcaaccaaaccacaacggaaaatcttcccgattttctgcaacggattttccgttgtggtttgattaaagattagaaaaaacgatattgacaactcagaaaaaataataaacggcgttgttgtggtttgattaaagattagaaaaaacgatattatgcaattgttaatttaattaatgacggttgttgtggtttgattaaagattagaaaaaacgatattcggcaattccttactataatattcagtttagttgtggtttgattaaagattagaaaaaacgatattttctgtgattttgttttgcaaatcttgcatgttgtggtttgattaaagattagaaaaaacgatattgagtgtgaggttatagagttgcttccagttgttgtggtttgattaaagattagaaaaaacgatattgataaagacaaagcaacgggcgaatcgtttgttgtggtttgattaaagattagaaaaaacgatatttgtcggtgctaaaccgtaaaggtgtgagccgttgtggtttgattaaagattagaaaaaacgatattaaaagtaatcttcggaaatcgagtgccgatgttgtggtttgattaaagattagaaaaaacgatattgtttcataaacaaagcacccactttgttgtgttgtggtttgattaaagattagaaaaaacgatattcaaaggtaaagatgcacaacgtgtcgcagcgttgtggtttgattaaagattagaaaaaacgatattttcaaaacctgctttttgtagccaatcaccgttgtggtttgattaaagattagaaaaaacgatatttaaggtaaataataactctgctgcaatctagttgtggtttgattaaagattagaaaaaacgatattcaacaggcttaagtgcaaaatctaaagtgtgttgtggtttgattaaagattagaaaaaacgatattttatggtctcaaatgtatttgcttgaccgtgttgtggtttgattaaagattagaaaaaacgatattcggcactaaattcatactttaaaatcaaatgttgtggtttgattaaagattagaaaaaacgatattatctagtaaaatcggggtgcaacaatatccgttgtggtttgattaaagattagaaaaaacgatattatgggtttgggtttatgattttgagagaatgttgtggtttgattaaagattagaaaaaacgatatttattatttatatttgttttatgaatttcttgttgtggtttgattaaagattagaaaaaacgatatttaattcaattcaagtcctacgatactgctgttgtggtttgattaaagattagaaaaaacgatattttgtgccgctcccacaacactgtttaaggtgttgtggtttgattaaagattagaaaaaacgatattaagagttcggcgcaaactacgaggcttttagttgtggtttgattaaagattagaaaaaacgatattgatttctcgcaccgatgtaatggctttcttgttgtggtttgattaaagattagaaaaaacgatattttcttcaattttattatatttagttgaattgttgtggtttgattaaagattagaaaaaacgatattttttcttccaaagattgaaataccttcctcgttgtggtttgattaaagattagaaaaaacgatattcttttatttgtatatttgcagtatggatttgttgtggtttgattaaagattagaaaaaacgatatttttcgtttgttctacatagatcaagcaagcgttgtggtttgattaaagattagaaaaaacgatattagttggagccttaccttctaataatcaaagttttaagtggaaaatatcgttctaaaaaatgcttcttttttgcactgataaagcaagattgaagcatttttttattcctaaaataattccaattgcacagggccaggcggtttcgggacttcggctttgccccaaaaattcataatatttccaaactgtttatccgtgatgcgcaaaacactcactttcccaaatggtggaagcaattgttgcacacgcttttcgtgcacatccgcgctctcgctacttgcacaatgccgcatataaacagaaaattgcatcatattaaaaccatctttcaataaatttgttctaaatttcgacgcgttgtgtcggtcttttttagtttcggtcggtaaatcaaaaaacacaaaaatccacataattcggtagccatttagttccataattttggaaaatttagtttctttttttctcccgtaaagcattgttgcagagaactcgcagttttttgcaaacctaccatcaacggacttttttcttcattaaagtaaaccgtttgcgtcaagatttttagaaattctacttttacagcgcttgtcagatcttggttgtcgctcatttttattaattcaaaaactttttcatccaccaagggtcgaaacggttccatcatatcatctgccaaagcatacgcattatatttatttcggtgatggatgcccaaagtattcaaaagtccgcttccagaaagcgctctcgccgttgctgctcttaaaatagcataaccataattcaaaaaattattaggaaaatcaccaaatctttctcgctttacctttaaatcgctgtattcaaaaaaagccctccaataaagattagccgcaacgccttccatatttgaagtgtcgccgctcaacactcttgaagccaaaaaatttagcgagttactctcaccagttatcttttctaataataggccctgattggcgattttttctaccacagtttgttgccaaagttgctttttcaaaggtaaagttgcttcaatttggtttcgaaaaatttcttgttgaatataatggctattgaggttcagaaacatgccattgggtaaatgattgtttccgcagacaacaatggccgcattgttttcaaccaataaattcattgcaggaatacttaaaaaaacttgcggatgatcgatcaccaaataaccaacatcttccgccggaatcgtgctttctcgcaattctgttttaatgaccaattgcaaatgtttggtgcttaccgaagtcttgttttctaataaaatggttctctttagcataattaaagcatttttttaataaaaattgagttttcaattcctattaattagttttcattaaattaattgaattttcttcaataaaacttacggaaaaccatataacctgaaattaaatcaaattagtttaaatttgcaccttcaaaaaaataaaatagtgcgccctaaaaacttatctttgggccataaaaatgagcgctttcaacatcaaagaaaaccttaagaaaaaatgaaaaaaactacactttttatccttatttattttctacttttttttctgcattttgcgatttggcagtatttcaaattagggtttgaagttatatttcttaaatattatctgtttctcaccatactttttatgatggttataactgttttgtcgatatttaaaaaaatctatcccaactacattggttttgtttttttgggtttaattttgtttaaacttacgatgataatgctcctcaaaaaaaagttaaacatcacagaagttccgctctataaactgcattttgttctcccttatttaatttctttagtgttagaaaccttatacgccgtacaattaattaaagatgaaaaaaatcagtaaatattggcttttttattctgaaaatttgttatatttttgcaaaacttaaaacaagatataggaatgctgaaaagaataatactggttctgggatttttctcgattttttcaacatcttttgcgcagcatgagaatacaaatacggcggtaacttcagaaaaatctgaagcaaaatctagcctttctgaagctgaaaaaactaaacaagaaaataaggaattcatcgatcatcacgtattagatgcgcatagtttcgatattatgaccatcaaaaatgatgatggaaccgaggatcacaaaggcttttctttacccattattttttatgataaagccaatggttttcacgcatttatgagttctaaatttcaccacggcgaagaagtggtagaaagtaaaggcgcattctataaattagcacacgaaaaaatttacaaaacagacgcggctggaactttaactttaaataaagaaggccatgtagaaaacgaaaaagtattagatttatctattactaaaaatgttttgatgattttggttaccagtatcatgttggtcttaattttcacatctattgcgagaagttataaaaaatctgcagttccttctggcgcgggtaaattttttgagcctataattgtctttgttagagatgatattgctaagccaaatattggtaagaaatataagaaatatatgagttttttattgacgatttttttctttattttatttttaaatgtttttggtttattgccttttggtattaatgttacaggtaatattgccatcacattttcattagcgcttctcactttcataattacacaatttaccgctaacggaaattattggcaacatattttttggatgccaggtttaccttggtggatgaaaatcgtcatgatgccaattgaagttatcggtgtgttcattaaaccatttgcattaatgattcgtctttttgcaaatatgagcgctggtcacatcgtgatgatgagtttaattgctttgattttttactttaaaaatgttattgcaggtgttgcttttccattcttaacatttgtgatttatttactagaaattttagtagcacttttgcaagcatatattttcactttgctttccgcggtttatttcggtatggcaaatgaagaacatggccacgaaggtgaagaaggaatggtacattaagacattaatgataaaagataattgatgaatgatattaaatcgatattattaatagaaattaaacagatgaggaaatcaattagcaataattgtttatcaattatattaaaacgaaactaattttttaaaatttatattatgcaagaatcaattcctagaattattggtggtggtttagtagtaatcggaacaggtatcggtatcggaaaaatcggtgctgctgccttagaaggtatggctagacaaccagaacaagctggaaaacttcaagtagcgatgcttatcgctgcggctcttgtagaaggagtagcgtttgctgcactttttgcatcgtaagaagtttaaagaattctctcgtagattgtaacggttggttgcaatctgcgggtttttaaaaaattataaaaaacaaatttattatataactcttatgggattattagaaaatttttcatcaggtttatttattattcaatcagcaatctttttagtattgcttttcgttttgcgtaaatatgcttggaaaccgattttagatgcggtgaacgaaagagaaatcagcattgtagattctcttaaccaggctaaattagcaaaaaaagaagttgaaaacttaaaagccgaaaacgaaaatataatccgtgctgcgaaagtggaacgtgatgccattttgaaagaagcgagagaaataaaagacagaattgttggcgaagccaaagatgttgccaaagaagaaggcgataaaatgattgagcaagcaagacaagccatacaagctgaaaaatctgcggcaatggcagatattaaaaaacaaattggatctctttctatcaacatcgctgaatctattttgaaacaaaaattagatagttctgaagcgcaaaatgctttagtagaagaatatctaaacaaatcaaacttaaactaaaatgcgaacttcaaaagtagcaaaaagatatgcgcaaggtttgttagagttttccacagattctggcagcacaactgcacttttcggtgaaatgaaagatgtagtgaatatcttgaaatcttcaagagaattaaacagttttctgcaaacacctgttatagatagtaaaaagaaaattgctattttaggagaaatttttaaaaacttttcagttagtgcgcagaattttattagtttaatcatcaaacaaggtagagaaaaacaattgcagcaaattgcacaagcatttattgataaagtggaaactttagagggtttgcaaaaagtatcattaacttctgcaactcaactttctgcggctaatgtagatgcaattttaaaatcaacaaacttggtagatgcaaagcaaaaatttgatttgcaaaccaacatcaacccaaatattttgggaggctatattttaagagtaggagatcagcaagtagatgcttcagttcgctcaaaacttagccaattaaataaagaatttcaattaaattaagaaaataatcatagaatggcagaaataaatccagctgaagtttcagcaattttaaagcagcaattagccaattttgatacacaatctaatgtagaagaagtaggcacagttctcactattggtgatggtattgctcgtgtttacggattagaaaatgtgcaatatggcgaattggtgaaatttgaaagtggcgtagaaggcatcgtgctaaatcttgaagaagataatgtaggtgtggcacttttgggtgaatctcgattgataaaagaaggagatacagtaaaaagaactgaaagaatttcttccattaaagtaggcgaaggcatgcttggtagagtggtagatacccttggaaatccaattgatggaaaaggacctatcgaaggcgtgacttatgaaatgccactagaaagaaaagctccaggagtaatttttcgtcagcctgtaactgaaccgattcaaacagggattgttgccatagattctatgattccaatcggaagaggacaaagagaattaattattggtgaccgacaaacaggtaaaactgtcgtggccattgatactattcttaatcaaaaagaattttatgatgcaggtgaacctgtatattgtatttacgtagcaattggccaaaaaggttctactgttgcacaaatcgtaaaaactttaacggataaaggcgcgatggcttacacaactgtagtggctgcaaacgcttcagatcctacaccaatgcaagtctacgcgccaatggcgggtgctgcaatcggtgaatatttccgagacacaggtcgtccagcgttaattatttatgatgatttatctaaacaagctgtggcgtatcgtgaattatctttattattaagaagaccaccaggccgtgaagcttacccaggagatgtcttttatttacactccagacttcttgaaagagcagcaaaggtaattgcagatgatactatcgcaagccaaatgaatgatttgccagagtctttaaaaccaattatcaaaggtggaggttcattaacggcgcttccgattattgaaacacaagcaggtgacgtttctgcctatattccaacgaatgtaatttcaattactgacggacaaattttcttagaaacagatttatttaattcaggtgttcgtcctgcgatcaacgttggtatttcggtatctcgtgtgggtggaaatgctcagattaaatctatgaaaaaagtttctggtactttaaaattagaccaagcgcaatataaagaattagaagcatttgcaaaatttggttccgatttagatgccgccactatggctgtaatttctaaaggtgaaagaaacgtggagattttgaaacaacccgtaaattcgccattacctgtagatagccaagttgcaatgatttacgcaggaaccgaaaatcttttgaaatctgttcctattagaaatgtaaaagaatttcaaatagaatatatcgattttttaagaagcaaacatccggaaacaatggctgcaattaaatctggtaaaattgatgattctatcacatctgtcttgaagcaagcagctgcagaattagcatcaaaatataattaaaattagttgatgattgttggctgttagttgatggattttttctcagactaacaaccaacaaccgacaaccaacaactaaaatagaatggcaaacttaaaagaaatacgcgcaagaatatcctccatctcttctacgatgcagattacaagtgccatgaaaatggtatctgctgcaaaattgaagaaagcacaagatgcaattgtgatgcttagaccgtattctgagaaactgcaagagttaatagaaaatgttaattctaacccagagccagataatgtgtcgccatacgcaaaacaacggcctataaaaaaagtgctttatattacagtaacttccaatagaggtttggcgggcgcttttaattcttcagtaataaaagaattgaatacaagaatttctgaaaacgactacgatgtagaaatacttgcggtaggaaaaaaggtttatgatgcggtaagaaaaactagaactgtttttgataatcaaagtgctgtatatgatgccttaacttttgaaatcgtgtcccgatttaccaaaaaagtaatgaaagaattcactttgggcacgttcgataaagtgtatatcgtttacaacaaattcatcaatgcggcaacgcaagaagtgattacagagcaagttttacctattgcaatgcctgaaacggcctctaataatacaagcaaagattatgtttttgaaccaaatgctaaagaaattttagatgttctaattccaaaatctattaaaacgcaagtttacaaagcaatattagattcggttgcatcagaacatggcgctagaatgaccgcaatgcacaaagcaactgataacgccgacgcattaagaaatgaattgaaaatctactacaataaagcaagacaagcggctattacaaatgaaattttagaaatcgtttccggtgctgaagcattgaaagattcttaaataaaaaatttttagataaagttaaagactgtattttttacagtctttttttgtggctaaaaactgggtgtttttcctctgtttttttttattaaaaaattagaactttgagaaggctaaatattaaaaattaaaaccatgaaaactcttttcctatatttttgtagaattatcatttttatattatcgcctttagataaatattttaaaatttataggcctcaaaaaaataattaataagtaaagattttatcttggatgaactaaaaatattcaaatatattttagtgttaactgttcagatttcaataaatttatattaagaattttgtttgtcgtctagttgctttttaagcattttctgttcttttattaaaatttataaaagatttttaatttaaaatcaatttgtttaaggtctattttagaattatatttgaaaaattttagaaatagaacatggcttcaggatttttcgcagttttagatgatatttcagttttgctggatgatgttgcaatgatgagcaaaatagcggcaaaaaaaaccgctggaatcttggg

SEQ ID NO: 1014 - DNA, 24677 bp, synthetic construct
  misc_feature 1..24677: note = Synthetic
  source 1..24677: mol_type = other DNA
atcaaacacatagcaagagcatcacccataacgagttgtgcggtagtactatttgttggggccaaattatgaggacaagattccgcatcaacagtggtgtttagaacaaattgagactcttttgccaaaaacgaactgatatttccggtcatagcaattagtgtatttccaaaacgttttaggagtggaactaaaatttttatttcgggactgttgccactttttgaaatacaaagcacaatatcgtcaggctgaaccattcccaaatcgccatgaatggcctcggaagcatgcaaaaacagcgatggtgttcctgtagaattaaatgttgccaccattttttgtgcaataatggcactttttccaatgcctgttacaatcaatcttccttttgattgaaaaagaatttgtgtagcttctacgaagttaaagtcaataaaatcaatgagtttagcaatagattcgctctcagagagaatagttttttttgccaaaatcaatatattttcttttgtattcaaaatagaattttataaaatttgtatgtatgaaagaaattagtatctttatgaaacgcaaatttagataaaataccattaataaagaatgaattcaaacgaaattgacatccacagagaattaaagaagtattttggcttcagccaattcaaaggtttacaggagcaagttatcaaaagtattctcaataaagaaaacactttcgtgattatgcctacgggcggaggcaaatcgctttgttatcaattgcctgctttagttcaagaaggaacagcaatcgttgtttctcctttaattgccttaatgaagaatcaagtagatgctattagaagtttatcttcagaaaatggcgttgctcatgtattaaattcctcactcactaaaaccgaaattgctcaagtcaaaaccgatattacttcaggattgaccaagcttttgtatgtagctcccgaatccttgactaaggaagaatatgtagcttttttacaaaatgtgccaatttcatttgttgctattgacgaggcacattgcatctctgaatggggacatgattttagacctgaataccgaaatctaaaacatattatcaagcaattgggtaacgttcctattataggtcttactgcaacagcaactccaaaagttcaagaagatatcttgaaaaatttagatacggtcgatgcaacaacttataaggcttctttcaatagacctaatttatattacgaagttcgtaccaaaaccaaaaatattgaagcggatatcattcggtttatcaaattacacaaagggaaatcaggaattatttattgcttaagtcgcaaaaaagtagaagctattgccgaagttttgcaagtaaatggaataagtgccgttccttatcacgctggattagatgctaaaacaagagccaaacatcaagatatgtttcttatggaagatgtagatgttgtggtggcaaccatcgctttcgggatgggaattgacaaacccgatgtgcgttttgtaattcaccacgatattccaaaatcattagaaagttattatcaagaaacaggtcgtgctggacgtgatggtggcgaagggcattgcttggcatattactcttataaagatgtcgagaaattagaaaaattcttgtcaggaaaacctgttgccgaacaagaaattggttttgctttattgcaggaagttgtagcttatgccgaaacttctatgtctcgaagaaagtttttacttcattattttggtgaagagtttgatactgaaactggagaaggtggcgatatggacgacaatgttcgcaatccaaaagtgaaggtcgaagctaaagatcaagtggtcaaattgctcgaagtagttcgtgataccaaacacatttataaatctaaagaagttgtttttaccctcatcggacgcgtaaatgctattataaaagcgcatagaactgatgttcaatccttttttggctctgggacagatcacgacgaaaaatactggatggccttattgcgtcaagttttggttgatggattattatctaaagatattgagacatacggagtgataaaaatcactcaaaaaggattggattttatcaaaaaacctgagtccttcatgatgtctgaagatcatgaatacaacgaatctgaggatgaagctatcgtaactgctgcaaaaggctctggagttgccgatgaagttttaatgggaatgttgcgtgacttacgtaaaaaagtagccaaaaaactaggagttcctccatttgtggtttttcaagacccttcactcgaagatatggctttgaaatatcccatttcaatggatgaattgatcaacacacacggagttggtgaaggaaaagctaagaaatatggcaaggaattcattgctttaatcagtcaatatgtggatgacaatgatattattcgtcccgaagatttggttgtaaaatccacaggagccaattcgatcaataaattatatattattcaaaatattgatagaaaattaccgctcaatgatattgcttctgccaaagggttgacaatggaagccttgattactgaaatggagcaaatagtcaattcaggaaccaaattaaatatcaagtattggattgatgaaatgctggacgatgatcaacaagaagaaattcacgattattttatggaatcccattccgataatatagaggaagctctaaaagaatttgacggcgattatgatattgatgaattacgtctgatgcgtatcaaatttatgagcgaagtagcgaattagaaataaattccaattttttaaattccaaataccaatcttctaagttggaatttggaatttttttattggattttaaccttcaaaaacctctccacgatgtggtttcaaggcatcgcgtacttgaatcatcgtttcatcagtaacgaccataaaagctgttgcatacatttcatttatgatttgaaaacccgtaatgtttggcgttaatttctctgcaattatatattctttcaaatgaatttcgtgatgttcagcagtttttgccgaagttgggccacgaaaatcccatattagttttatttgtctggacatttttggatgtttttagactgtaaaaatacaaattgaaaatggatttaaattcaataagtaaagttcacatcaaagtagtatttttgcatttcgttattgctattcaataactattaatttacaatgccacaagaacttctctttcaaacatcgccagaaacagctacaaacgaattgttgctcaaacaacacatagccaaattaattcgggtggatgttaaagaaatccaacatatttccattttaaaacgttcgattgatgctcgccaaaaagcggtgaaattcaatttgaaagtcactatttatttagttggcgaaactattcaagaagctaaaattgagttaccggaatataagaatgttgctaatgcactagaagtaattgttgtaggagctggtcctgcgggattgtttgccgctttgcaattgatagagttaggtttgaaaccgatagtaatcgagcgtggaaaagatgttcgaggtcgtcgtcgcgatttgaaagccatcaatagagatcatatcgtagatgaagattccaattattgttttggcgaaggtggagcaggaacctattcggacggaaaattatatacccgttccaaaaaacgtggcgatgttactcgaattttggaattgtttgtcgcttacggggcttcacctgatattttggtcgatgcccatccacacattggaaccaataaattaccgcaaatcatccaagatatgcgggagaaaatcatcgaaatgggaggaatggttcttttcgaaactcgattgaccgatattctcattaaaaataatgaagtgcaaggcatcgtgaccaaaaacggcgacacgattcttgccaacaaaataattttggcaacaggacattctgctcgtgatgtttttgaattattggacagaaaacaaatttttatagaggctaaagcttttgccttgggcgttcgagccgaacatccgcagtcgttaattgatagtatccaatacagttgcgattatcgaggacagcatttgccgccatcgccttattctattgtgaagcaagtaggaggaaggggaatgtattctttttgtatgtgtccaggtggtgtgattgcaccttgcgctaccagtcctggcgaagtcgttacaaacggttggtcgccatccaaaagggatcaagctaccgccaattctggaattgtggttgaattgaaactcgaagatttcaagccatttgcaaaatttggtgctttggctggaatggaattccaaaaaagcatcgaacagaaagcttggcatttggctggagagacgcagaaagttcctgcccaaaaaatggtcgattttactcaaaataaagtgtcttctaatattccaaaaacttcttatgttccaggaacgacttcggtagaaatgggggaggtttttcctggattcctcacccaaatattaagagaaggttttgttgaattcggaaaatcaatgcgtggttttttgaccaacgaagccgttcttcacgcaccagaatcaaggacttcttcgccagtgcgcattcctagagatgccgaaactttagagcaccttcaaataaaaggcttgtatccttgtggagaaggtgcaggttatgctggcggaattatctcggccgctattgatggtgaaaaatgtgcgttgaaaattggggaagttttgaaggctactttgtagatttctttatcgtgtttggttataaaagagtcaataaataacccataagtgaaccgcccaaaacaataacagcactatttattttctggtatccaaaggctgttgcaatgcttaaaatcgcgatgctaatggttcgccaatctgttatggtttctttacccatatcgaaacaaatagctagaataatggctaccgaagctacatttactgcatccaaaaatgctgagaatagtttagaatttcgcattttctttacaatggggttgagcaaggcaacaaatacaaaagaaggtagaaaaatggcaattgttgaaacgatggctcccgtcaaaccattaatttgatagccaataaatgttactgacgaaaaaactgggccgggtgtgaactgcccaaccgcaatagcgtctatcagttggtgtcgtgttaaaagtcctgttgcaactaattcggtgtctaagaaggcaaataaaacataaccgcttccgtaaagaatagcaccaattttcagaaaaatccaaaacagattagcattggttgccgaaattagagttgtattgcttattggtataaaagtcaagggtagaaaactacttaagtttttttgttccttgtctctcaaataggccaatagcaaagcgaaaaatccagcaccaaacatcaagtaaatttcgctgaagtggagtaaggatcccgctaaaacggttattccgataagtataagttcggttgattttaaagattttttagccaaaggaaaaatagcgcccaatataatggcaataatcgctggttttattccgtaaacaaagggttgtacttctggaagttgtccgtattgtttgtaaccccaagcaaaaaatcccgtaataaaaaccgctggaagaatgaagcaaagcccagcgacaattagccctttccatccgcctttttcgtacccaatatgaatcgccatttcggtactattgggacctggaattagatttgtagcacctattaagtccagaaaatgttgttcggttagccattttcttttgcttaccacttcgtcttgcatcatggcaatatgggcagcaggaccaccaaaaccaataattcctaattttagaaaaagttttgcgatgtctttaatggccgctttattctccattgtttattaagtttttgtccacagaccaaattgctacttccgttgaattattttttaagtatttttagtagagaattgcatttgaccacacaatggttttctttgattggaaatcgattcgataaaattattaattttcagtaactatcagaaactattttagtttttctttaaaacaaaaaaaagtcccaccgaagcaggactaaaatattttgatatttaagatatgttggctgtttcatcacctcataaaacttttaatgattactttgtacttctactccaaggtccgtagtttttataggctggacctgttagtttttgtctttcaccaccagaaattttaacctcgactaggtcttttttggaagaatcattcgaaacttgctgatttttataagctggtccagttaaaggttttttattgttctcagaatataattttaacggctcagatttatccatccaaactttataatttttataggctggcccctttaaatcattcttttttacattactttcttcttgcgcaattgagctaaatgaaaatcctaaaactgcgaaaattaaggctattgttttcatgactattacttttatgattttttacaaaattacatacggtaatagaaaattaggattatgtgaatctacgctatttgtatccgtataaatacggatgctttttgttttgagagcattaaatcaaattcatttctgctgcttttttaataagttcggcggtatttttcacttctaacttttttaggatattggctcgatgggtttctattgttcgtgaactaacatatagttttgcagcaatttcattagtagtcaatcctttcgatagtaatcctaaaacttcggtttccttatttgataaaacattttcactgatgctttgcgttgacataaagttgatcattttttcagaaatttcaggactaaaatatttctttcctttactaaccgtttttattgcaaggattaattcggattcgtctgtgttttttaataagtagccgtaggctcccaacttggcgcattttgcgatataatttccgtcatcgtacatagaaattacaataggttttatagtagaattcaaggtttttaattctttcaaaacttgaaaaccatctctattgggcatagtaatgtctagtaatacaatatctgccaccaattggttttttacaatatcaataaactcatcaccatcggcaacacttttaattatttttatgttatcatgtttttttagtagtccttcaagtccttctctaaaaagcttatggtcatcagctattattaatttgatttcgttcatgattctatgggtaattcaatttcaaaggttgtatttccggctgctgcattgattgtgactttgccattacaaatcgctacacgttctttgatgttactaattcctaaacctaatttgatagtagtaacatcaaaaccaataccgtcatcaaaataaaaaagtgacataaattcatcaaattctgaaagtgtaattcggatgttttttgcattagagtgttttaatgaattattaattagctcttggctaattctaaaaagattaattgcttgatggtttgtaatgttggagttctcttgcttcgtcaaatcttcatatacaatagttactgttgttgattttttgatattttcgataaagttagttagcgtaactccaattccaaaatcatctatagcagcaggcatcaatgcatttgacatcaatctgatttctgcaatggtatcatcaactatttttttcatttctttttttatcttttcattttccactttattctcaatatagtgtttcaaagaggttaaatagggtcctacactatcgtggagctcacgagacaaccttcttctttcgttttccataccgtttactaacatccgttgtgatagtattctagtattttcttcgttattcctaaattctatcagtttatcccgcatcgccaaaaggctttttcctaggaggtcattggtgcttttgagttgatagtcggtggttaaattcattttgccaatgtcatctgagaattttatggcaccttgtagagaagctttcaaattggctaaagcatcaaacatttcctttatttcagtagagttttttataaaatcattggtttggttataatcgccttccgccataattttaagacttttttgcatattttttatcggattggtgatgattctggtaagaaaaagagagagcataacggctaataaaaaaataccaaaagtcaagcccgccagtctttcttttaaattttttaagggcaaagtaacttcgtcaacatctatttcagatagaattgccatttttaagtttttaatttcaatacgacttgacacaccatatacctcgatacctcgataatccttgcgaatattaaagacatctttgcctttaaaggcctttattgcattttctgcttttacagatagggtgtaaggaattgtattaggataaaaacgagattcagaacggagtcgataatcgctacccacaagataggattcgccactacttcccattcctgtgcgttcaaagagtatgttttttattttgttatactctaaaattttaatcaacgccccttttttagtatttaaaataaaaccaatagttgtttttttgttaggatgataccttgtaaaatcgtgaattccattaattttttttatgctatctggtagtataaatgggatactatcgctattttggttgtacaattcagaagactcaaacttttgccattccgattggattaaatgttcaatctggttttttttgagtgttttaatagagtttaattgctgtaaaatacggtcgtttaaaacgtttgaaaactctttgtatgaagaaaaagccaataccacaattacaaatgcgattaaactattaattataattagtattgaagttttaatgctcactaaaatctattttaaaatattaatataaaaagtgtttcattttttgcaaccctactttagagattgttagtttttactgcagatgaattccaatatctaaaccgtaactacgaatccaaaagtagttgaaaattgcaaattacaaaaaaaaagtcccaccgaagcaggactaagtatttttatcaacggcatatagccttattgtgataccattaaagattagaaatttgattactgaatcattaaagagtatagaattattattttcgaacgaattttagtgtggctagcatcgatttaaacttctttcctggtctaaaagtaaccgaggaactttttatattttttggtgaaacctcattaggcattatactcggagttccttttacactaatttggaaggaacctaaatgcccagcccttacaattttgccttcctctaacgattgacaaatgacatctaccaaactaataattacggcatagcaatctgtttgagttactgttgtattataggcagctagtgccgctagttcgtctagttctatttctcctgttttggttactttaggataatacaacataggaagttctggatttatagggcttttttttccaataggagtgatgcttacagccatagctatattgttttggtggtttaaaaaaataatcttttcaaagttagcgattttatttgacaagccgcctaacttaccgcagtagattatgtaatttactgcggtaagtttagtatgttaccgcggtaaaattgattgaggagctttgcacacttttaattaagccaagtttatcttgatcggttggtgtagtaaactatttttagctgttttataaaaacaaaaagtcccaccgaagcaggactaaagattttacatctacggcatatagccttattgtgataagattaaagattagaaattttaatcgtttacaaatatatacaaaaaaaactttagttggaatgaggaaaaccgtaaaacagttaattattttctgcgtatttttagaaattcttaaaaaatatagattggtatggcaaaaatattaggattggatttagggacaaactcgattgggtgggcgattgtggatgatgttgataaaaaaataattgattctggagtgcgaatttttcctgaaggagttgttgcaaaaactattggaacaggagataaagaagaaagtaaaaatgcgagtaggcgtaatagtcgccaacaacgacgtggtttttatcgtaaaaggttaagaaagataaaattattaagaactcttattaatctcaatatgtgtcctcttaaaaatgaggaactagatatttggagtaaatgggataaacaaaaaaagaaggaagtacgaatggctcctgaaattcatttgcctgaaaatcattcttattgtttgtggttgaagcaaaatccctatttattaagagataaagcattaaatgaagatttaactctacaagaatttggtagagtgttgtatcatttaattcaaagaagaggttttttgagcaatcgtaaaggaaaagatgatgggaagatttataaaggaaaagacggtgttaaaggtattgaggatactcaaaaagaattacaaaattctacattaggaaaatatttgttcgatattttgccaaaggatggagaaccttttaaagtaattcaagatgaaaatggtaatgaattgcgagttcgttcaagatatacgttgcgtgatatgtatgtggctgaattcgaaacaatttggaataggcaagctgcgaatttaggtcttgaaaccattgaatacttaaatgagaaaaaagttttgctaaaaggcggtttaaaaaacaaaagaaataatagtaaaatcgaacatctcaaaaagataaaaggagaaaacaatgttgaagtagttgagttgaatgatgaattgtcaaaaaatgataagcagaaatatttacttaaaattaaaaccaaacttcctttaaaagaattcttggcgggtagaatagataaagatgaggagggagtcttgaaatttaaaagtaatgatagtgttttgttttggcaaagatctttacgttctcaaaaaggacttttagctaaatgcagatttgagccagatttgaaagatgaaaatgggaagtttatacaaaagggtaaaacaccttgccacatatcacatcctttatatgaagaatatcgagctttacaatatatcaataacattgaatacggtaagaaacaacgattggaggaatcacagcgtttgcaagtgttggaattaataaactcaagagacaagaaatttgattttatagagataaaaaagaaattgaaattagaatatgaaacgtttaattatgaagacgatgctccagttataggtaattatacaacaaaacatttgaacgctttatttccaaaatcgatacttgaaaaagaattttctataaccgtaaacgaggaagaaaaaacagaatatggatatgagcgtatttggcatttatttcatttttgtgaagacaatgataagttaattagaggtatagaaaaacttattaaagagtctaaaatagattatgttttaaatgaagcaataattgaaaaaatcgaaaaagtaaatataaaagaagattattcaagtgtttctctgaaagccataaaaaatatcttgccctatctgaaaatgggattgcgtttaagcgatgctgttatattagctggagttagaaatgcttttggcaaaaaatgggaattatataaaaatgaccatattgaattagagaaagatttgctcaaaataaatcaccaaaagtcaaacaaagaaggagaagcaattgagaaaataaaagtctatttgattgaaaataaatatggatttattgaagatgatgttcgatttaaaaaactgtatcaccatagtcaagaggtagttcaagtaaaactaaaagataaaattgatactgttcaaaatttgagaaatccaattgtgcaacaaggagtaaatgaaactaaacgccttgtaaatgaattgattgctcagcaaggaaagtttgatcaaattagagttgaacttgggcgggatttaaagaatagtaaaacgaaacgagaagaattagggtataagattagagaaaatgacaagaaaaacgaaaaggcaaaagaattattgattgaatttggtttgcgacaaagtagagagaacattcaaagagtacttttgtatcaagaaatgccaatttctatttgtccttatacaaacaaaacaataaacatatcggatttattaggaggtaaaaataaatttcaaatcgagcatatcatcccaaaatcaatctctttagatgatagttttgcaaataaaacattgtgtgattcagaatttaatggtttaaaaggaaatagaactcctcacgatttttatgaaattaataaagatccaaatctttggggaggtgcaaaatcgtgggaagaaattgaacgacgtgtttttaaagttttgccctacccaaaagcaaagcgatttgtgtcgaaaacaaaatttgaaaccaacgattttatccaacgacaattaaatgacactcgttatataagtaaaaaaacgagcgaaatcttatctcaagtttgttctgatgttcgtgtaatgccaggaagtttaacagccgaattgcgtcgactttgggggttgaataatattttacagcctattatgacggtggatattccaaatttacatattgaagaaaataaacatatacagcactatgtagttttagacaatgataaaaagcctgttttgtcacaacgaatttattatgacagaccaacaacaaatgaaaatgaaacacttttgtctggaagtattgaaaagggagtttttaaatcgaaagagcagtatgttaaatttcaggtagatgcaccagatttagcaaatggcgattattgggcaaaactagttttgtctaatccaaaaaatattcttcaagtatttagagacaaaccaagcactttggaaaatgaaatagttttaagaggtaagattgaaaaggataaattcaaaaatgatggattgaatgccataaatactactggcaaggaaaacggaacttattgggctacattttcaataactaataaggattttaaaaaaccagttaaagaagagcaacccaagaaaaacggaaagcaaattcttctatttggagaagtaaaagaaggtcttttttcttcctatatttatgaatgtgaagcagaattagaagatggaaagtattggcttatcatagatgtagattttgaaaaggtttcgtttgaaaaagcattaaacgaaagaccgcttgtaaaagaaaatcaaattttgattcaaggcactacaaatgatgaaaatacatttgtttcggatatggacaatcaacatcattttgaaatggaagaaggcaaagggaaatattatgttttgtttgacatcgtttctgaagtaactgaattttcgccagttaaaactaccaagccagttctcgaagaaggacaaacaatagttgaagggacaacttgggttgataaatatactggtgaaataaaatttgacccaatcaaaaaccgtgaagaccatcgccatcacgccattgatgctttagttattgctttaacaaaagaatcctttttccagcggttgagtaaacaaaatgcctcaactgaaaacaagaaaagagggaatgaacacgaaaaagagcatttagattttccagaaccttggaatggatttcataccgatgccaaaaatgtcatcaatagtattctaatctcacacaaacaaaacaaaaacatcctaacaaaaatcaccaagaagattaccaaaaacggacaaacttttaaaagtgtaggtatggctgtgagagggcagctgcacaaagaaaatctgtatgggaacaggacaccacctaatggagatagtggatttcatatcagaaaatctattgatagtttaaaaacggataaacaaatagaaaagattgttgatattaaggttaaagaaataattataaaggcaagaaaagcagaaattcctttgtataaagaaattgaacaactttcaaaacaattaaaatcaccaaaaaacacagaaatagaggaaaaggagcttaaagaaaatattgaagcattgcatactaaaattaaattgctttatactttacctaataaaaatggtgaacccgttccaataaaaaaagttagagttagtgaggaaatgagtaatgcacagcaattaaaatcaaaagtaaaacaatatgtaaacccaagaaacaatcatcatatagtaatctataaagacgaaaatgaggagttgaaagatgatattactaatttttggaaagtagtagaaagagttaaacaaaaagatgaaatctataaactacctgaaatagaaattggtaaaccagctcctaaagaacttgtgttaacttttcaggaaaacgatatgtttttgttaggactttctaatgatgagttcaatgataataaacaagactttacttttttaagtaattatttgtatcgagttcagaaaatttcagatggagattattcatttagacaccatctcgcgtcaactgtcacaaataaaatggaggaagttagaatagcgagtatgaaaaagtatcaagaaatgaatccaataaaagttagaatttcatttactggtaaaattgaaaagttgtaaatttgaatgttctttgacatttcgttctaactcttaaacatctcaaaccacaactgaaaggtatggcatccgcccagcagggatgcagtagctttcagttgtggtttgattaaagattagaaaacacgatatttgtatcaacagtttactgtaatgacgaccagttgtggtttgattaaagattagaaaacacgatattatgtatgtagagatatacactactttaggagttgtggtttgattaaagattagaaaacacgatattaaaattgaaattaaatggcaaaaagataaagttgtggtttgattaaagattagaaaacacgatattaataaagccgaaacggtgcttagtattagcgttgtggtttgattaaagattagaaaacacgatattcttttctctaaacttcataaaatcgacgtgttgtggtttgattaaagattagaaaacacgatatttcatctaaaaaatgcgacaaaagagtttctgttgtggtttgattaaagattagaaaacacgatattaaagctaattcacatactgcaatggttgcagttgtggtttgattaaagattagaaaacacgatattagaggtgcttcaaataaaattgtaggtaaagttgtggtttgattaaagattagaaaacacgatattttgtcattaatcacaaatgaaataaatactgttgtggtttgattaaagattagaaaacacgatatttcaacattgtttaaattatcctttcgtaccgttgtggtttgattaaagattagaaaacacgatattgcaaatcaattatcaacagtacaagacatcgttgtggtttgattaaagattagaaaacacgatattgcattccccttgatttgctataattccaacgttgtggtttgattaaagattagaaaacacgatattaagtgattttaataatgtttcgatttgtctgttgtggtttgattaaagattagaaaacacgatattttgatttgccagacgctttaggttctactagttgtggtttgattaaagattagaaaacacgatattgaaagatgactagagtaatgcctgctttatgttgtggtttgattaaagattagaaaacacgatattgacgcagctaaaaaaacaactgcttctaaagttgtggtttgattaaagattagaaaacacgatattgtaaaagaatattcccttttgagtcgtgaagttgtggtttgattaaagattagaaaacacgatattagttggcttgttaccttctgatattcatagaattaaaagtaaatatcgtataaaaaaatgcctctttattggtttgataacccaatattgaggcatttttttgtttctagaaaccaccccgccctttgggcacccctccagtggaggggaagatcaaaataattctaattgtgtgggttgaggtgctttggggacttcggctttgccccaaaaatttaggatattgccaaattgcttgtcggttattcgtaaaacactcactttgcccaatggaggcaaaaggttgtgaatgcgtttttcgtgtacatcggcactttcgccactggcacaatggcgaacataaaccgaatattgcatcatcgaaaaaccatctttgagcaagttgttccgaaatcccgaagcgtttcttcggtcttttttggtttctgttggcaaatcaaaaaacacaaacaaccacattattcggtaggcgttaagttccataatttgggatatttaattttctttctttgtcccataaagcattgctgcaaggagctagccgttttttgcaaggctaccatcaacggacttttttcttccttgaaataaacggttcgggttagtacttgcaggagttcggctttgattttggtgtttaattcctgttcgtcataggtttgcataatttcaaaaactttttcgtcaaccaaggggcggaacggttccataatatcatcggcaagagcaaaggcgttgtatttgcttttgtgatgaatgcccaaggtgttcaataaaccgctgccagaaagtgctctggcggttgctgctcgaagaatggcatagccataattgaggaaattattgggataatctccaaaacgttcccttctgaatttgatgtcgtaagtatcaaaaaaagatttccagtattggcttgctgcaacgccttccatattagaagtgtctccgctcaaaactttgctggctaggaattcgaaactgtttttgttttgggtgattctttctaaaagcaaaccttgattggttattttttcgacaatggtttgttgccataattgtttttttagtggaatggaagcatcaatttggtttttgaagacttcttgctggatgtggtgactgttgaggttcaggaacattccgttgggcaaatgatttttagaacaaataattacggatgtattgttttctaccaataaattcatagctggtaaactaatgtaaatttcttgatggtctaaaaccaaaaaaccaatatcttcaatgggaatcgcgctttcccgaatttcagatttaatgactaattggaggtttttggcagtaatagccgttttattttctattaaaatggatttttttagcataatagtaggattagatattgtagaagactaatttactgatagatatgatggtgtttttacgggaaacctcattttcataattttttttggtttgcgtgaagtatggaagcgacatcctcgtagtgaagcagagagatatagcggacagcctgacagcatcatagcttgaggaggtgatggcacgctcaaataaatacattgttaaaaaaactcacaattcacaattcacaattcacaattaacttatctttgcgcactgaaaaatgtacagatgaaatttgatttattacaaaaagatccacataccaaagccagagcaggaagtattactactgatcatggtgttattgaaaccccaatttttatgcctgttggaacggttgcttcggtaaaaggagtccaccaacgcgaactgaaagaagaaataaacccagatattatcttggggaatacctatcatttatacttgcgtccgcaaaccgaaatcttggaaaaagcgggtggattgcataaatttatgaattgggacagaaatattttgaccgattctggtggataccaagtgtattcgctttcttctaaccgaaaaattaaggaagaaggggtgaaattcaaatcgcatattgatggttcctaccacgtttttacacccgaaaatgtaatggaaattcagcgtaccatcggtgctgatatcattatggcttttgacgaatgtacgccttatccgtgcgattatcgttatgcgcaacgttcgatgcacatgacgcaccgttggttggacagatgcatcaatcatttggaaaaagtgccttttaaatatgggtatgaacaaactttttttccgattgttcaaggaagtacctacaaagatttacgccgtcaatcggcggaatatattgctaattcaggtcaacaaggaaatgctattggaggactttcagtaggagaaccagccgaagaaatgtatgcgatgaccgaagtggtttgtgaaattctaccagaagacaaacctcgctatttgatgggagtaggaactccgattaatatcttggaaaatattgccttaggaattgatatgttcgattgtgtgatgccaactcgaaacgctagaaacggaatgttgtttactgccaatggaaccatcaatatcaaaaataaaaagtgggaagacgatttctcggtaattgacgaaatgggccatacttttgtggatacagaatacagcaaagcttatttgcgccacttatttgccgccaatgaataccttggaaaacaaattgccacgattcacaatcttgggttttatatgtggttggttcgtgaggctagaaaacatatcttagccggagattttagaacttggaaagagatgatggttcgcaatatgagccagagattgtaaatagttgaaagttgaaagtttttagttgatagtaattcaacccaaaacctaaaacccaaaacccaaaaccgaactaaatgttaacaataatagacaaatacattctaaagaaatacttggccacatttggggttatgttgggtttatttgcacctattggaatagtaattgatatttcggaaaagattaataaaatgatcgaaaacaagattcccattatggaaattttggtttactattatcattttacaatttattttatgaatttgttgtttccgatatttttgtttttatcggtcatttggtttacttcaaaattagccaatgatactgagattattgctattttaagttcaggaatttcgtttactcggtttttgagaccttttatgattggagctactattgtttcgttaatcgttttgttgatggggttttttatcgttccaaaatcgaatgaaggttttaataattttagatatacttatcttcgtggtgatggtaaagaaactgtaaggggaaaaaatacagatgttttccgtcagcttagcaatgatgaatacatctatgtcaatagttttgatgtagcatctaaaacggcttataatttcacttatgaaaaattcaccaaagataaattagcttataaaatttcggcttcaaggatacagtggaatcctaaaactaaaaattatacgatgtatgattatgtcaaacgaactgttggaggattggatgataaaattgaaaaatcggataaaaaagatgctaaatttagttttgatctcgacgatataacaccagttatttatatagccgaaaccttgagtttgggtaagttaaaccaatttatcgaaaaagaaaaaaagcgtggttcttcaaacatcaatgtttataaggtcgttttgtataaaaagtacagcatacccgtatcggcatttattcttactgtaattgcagttgcggtttcatctatgaagcgaagaggagggatgggattgagtctagccatcggaattgcattggcattttcttttgtgtttttcgataaaatattcggaaccttggccgaaaaatctagtttcccaccattattggccgtttggattcctaatctagtttttggaattttggctgttttcttattacgcaatgcaaaaaggtaatttaaagagttatttaaatcttcatttaattgtatttatatggggttttactgccatattaggagctttaatttcaattcaggccgatgctttggtttggtatagaatgctatttgcatcggtatttttgtttctatttattctctttaaaaaagaatcttttcaaattcctataaaagaatttttcaaattaatttttgtcggattactgattgctcttcattggattttcttttttgaggctattcatgtttctaatgtctctgtgacattggccgttttttctttaggtgcttttttagcttctattttagaacctattttttacggtcgaaaagtgctttggtatgaagtgttttttggacttataattattgcagcattaggaatgattttgcaagttgaaatcaattatttcgaagggattatgtatgctttggtttcaataattatcggagtattattcaccttaatgaacggaaagctaatcgaaaaacacgaatcttccgttattaccttttatgaatttctcgccggcgtgttttttataacgatttactttttttttactagtaaattcaatgtcgatttttttattctgactaccaatgattggatttatctcctcattttagcttcggtttgtactgcttatgcttttaccgcttctgtaaaggtgatgcgagtactttcgccttatacagtgatgctaaccaccagtttagaacccgtttatggaattattttggcgtattttatccttggtggaaaagaaaaaatgagcgtagagttttatatcggagccttattgattgttttaacggtaattctgaacggtattgtcaaacattacctgtctaataagaaataatttttttcaaggattttaactgtcaatttatttgtaattagatgctaattatacgtttttgataattttaaattttatatttgcatttcaaatcaaacaaaaactactataatttatggaatatttagattttgaacttccaataaaagagcttgaagatcagttagataaatgtctagtaatcggtcaggaatcagaggttgatgtgacaaatacctgcaagcaaattaccaaaaaactagaagaaactaaaagaagcatatataaaaatcttaccgcttggcaacgtgtacaattgtcaagacaccccaatagaccttatactttagatcatataaaagcactttgtggagaaactttccttgaacttcacggcgacagagggttcaaagatgataaagcaatgattggtggtttaggtaaaattggaggacaatcgtttatgctaattggtcaacaaaaaggatttaataccaagacacgccaatatagaaattttggaatgccaaatcccgaaggctatcgaaaagctttgcgactaatgaaaatggcagagaaatttggaattccagtggtaactttgattgatactccaggagcttttccaggaattgaagccgaagaacgcggacaaggagaagctattgccagaaatatttttgaaatggttcgattgaaagtgccaatcatctgtgttattgttggagaaggagcatcaggtggagcattaggaattggcgttggagatagagtttatatgatggaaaacacttggtattcggtgatttctcctgaatcttgttcgtctattttatggaaaagttgggattataaagaacaagctgccgaagccttgaaattgacttctgcggatatgaaaaaacaaaaattagtcgatgatattattcctgaacctcttggaggagctcactttgacagagaatcagccttcaaaacagtagagcaatatattatcaaaggcttcaacgaattgaaagacttatcaacagacgaattagttgcccaaaggatggataaatactgtaaaatgggggatttcaaagagtaaaaacttacaaacttgttctaaatccgaagccttatcgtttcggatttttttatgcttattaacaaaaaaagattgcttattaacaatagtttctaataactcaattggcttctttttttaattttgcttactttcgctctatggaaaatgtgaagaatataaacccaattcgaatcgataaaacaacaataatcaatctcgaaaaaggaaaattaccgccccaagttgtcgatctagaagaggctgtgcttggagctatgatgattgacaaaaaaggggttgatgaggtaatcgatattttgcaacccgatgcattttacaaagaggggcataaacatatttttgaggctatcgttcagttgtttacagatacacagcctattgacttattaacagtctcggctcagttgcgaaaaaatgcaaaactagatttggcaggaggcgatttgtacttgattcaacttactcaaaaaatatcttcttcagcacacatcgaatttcactcgagaattattcttcaaaaatttattcaacgcagtttgattcgaatttctacagatattatcgaagattcttatgacgaaactaccgatgttttcgatttattagataaagccgaatcgaaattgtatgaagtgacccaaggaaacatcaagcgaagttccgagacagcacaaagtttggtcttgcaagccaaaaaacgaatcgaagaaattagcaaacaagaaggattaagtggtgtcgaaacgggttttaccaatctagacaaactgacttcgggttggcaacccagcgatttaattatcattgcggcaaggccagcgatgggaaaaaccgcattcgtactttcaatggcgagaaatattgcaatcgattacggacatccagtggcgctgttctctttggagatggcctccgtgcagttaattacccgtttgatttcgtctgaaacaggtttgtcttcagagaaattgcgtaccggaaaattagagccacacgaatggacaatgttaagtaccaaagtgaaaaatctagaaaaagcacctttgtttatagacgacacaccttcactttctatttttgatttaagagctaaatccagacgtttggtttcgcaacacggcatcaaaattatcattgtcgattatttgcaattgatgacagctggaggtaatggaaaaggcggtggcaatagagagcaagaaatatcaaccatttctcgaaatttgaaagctttggccaaagaattgaatgttcctgtaattgcactttcgcagttatcgcgtgcggttgaaactcgtggttctagcaaaagacctttgctttctgaccttcgtgaatcgggagcgattgagcaagatgccgatattgtttcgtttttataccgtcctgaatattacaaaattgacgaatgggatgatgatgaagcttcgccaaccgcaggacaagccgagattatgatcgccaaacatcgtaatggaggtatcgaaaacgttcgattaaaatttattggtcaccttggtaaatttgacaatcttgatgattacaacagcagttatgatgatttgccttcgagtatgaatcaggacgagaatccttttcaaactaaaaatctcccgtctccaaatgaggcttttggaagtaatttgaatgaggaagatgatgatttagttccattttaaaataattgattaattgacaattggtaattaacaattcataaatttcaatataactatccgctttatagtccaagctccattttcagccacgaattcacgaattgctcttttatatattattcttagattacactaatattgtcaaattcaattagaatttgtgaaatttcagaacatttaattcatctataattagtgaattcgtggacaaaaagagattaatacaaatagcggacagtcataaatttcattatcaattgaaatcagtacatttgattcataaatttttaaaatgagttcgaaaaagatattttttattgttgtactgctgacttcctttgcggcaaaagcttcgtttattttattgccaatggacgaaactacccaaaaaaatcatcttaaagcctacggaatcacttattggtgtatcgaaaaaaaatacaaagccagttggttactcaattatcgtgggggggcttttttattagccgatgcgtccgaaatcagaaaagaatgccaaattcgaggggtgagttttgaagtcttaagtgatgatgaaaccaatcaaatcctagctgaaatagccagtccttctcaaaatatggaggccgttgtacttgaaaaagcgcctaaagttgcggtttatactccaaaaggaaaacagccttgggatgatgctgttaccttagttttgacctatgccgaaattccatttacgcccatttatgacgaagaagtcttgagcgatcaactgattctttatgattggttgcacttgcaccacgaagattttacgggtcaatatggaaaattttttggatctaatagaaattcgccttggtatatcgatcaaaagaaagaagctgaaattttggcaacaaaattaggctacaaaaaagtgtctgaagccaaaggagctgtggccaaaaaaatccgtgattttgttattggaggaggatttatgtttgccatgtgttcggcaaccgatagtttcgatattgctttatcggccgatggtgttgatatttgcgaacctatgtttgatggtgacccgagtgaattcaattatcaatcaaaaatacagtacggaaatacttttgctttcaaagatttcacattagaccgaaagccagaacattatgaattttcggatattgatatgaccgaaaaaagaaggattcccatggag

SEQ ID NO: 1015 - DNA, 24656 bp, synthetic construct
  misc_feature 1..24656: note = Synthetic
  source 1..24656: mol_type = other DNA
gttgctattagcaaaggataaatgttctgacagttttatttttctaataaaaaaaattataaaaatgaaaaagtatatttcatcaattatgattttggttaattttgtacagctatgggcacaagattaccaacaagataaatatttggattctttccaaatgcttactgtagctcaacctgatgactatgaagggaaagtaacctttactctggttagtaaattagcagatgaaaagtcgaataaagcggtattgtacatacatggttactgtgattattttttccaggaagaatatgcagaacaatttaccaaaagaggcattaacttttatgcgttagaccttagaaaatacggtcgttcttatttgcctcatcaggtgatttataacatgcgttcattagaggagtattttccagatatagattcagcattagaaattatcaaaaaagagggtaatgataaagtcttattaaatgctcattctacaggaggactcatctctagtttgtatgctaaccaacgaaaagacagtccgttttttgatgctatttttctcaatagcccatttcttgaaatgaatatgagttggttcaaaagaaaagcagccatacccttgattgctaaaaagggtttaaaaaagccgaataaaaccataaaaggctcttctttatcgttctatggtgaaagtctgcataaggactacagaggagaatgggactacgatttatcggtaaagccgatagtttctcccaatgttacctatggatttataagagccttgtatttaggacacaacgaaattaaaaatagacttcacattactcaacctattttggttatgcattctgataagtcgatccaaagcaaatcatggagagaagacttttactattcggattcggtattagatgtaggggatatagaaaagtattcttattatttaggaaatcaggtcaaaacaatagctataaaagatgggatgcatgacttggttctttccagaactcctgttagaaatgaagtttatcgaaatctatttgattggctggatagtattagtttttgaaaataaagtaaataaatagaaattataaatttcaatctttaattactttagtaaaattataaagccacatgaagggattcgtgcggcattggggaagacttcggatcggggggctatcatcattaccaagaaagaatgaatactgagaatggtaaaacacctttcaatactgacggatataatatactaataaaagcaaatgaaaaatataaaaaatttaaatcaactacggaggtttggaatagtatgtggaactttcgttattagtcttttcttatcgtgtaatagtgatagttcaaagtttaattatattgaaatttctacatccggttgttatggtacatgcccagttattgatgctaaaattgaaaagaataagatatatttcaatttaatcgaatttaacaaatttgaaaaaggaaactatttattaaacttagatagagatcaaataatacaaataaataagttgtataacaatcttgatttggaaacgctaaatactatttatagtaatgatatcgcagatgaacaaagaattaaagtgaaattttttaataaaaataaaattaaagagattttttacatagatggtagtgctcctaaaaaccttgaagcctttgttgattatataataaaattaaaagatcatgattctattaaaaaaaagaagattcaattttcgttttcaactaggattggttttgattatgcaataccagctccacctcctaacccacatttaaatgatgttccagaggataatgttccataattagtgattaagcaacatttacaaattaactttttataaatcaatacttaaatgaagtttaaaccaaaaggcaagcgtagtttgtctttttcattttataagattacagatagctaccaaaagacactgtttttaaaatcctaccacaaaaaaaactcctaatttctcaggagtttttatttataaataactgtatatttaatttggatatacttttaatgcttcttttagaatgcgtaccgatttaattaaatcttctttctttaggacgtaggcaattctcacttcatctaagccaacaccgggagtggaatagaatccggcggcaggggcaaccattacggtttcgccattaaaatcatagctttctaataaccattgtgcaaaatcatcggcgttttttacgggtaatttagcgatgcaatagaaggctccttttggtttggctaccatcacgccatcaatttggtttaattctgtgataagggtgtctctacgctctttgtattctgaaattacttcgtcaaaataactttgtggggtatctaaagcggcttcgctggcaatttgtgcgaaggttggcggactcaatcgggcttgtgcaaacttcattgcggcagtcattagttctttgtttttggaaacaatgcaaccaatacgtgcaccacacatgctgtatcgctttgatacggaatcaatcataatggcatgttgctctaaaccgggaatgttcatcactgaataatgctcatcaccatcataggtaaactctctgtagacttcgtcagcaatcaaaaacagatcgtgttttttgaccaactcggccaattgctgcatttcttctttggtatataaataacccgttggattacccggattacaaattagaattgcttttgtttttggggtgattaatttttcaaaatcagcaataggaggtaaggcaaaaccttcttcaatcgttgaaattaccggcactacttttacacccgaagcagttgaaaatccattgtagttggcataaaaaggctcaggaattatgatttcatcaccggcatccatggtgcttcccatagcaaacaacaaagcttcagaaccaccggtagtgatgatgatgtcttcggttgcaattggcaaaccatggttggtataataagcggataacttttttctgtagctttcaaatcctgcggaatggctgtattctaatactttaaaatccagatttttgatagcattcatggctacttccggtgttttaatgtcgggttgaccaatgtttaaatggtaaactttcaccccttttttcttagctatttctgaatagggaaccaattttcggattggtgattccggcattgcttttcctttagatgatattgatggcatgattcttattttaagtatgcaaagttgcaatttttttgataaacacccaatgcattcttttatattttgaatatttagtatatttaataaatttttgtttatgctaaagaattggttactgatagtatcgctactatcttcatttttacttttgggccaaaacgaattccgtttgctatcgaagaacaataaaatcaagattccttttaaacagattaacaacttgcttttcattaaagtggttgttaatgaaattccgttgacttttttgttggataccggtgtagctgagactgttttgttcagtttggaagaaacggatcaggtgaaattttttaatgtcgaaaaaacgctgttaaaaggtttgggtaaagaagatgcaattactgccttgcgatcgtcagggaatacgctaaacatttcaaataaattgattgatactaatcatgaggttttgatagtattggaagaagatatcaatttctcttcgatggttggtattccggttaacggcatattgggttatcatttttttaaagactttttgattgaaattgattatgataaaaaagtgttgtttgtgtatgaaaacaatgcgaagttccgacagaaaataagcaaaaagtatgaagcctttccgatttctctggaagggagaaagccttatattcaagcatcggcggttttgactgaagctaaattagctgcaaaattgttggtggatgtaggcaatagcgatgcgttgtggttgtttgaaagtgatgtaattgaggtgcaagaacccaattttgaagattttttgggtaggggttttagtggtgaaatcaatggtaaaaggggacgcatatcggagttggcagttggtgactttgttttggaaaatcctattgttgcttttccagattctatttcgattaagaatgtcaacttggttccggacagggttgggtcgattggagccgagatactgaggcggtttaatttggtttttgattacaaatcatccattttatatttaaaaaagaacagtaattatggcgatgctttcagttttaatatgagcggtcttgagattcatcataaagggaagcaatggattccgaagcctattgaatttagtcccacaaaaataacttttcaaacgcaaggagttgctacgcctcaagcggcttctatggcttttgaattcaaactcatatcggtttatcgcattgcgaatgtgcgagctaattcgcctgctgctttagcgggtttacaaagggatgatgtgttggtatcgataaataaaaaacccgcttatttgttttctttacaggatatcaatgctttattaaaatcgaaggaagggaagcgtttgcgatttgaagtggaacgcgaggggaaaattattacgacagagtttgtgttgaagaaaatactataaaaaaatccacagtggcatttgaggtgctgctgtggatttgttttattttaaattttaacatctaaattttaaattttactgcattggtcctgttttttttggttccagtacatttacttgtttattttcgaggacatcgcctttgattttcaggtggattttaccgccatcatagtttacagcgttgctttctacggtgatgcttttacggataggaccggtagccatgttgtattttacttcaatttggccggtttttcccggtaaaataggttctttcggtcttgacggaacggtacaaccacaagtagattgcacgttgttgattatcaatggagcgtcgccagtgttggtgaattcaaaaacacgaattcccgaatccactcctttgtacactttgccatagtcaatggtattgttttccgctttaaactcaattttgggtccggtttggctaattgcggtgaagctcataaataccagacctagtagtagtgcttttttcataacttcgatttttgggtactgtaaaattactttatttttttattcaaaattcaaatagcatttcttttttgaaactctatcgaaatccttacttttgcaacttatgcaaaaaccaatccaaagtattttggtgcagctttttgttgatttaaaaccaagtgtaattgctgtttttttaattgaaaaactataatataaaatttgactatgtctattcctgctcaatttaatgccaaagaagccgaagaaaaatggtatgcttactggatgcaaaataattattttcattcggagcctgatcatcgtgaaccttacactattgtaattccaccgccaaacgtaacagggatgcttcacatggggcatatgttgaacaatacgattcaggatgtgttgattcgaaaagcccgtctgaaaggcttgaatgcgtgttgggtaccgggaactgaccatgcttctattgctacagaagcaaaagtggttgccaaattaaaggcagaaggcatcaataaagaagatttgacccgagaggactttttgaaacacgcttgggaatggacggataaacatggtggcatcatcttggagcaacttaaaaagttaggagcttcatgtgattgggaacgcactaaatttacgatggacgatgatatgtcggcttctgtaatccattcgtttgtggatttgtataataaaggcttgatttatcgcgggtatcgcatggtgaattgggacccggaagcaaagacgactttgtctgacgaagaagtgatttttgaagagcgtcaagggaaattgtattacctccgctatgcgatagaaaacagtacggaatcggtggtgattgctaccacacgacccgagactattttgggcgatacggcgatttgtatcaacccgaatgacgaacgatttatgcatttgaaaggaaagaaagctattgttccgatttgtaatcgtgtgattcctatcatttttgatgattatgtggatatggaatttggaaccggttgtttgaaagtaactccggctcatgatgtgaatgataaggaattgggcaacaagcaccaattggaaatcattgatatttttaatgagaatgctacgttgaatagttttggtttgcattatgaaggcaaagaccgctttgtggttcgtgaggaaattgtggccgaactggaacaattgcaacaccttgtgaaaattgaaaaccacatcaataaagtagggacttcggaacgcacaaaagcggttattgaaccgagattgtctgaccagtggttcttaaaaatggaagatttggtgaaacctgctattaaagccgtgttggaaaccgaagaggtgaaattgtatccgaaccgatttaataatacctatcgtcattggttggaaaatatacgcgattggaatatttcccgtcagttgtggtggggacaacaaattccggcttattattatggcgatgggaaagaagattttgtggttgcgactactcaagaagaagcgttagcgttagcaaaaataaaagccaacaaacccaatttgactttagcggatttaaaacaagatgccgatgcgttggatacttggttttcgtcgtggttgtggccaatggctgtttttggaggtattttagagcctgagaacaaagatttcaagtattattatcctaccaatgatttggttaccggcccggatattttatttttctgggtggctcgcatgataattgcaggatatgaatatacgggtgagaaaccgtttacgaatgtttatttgacgggattggttcgcgataagcaacgtagaaaaatgtcgaagtcgttgggtaactcccctgatccgttggatttgattgagacgtttggtgcggatagtgttcgtgtaggtttgctattgagtgcttctgccggaaacgacattatgtttgatgaagaattgtgtagcaacggaaaagcgtttgctaataaaatatggaattctttccgtttgattaaaggatgggaagtagctgatttgccgcaacctgaaagtgcgaaagcggcgattgcatggtatgaggcaaaattccaaaaagtgttggtggagattgaagacagttttgagaaataccgtttgtctgatgctttaatggcaatttataaattggtgtgggacgatttttgttcgtggttattggaaatcattaagcccggttaccaacagccgattgacaaagctacgtttgacaaagccattgaaatgttggaaaacaacatgaaattgttgcatccgtttatgccgtttttaacggaagagatttggcagtatattgctccaagggctaaagaggaagcacttattgtttcgcagtggcctgcacagaaaccttttaacgacacgttgattacggattttgatttttgtatggaggtaatcgccggtatacgaactattcgaaaagagaaaaatattccttttaaagatgcgattgacttgcaggtgattaataacgaaaaagcaacgactgttttggatagtattgtagctaagttggtgaacagcacctcgattacttatgttaatgaaacggtggaaggagcgttgacgttccgtgtcaaatcgaatgaatattttattccgattacgggggcttttaatgtggaagaggaaattgctaaattgagtgacgaattgaagtacacgcaaggctttttgaaatcggttcaagggaagttgttgaatgagaaattcatgagttctgctcctgagaaagtggtagcgaacgaacgccaaaaagaagcggatgctttggccaaaatagcgatgattgaacaaagcttggcgaatttgaaataggtgtaaagcttgttttgggttgccggtttgtttggtagtttataaaataaaaccctagtatttcttagtaccacttgttgtattgactaagattattagggtttttttatttttgagcgttggtgtggtactctttaatgcactttgtttggaataggggataacccactattttttttagcttttcgttgactgctgtttatcttcttttgttaatcattcttttaatttcttcactatctaagccacaatagacacaaaattctacaatagtgacgtattgatgttctgatttgtttgaaaattttttgattttttggattaagtctcttccatagcgttcgcttcgaccaagaattatacttatgtcttttggaaaaatggttgttctttccattggtttaggttatttaaagtttataatttggggattgtaacttttttattatttcttacttatttcatcagttatttgtttttactccttcaatactattctcatactctatctatacttggctaatacttggctaatacttggctgatactttgttgatacttggctaatacatgagcattactcaataatcgttcagagcattagttgtcaagtgatgaaattgctactgttttggggtatataacccgaaagactaccttaaaaattggttgatttaagacacaagaaaacagaaaaagagggggattgtttttggaaagcactccctttgtgtaagaaagtaagtgctaaattaaaaataatattggaaaaaacaaacttttttggcaaaatcggcagaaatggtagtaagcggcaagggttattttttgtatcgtattgactatcatagctttgtttcattattaatcaataaatttttttaattatggctaagcaaaaaggcttgtttaaggttgaaggaacgttggatgacgttactttttacaaaaaaggagaatcttattttatcagaaacaaaggaggcgtttcgagacaacgcgttttgaatgacccttcctttgcaagaacccgggagaatggttcagagtttgcaaatgttgctgcatcgggaaaaatgctacgcaatgctaattctgttttgataaaaaaggcaaaagacggttcgctaacacgacgcttgatgcatgtgttggctaaggttaagaatgcggacacggtttctgtcagaggacagcgaaatgttaacgatggtttgtcaactacagatggcaaagcttttctgaagaattttgattttaatagtttcaccccattgaaagctatcatgcaggctccttatgaattggatactgtaacggggacagttactattactgatttggttccgatggatatgttgacttttcccaactatgcttcgagagtcacttttaaggttggttttatgaatttggatttgttgaacggggattataccatcacgtatagtcctgaagttacgcttccaatagatatgaccagcagcagccctgttgttactccgactggagttccgacgggaagtggctatagtttttattttttgctagttgagttttcgcaagaaataaatggtgtgttttatgctttaaatgatgaaacgtataactcgttgacgttgcttgaagtggtttaatcttttgtttgcgtttttttaaaactcctcctttgtgaggagtttttttttgtagggacaggtcgcgacctgtccgtacatgacctgtccgtacatgacctgtccgtacgcgagctgtccgtacaaacctttccgtacacattttatctttagaaattaaaaaaaaagaaaaagtcccaccgaagcaggactaaagattttcatctacggcatatagccttattgtgataagattaaagattagaataaaattatctatgacaaatatataaaaaaaatattttacttggattacggatttccgtaaattactactaaattttttttgtatttttatgaattgaataaaaatcgatatcgttatggggaaaatattaggtttggatttggggacaaatagtattgggtgggcattgattgatgatatagaaaataaaattattgactcaggagtgcgtatttttcccgaaggagtagttgcaaaaactattggacaaggtgagaaagaagaaagtaaaaatgcaagtcgacgaaatagtcgtcagcaaagacgtggtttttatagaaaaagattacgtaaaattaaattattgagaacacttattaatttaaaaatgtgccctttgagtcattctgaactagatatatggagtaaatgggataagaaaaaaaagaaagatggcagaatggcacctgaaatccatttaccagaaaatcatccttattgtatatggttaaaacaaaatccatatttgttgagagatagagctttaaatgaagatatatctctacaagaatttggtagagtgttatatcatttaattcagagaagaggttttttgagcaatcgcaaaggaaaggaagatggaaaaatatataaaggaaaagatggagtaaaaggtattgaggacactcaaaaagaattacaaaattcaactttgggaaaatatctgtttgatattttgcctaaagatagcgaaccttttaaagtaattcaagatgaaaatggtaatgaattgcgtgttcgctcaagatatactttgagagatatgtatatagccgaatttgaagcaatatggaatagacaagcctataatttggggcttgatattattgaatatactaacgagaaaaagatattgttgaaagggggtctaaaaaataaaagaaacaacagtaaaattgagcatttaaaaaagattaaaggagaaaataatgttgaagttattgaattgattgatgaattatcgattaatgataatcaaaaatatttattgaaaataaaaactaaacttcctttaaaagattttttagcaggaaaaattgaaaaaaacgaagaaggagaattaaagtttaaaagcaatgaaagtgttttgttttggcaaagacctttgcgttctcaaaaaggacttcttgctaaatgtagatttgagcctgatttgaaagatgaaaatggtaaattcatacaaaagggtaaaacaccttgcccattatcacatcctttatatgaagaatatcgtacattgcaatatatcaataatattgaatatggaaaaaagcaaagattggaagagtcacagcgtttgcaagtattggaattaattaactctaaagaaaagaaatttgattttatagaaataaaaaggaagttaaaattagagtatgaaacatttaattatgcagacgactcaccagttattggcaattatacaacaaaacaactgaatgtattatttccaaaatcaatacttgaaaaagaatactcaataacagttaatgatcaagaaactatagagtatggttatgagcgtatttggcacttgtttcattattgtgatgataatgatatattgttggaaaaacttcaaactatttatggtttaactgatactgataaagaaaaaatttctaaaataaatttaaaagaagattattccagtgtttcattaaaagctataaaaaacattttgccttatctaaaaaaaggattgcgtttaagtgatgctgtaattttgggtggtgttagaaacgcttttggtaaaaaatgggagttatataaaaatgaccatttcgaactagaaaaagatttattaaaaataaatcacgaaaaatctaataaagaaggagaagctattgaaaaaattaaagattatttaattgaaaataaatacggatttgcagagaatgatattcgatttaaaaaattgtatcatcatagtcaagaggttattaaagtagagcaaaaagataaaatagatactgttgaaaatttgagaaatcccattgttcaacaaggcgttaatgaaacaaaacgattagtaaatgaattgattacacttcatggaaaatttgaccaaattaaagttgaacttggtagagatttaaagaacagtaaaactaaacgtgaagaattaggttataaaataagagaaaacgataaaaaaaacgaaaaggcaaaagaattattaattgaatttggtttgcgacaaagtagagataatattcaaaaagtcttgttatatcaagaaatgccaatttctgtttgtccttataccaataaaacaataaatatttcagatgtactcggtagggaaaataagtttcaaatagagcatattataccaaaatcaatttccttagatgatagttttgcaaataaaacattatgtgattcaaaatttaatggtttaaaaggaaatagaacaccttacgatttttatgaaatcaataaagaccctatactgtggggaggtgctaaatcttgggaagagattgaaatacgagcttttaaagttttgccttaccccaaagcaaaacgatttgtatctaaaacaaaatttgaaaccaatgattttatacaaagacaattaaatgatactcgttatataagtaagaaaacaagtgaaatcctttcgcaagtatgttcagatgttcgtgtgatgccaggtagtttaactgcggaattgaggagactttggggcttgaataatattctgcaacccataatgacggtagatattcctaatctacacattgaagaaaacaaacatatacctcactatgtagttttagacaatgaaaaaaaaccaattttatcacaacgaatttattttgataaaccaattacgaaagaaaatgaaacacttttgtctggaagtattgaaaagggagtttttaaatcgaaagaacagtatgttaaatttcaagtaaatgcaccagaattagcaaatggcgattattgggcaaaattagtattgtctaatccaaaaaatattgtccaagtatttaaggataagccaaatgctttagaaaatgaaattgttttaagaggtaaaattgaaaaggaaaaattcaagaatgatggtttgaatgccataaatgctattggtaaggataacggaacgtattgggcaacattttcaataattaatagggattttaaaaaacctgttaaagaagagcaacccaaaaaaaatggaaagcaaatacttctatttggggaagtaaaggaaggtcttttttcttcgtatatttatgactgtgaggcagaaattgaagatggaaagtattggctcattatagatgttaattttgaaaatgtttcttttgaaagagcattaaacgaaaaaccgttggtaaaagagaatcaaattttgattcaaggaactacgaatgatgaaaatatatttgtttcggatatggacaatcagcatcattttgaaattgaagaaggcaaagggaaatattatgtattgtttgatattgtttctgaagtaactgaattttctcctgttaaaaccactattccagtcctcgaagaagggcagtcgttagttgaaggaacaacttgggttgataaatatacgggagaaataaaatttgacccaattaaaaaccgggaagatcaccgccaccacgccattgatgctcttgttattgcattaacaaaagaatcttttttccaacggttaagtaaacaaaatgcttcaaatgaaaataagaaaagagggattgaacacgaaaaagaacatttagactttccagaaccttggaatggttttcataatgaagcaaaaaatgttattaatagtattctcatttctcacaagcaaaacaaaaaaatccttacgaaaattaccaaaaagattaccaaaaatgggcaaacttttaaaagtaatggaatggctgttagaggacagttgcataaggaaaatttatatggatatagaacaccaccaattggagaagctgggtatcatattagaaaatctgttgaaagtttaaaaaccgataaacaattggaaaagattgttgatgtaaaaattaaagaaataataattaaagcaagaaaggcagaaattcctttgtataaagaagtagaacaactttctaaacaactgaaatctccaaaaaatacagaaatcgaagaaaaagaaattaaagaaaaaattgtagcattacatacgaaaattaaatcactgtatactttgccaaataaaaatggagagccagttccaataaaaaaagtgagagtttcggaagaaatgggaaaagctcaacaattaaaaccttctataaaacaatatgtgaatccaagaaataatcatcatattgtaatttttaaagatgaaaatgaggagttaaaagatgatattacaaatttttggaaagttgtagaaagagttaagcaaaaagatgaaatctataaacttcctgatttagaaattggaaaaccagccccaaaagaactagtattaacttttcaagaaaatgatatgtttttgttgggactttctaatgaggagtataatgataataaacaagaccttgtttttctaagtaattatttatatcgagttcagaaaatatcagatggggattattcatttagataccatcttgcatccactgtcacaaataaaaaggaggaagtaagaataacgagtatgaaaaagtatcaagaaatgaatccaataaaagtgaatatttcggttttaggaaggattgaaaaactgtaattttgcttaaagttctttgacataaaactttttaaatcttgaacaacaaaaccacaacggagtttctacgcagtcactccgttgtggtttgattaaagattagagaacacgatattcaactactttaacgtttgttgatagtggtagttgtggtttgattaaagattagagaacacgatattccggacagcttccttttactaaattctttgttgtggtttgattaaagattagagaacacgatattacccggtgatgtttttacaatttggtatacgttgtggtttgattaaagattagagaacacgatattaatagcaccaaactgttggcccacttctttgttgtggtttgattaaagattagagaacacgatatttcaatagcaatagcccataactccaccctagttgtggtttgattaaagattagagaacacgatattgtaaaccacaaagccgataaagtagcctttgttgtggtttgattaaagattagagaacacgatattcaacagaataggaatatttaattcctttgcgttgtggtttgattaaagattagagaacacgatattaaggtattttgaattataccggtattaacgttgtggtttgattaaagattagagaacacgatatttagtcacctttaagttgtcagcctcttcatgttgtggtttgattaaagattagagaacacgatattgatccgaatgaagaagctggagtagtacatgttgtggtttgattaaagattagagaacacgatattatcgattcaaaaaaaataatctattcgcttgttgtggtttgattaaagattagagaacacgatattgtttcaataaggttatactggccgttgatggttgtggtttgattaaagattagagaacacgatattcacaaattgaactaacagcagatacaccaagttgtggtttgattaaagattagagaacacgatatttatatcgtttacattagtgatttctatttcgttgtggtttgattaaagattagagaacacgatattgaaattaaaaaacacctatgctcagttgcagttgtggtttgattaaagattagagaacacgatattccggaataccttgataaaaaagcacgcatagttgtggtttgattaaagattagagaacacgatattcagaaatgcacaagaaatcacatgggatagttgtggtttgattaaagattagagaacacgatatttttgtttttaatgattttgcctaattctcgttgtggtttgattaaagattagagaacacgatattcagaacttggtcatcgtgttttgctgattgttgtggtttgattaaagattagagaacacgatattttacaaaaagcaagtcagcaaccgagatacgttgtggtttgattaaagattagagaacacgatatttccaactttacaattggtgttagttcgttgttgtggtttgattaaagattagagaacacgatattttttacaattgaagtgcctaatacaaccttgttgtggtttgattaaagattagagaacacgatatttgatttacaaaatcaaaagtttgcgtgatggttgtggtttgattaaagattagagaacacgatattaagttttttagaattattaaaagacttgccgttgtggtttgattaaagattagagaacacgatattttttgtgccacaatgtttaaccatgatgcagttgtggtttgattaaagattagagaacacgatattgcagaattattcatacaagacactaacgcagttgtggtttgattaaagattagagaacacgatattttaggaaaagctttgaatgatcctattgcgttgtggtttgattaaagattagagaacacgatattctgttgctttctcagttatctagggatgttgttgtggtttgattaaagattagagaacacgatattcaattatcaacacttccatgacagtaaatcgttgtggtttgattaaagattagagaacacgatatttctataattgaataaacgatttcgtcttttgttgtggtttgattaaagattagagaacacgatattattgaaacacaggaacgctgcttgtcatcagttgtggtttgattaaagattagagaacacgatattttcctcccagaatgatagaggacttattaagttgtggtttgattaaagattagagaacacgatattcaaaatatatgacctcttctaacaggtgttgttgtggtttgattaaagattagagaacacgatatttttgacagtcgaagcaattcaaacctcaaagttgtggtttgattaaagattagagaacacgatattagttggcctgttaccttctgctactcaagagaatatagtgttatatcgtgataaaaaatgcctcttttacagaatgataagctgtgattgaggcatttttttgtttgtaggggtggggacaggtcgcgacctgtccgtacccgacctgtccgtacccgacctgtccgtacccgacatttccgcacagaacctgtacgcacagaacctgttcgtacccgacctgtccgtacaagatgtctgaaaacgatttgtccttatcagttctgtataaaaattttgttggttattatattatcattatttttgaaatattataagccaataaaatagtataagccatgaaaaatcgcaaaagaaatcgaatgaaaggattcgattattccagtaataatttgtatttcgttacaaattgtgtgaaagataatgtgtgttgtttggggcgtgttactatcgtagggacaggacgcgtagggacagaacgcgtagggacaggtcgcgaagggacagaacgcgtagggacaggtcgcgacctgtccgtacaggattcccaaaatcaagattcccaaaatcaagattcccaaaatcaagattcccaaaatcaagattcccaaaatcaagatttcgaaattaatcatgttgttgaattaaatcaatttggtttattggtagaagaaagaatcaattggttgatgagtcagtatgaatatgttgacattcataattatgtgattatgccaaatcattttcatcttattcttgaaatagatagccaaaaagtgaaagataaaggcatcaaaattaaatcgttgtcaagtttaatgggggctttgaaaacaactacttctaaattaattcatgaagcaggctttccggaatttgaatggcatcgctcttttcatgatcatatcattagaaatgaattttcttatttgaatatattcaattatatttctaacaatcccgagagatgggatgatgatgttttttttaaaaaggtttaaaacaattctaattgggtgggctgtggttctttaggtacttcacattttccccagaagttgagaatgtttccgaattgtttatcggttattcgcagtacgctgactttacccaatggtggcaatagtttgtttattcgtttttcatgtacgtctgcactttcgctacttgcacagtgacgcacatatacggaatattgcatcatactgaaaccatcctttaagaggttctttctaaagcctgacgcatttcgtcggtctttcttagtttctgttggtaagtcaaaaaatacaaatagccacataattctgtatccgtttagttccataattttggatattttattttctttctatctcctgaatagcattgttgcaatgaacttgctgttttttgtaatgctaccatcagtggacttttctcttctttaaaatagaccgttcgcgttagaatttgcagcatttctgatttgagctgtgtgtttagttcttgctctttgtagttgttcattaactcatacactttttcatctactattggacgaaagggttccataatatcatctgccaaagcaaaagcattgtatttgcttttgtgatgtatgcctagggtattaagtaatccgctaccggataatgctctggcagttgccgctctaagaatggcatagccataatttaaaaagttgttaggatagtctccaaaacgttctcgtttgaaatctaattgtttggctcgttcgctgtcactttggtcaaaaaaagatttccaatattgactggctgctactccttccatatttgacgtatcaccactttgtacttttcctgcgaggtagttaaaatgatttttggtgtttgttattttttctaatagtagtccttggttttttatcttctcaacgattgtttgttgccaaagttgtttttttaatggcaagctggcttctatttggttgcgaaatatttcttgttggatgtgatgactgttgaggttaaggaacattccatttggaaggtgattggtattgcagattataatggctgtattgttttcaatcatcagattcatagccggaatgctgatgtatgtttcggcattgtcaattactaaaaacccaatatcttcaacaggcacagtggtttcccttgtttctgttttgattacgagttgtaggtttttagtggaaagagaggctttgttttcgattaatagtgttctttttatcataactactttcttaaaaagaatacaagatactaaaaatcaaataaatagagatttggtgggattggtggggggagaggacaggggaaaagggacaagggacaggtcgcgacctgtccgtactcgacctgtccgtactcgatctgtgcgtacataatctgttcttagttttatttttgctaattactcttatttatacctcgcaaagactgtgtgatttaagggcaaatacaatagttgttccctcaaagttaaactagaacgattgttaaaaaaaaagtcttgtagtatttattcgaatggtttttctatttttatcgaaccaataccacaaatttaacctctatttgaaactaaactacaaccctaaggtttgtgtgctgtgtcactttgtgctgctactttttatgttagtaagtagtactgtcagtggtcaatttatcatcaaaccggatactacgcttgacgaagtatcgcttcatccgtatgctacacttgcccgtttgggtgctgaatcgatctcacttgatgctgtattgcaactggatgccaatcaatttgaaaccttgcccaacagtaacactgatttgggatttacttctgaccattattggttgcgtttttctatacgtaatgaattaactactacaaaaatcttctttttagaggcgtgtcgacctattgttgatgtagctgaattgtatactatagatgcgaatggtgctgttactaaacaagtaagcggcgatgctttgcccttttcggaacgcgattttaaaaacagaaagaccatttttaaagtggcgattgcaccccaaactacaaagcagtattaccttcatttgaagagtgatggggaggcaattaatgcgggactggtgttgcggtcttatgagaacttgatggaaaccagtatgtttgagcaattggtttttgggattttttatggaattttaggtattgctgccattatctatttgtttttcttttttgctcttgggcaacgcagttttttatactacagtttgtatgttgtttttattggcttgctgcaattttcattggatggtttgttttttcaatttataacacccggttcgggttggctgtcgttgaatgcggtaatcctctctgcctgtatcgccaatttctttttgggaaggtatgctcaggtttttttgaaagtaaaagaatatagttcttttttgaatagtgcattttatgtggtttatgtgttggatttcttgttgctgatttcgttgtttgttcatccgggtgcattggcttattcttatccgctggctaatttgtttgggttgctattgctgttgttaattatttcgtctgttgtagtaatttatgtaaagacccgaaaagttgattatttctttgttatcggtattttctttttgatagccggttttgttgtttttatcttgaaaaatttcagtatgttgccggttactttttggacggaaaacggttcgaaattgggcaccggtttggaggttgttttcttatcgctatcgatggctaacttaatccgaaaattgcgagatgaacgcgaggaaatgcaagacattgcccttcaaaaatcggaagaaatgaatgagatgaaaacgtattttctttctaacatcagtcatgaattgcgaacgcctttgaatgccattttgaatttgtcgaaaattttgattaaagagaccacagaacctaccgttcagaaaaatgccatgatgattaaagactcttcctataaccttttgagttcggtaaacgatattttggatttttcgaagatagaaaaaggggagttgcagttggataaagagccgtttttgttgcgacctcttttggagcacatgattgctaacatgcacaacaaagcaaaaagtcaggatttaaagtttgaagcacttttagctacagatttaccagctcaattggtgggtgataagtttcgtttgacgcaaattatctacaatttaatgagcaatgcttttaaatttacggctgaaggatttgttacgttgaccgtttcctgcaaacctttgaagggcaaccaaattgctttggagctatctgttgaggatagtggtgttgggattgatgcaaaaaagttgtcggcagtttatgattctttttcacaagaaaatatcactgacaagcgaaaatatggtggtttgggcttagggttgtttatcgtaaaacatttagccgatttacaccaaggttctatagctattcaaagtaaagtgaatgaaggcaccgttagtaaagtaactttgcactttgacgttttaccccttgctgaaccaacagaagtgctaccagaagctgaaacctatgatttgcatgggaaacgaattttggttgctgaagataatgccatgaatcaaatggtgttaaaaatgattaccaaaaaatggcaaaatactgaaattgtttttacgaataacggacaggaatgtgtggatgcgttgcaggaaaacaattttgatattatcttaatggatttacagatgcctgttatggatggttatgaagctacgcttgctattcgagccggagcgtcgggtgattccaaaaaagacattcctatagttgccgttactgctgatgtgatggaaagcacaaaaatcagggtgatggagattgggatgaataaatatatttcaaaacctttggataaggaggctttgtataaaatggttaaagaactgaccttatagccctcttttttaattacgttatatttttgctaagatttgtttaggacgcccaatccacgctgataattcttatatttgcacttatatagtttttgaaaaccaatgatatttaccatactgttgtgtgttatagtggctttgtttttaatttttttcggtaaaaagttaaaaggctcaatttcctatctactcactttattacccttgtctctgtttgtgtattttaccacttttattggtaaaatagcacaaggtgaagtgcctgttcagttgtttgaatgggttcccagtatgggtattcatttgagtttccggatggatggcttggcgttgttgttcagtttgttgattacgggaatcggtactttggtttatttatatacttcctattatctaaaagggcatacttatctggatcgattttatgggtatttgtccatcttcatgggagctatgttggggttggtactttctgattccatcatgggattatttatattttgggagttaacgagtatcagttccttttttctgattggatttaataaccatgacaaagcttcccgaacatcggctttacaagctttagctatcacaggctttggtggtttgtttttattgggagctgctattttatttggatttattggatcaacttattccattcaggaattgattcatagcggtattgattttacagaaagtccgtattacgttgttttgttggtctttatatttatagctgcatttacaaaatcggctcagtttccgtttcatttttggttacccggagcgatgaaagcaccgacaccggtttctacttatttgcattctgccaccatggtaaaagcgggtatctatttgttacttcgctttacaccgcttttagggaatcatgaattttggaatactacgttgtttactgtaggagctattaccatgctttatgctgcttttcacacgctatttcgaacggatttaaaagggattttagcttattctaccatttcggtattagggattttggtttttttaatcggaataggaacttctacagcattgcatgccgcattggtttttatcgtagttcatgccttatacaaagccgcacttttcttaatcacgggaatactagatcatgaaaccggaactcgaaatgtaaccaagttaagcggattaaaatcggtcatgatgcccgttgccattgccggacttttagcgatgttgtcgaatgcgggtatgctacctagttttggatttgttggaaaagatttgatctatgaagccactttgcagagtagtgaagctgttttatttacggtttttgcggttgtaactaacatattgttgttgtatgccggatatcaagtggggataaaaccatttattggcaccttacctgaaaactttacatctgttcatttaccggataaacggttgtggatgccgccattgttattgggtgttttaggaatgcttttcggcttgtttccctcgattttagacaatgccttgtttcagccttccttgaatgaattagcacctgattcttttgtatcaccattgaaactatggcatggctttacgtttgttttgcttttgagtatagtgactatagctttgggacttcttttggtttttgtattacaaccatcggctgtaaaagaattaaaattgaaaaaagtagattttttagcccctaaaacattgattagaggatttgccaatggatttcaaaaaacggcttccctttggacgaacttttttcaaaatggttatttgcgaaattatatcctcaccattattttgtttttaagttttttgattggttattatttgattcataatgttaccttttctcttgactttaattcgttgttggatttaacgatttatgaggtttccaccttgttgataatggtcgtggctgtgttttatgccatttttacaaaatcaagattagcagctgtggccgcgatgggtgttgtgggttatgcaatctgtatgattttcgtgttttatagtgcacctgatttggcgatgacacaatttacgattgatactttaaccgtcattttgtttgtattggttttgtatcgattgcctaaatatttaacgctatctgattttaagacaagagtgcgagatggttttattgcggtgttatttggttctttaatcactatcttgtcgattgaagttttacaagtttcgcatgcgggagaaaccaagcagttttatgctgagaactcttatgtgttagcaaaaggaaagaacattgtaaatgtgattttggttgatttcagaggattggacacgatggtagaaattacggttttagtaattgctgctttgggtgtttttggtttattaaaattacgaattagaaataaataaaggctatgaagactataattttacgcactgcttctacttatttactgccgttattactgctgttttcggtatttatattgcttagaggtcattaccttcccggtgggggtttcattggtggtttgatagcttccattgcttttattttacacggttcggcaaacggacaagagaatactaaaaccttattacggatacaccccggatttttgatgccggttggtttgacagtcgcattttttagcggtattgccggaatggttttagaaggaaaagaatttatgacgggtat

SEQ ID NO: 1016 - DNA, 24590 bp, synthetic construct
  misc_feature 1..24590: note = Synthetic
  source 1..24590: mol_type = other DNA
agcgatagaggaacaccaaaaacctttagacatatgaatggctacggaagccatgctttttctatgattaatgccgataacgaacgagtgtatgttaagtttcattacaaaacgatgcaaggtatcgagaattttaccgatgctgaagcgaccgaaatgcgaggaatagatcccgaccacgctcagcgtgatttagtaaaatctatagatgaaaagaattttccaaagtatgcattaaaaattcaagtaatgactttagaggaggcaaaaacgtttaaatggaaccctttcgatgttacaaaagtatggtcgcataacgactatccgttacaagatgtaggggtgatagaactcaatgaaaatcccgataattattttgctcacgtagaacaatctgcttttgcaccttctaatttagtggatggaatagggttttctccagacaaaatgttacaaggtcgaatattgtcttacgccgatgcgcaccgttatagaataggcgttaattttgatgctttaccagtaaataaatgcccatttatggttaataattaccatagagatggcgcaatgcgtagtgatggaaatgggggaagcgctccaaattacttcccaaatagttttgatgatattgaagtcgatgaccaggcaaaaggtattaactatgcgttagaaagtaatttagtagggtattttgatggaaacgagaatgataatgatcattatacacagcctggagatttgtttagaatatttacgccagaacaaaaagccaatacaattagtaatattgtgggggctatgagtggtattgagggcgataaaaaagatgaaattattaatagacaattatgccactggtttagagcaaatgtagaattaggaatgggagtagctaaaggtttaggagttactatagacccaagcttgctaagacaatagagcaaaatattttttatttataaaaaagacgataagctatctgtataaaagtgatgcttatcgttctttttttgccttgaaagccgtttttactttttactgcaaaacggtatttatttataacaccgattaattgtggattacaaattacaaaacgaatgccatattttgtgcttctacaaatcaatagtgtgccctatcattagatatttaaagataatagcctgtatttttttaatattccgtaaatttgcgcctacttaatttttgattataacaccaatgaaacaagcaacaccatacaaaccaaaatataaagttagaatagtaaccgcagcgtctttatttgatggccacgatgcctccataaatattatgcgtcgtattattcagtctacaggagtagaagtgattcatttaggtcatgaccgtagtgtagaagaagtggtcaatacagcaattcaagaagatgcaaatgctatttgcttaacgtcgtaccaaggaggacataatgagtattttaagtatatgtacgaccttttaaaagaaaagggagcagagcatattaaaattttcggaggtggtggaggtgttatcttgccttcagaaattaaagaattaatggattacggtattgaacgaatttactcgccagacgatggtcgtgccatgggtcttcaaggtatgattaacgatttagtacaactatcggattatgctattggagatgttttaaataatgaagtagataaattagcagagaaaaattcacaagccattgctcgtgttatttcttcggctgaaaactttccggaagtagcaaaagacgcattagataaaattcatattaaaaataaaacctctaaaacaccagttctaggaatcacgggaaccggcgggtcagggaaatcgagtttagtggatgaacttgtgcgccgttttttaatagattttccagaaaaaacagtagggttgatttctgtagatccttcaaaacgtaaaactggaggtgctcttttaggggatcgtattcgtatgaatgccattaattcaccgagagtatatatgcgtagcttggcaacgcgtcaatctaacttagccttatcaaaatacgtaaacgaagcagtacaagtgttaaaagctgcagaatacgatttaattatattagaaacctcaggtatcgggcaatcggataccgagataatggagcactcagacgttgctttatatgttatgactccagaatttggagccgcaacgcaattagaaaaaattgatatgctagattttgccgatctagtagcgattaataaattcgacaaacgcggttcgctagatgcgcttcgcgatgttaaaaaacaatatatgcgtaacaataatctttgggatatccctcaagataagttaccagtatatggcactattgcgtctcaatttaacgatccaggaatgaacacgctttacaaagcgattatggataagttagtggagaaaacagactcagaaatgaaatctacttttgaggtggcgcatgaaatgagtgagaaaatatttgtaattccaccgagtcgtacgcgttacctttctgaaattgccgagagcaaccgtgcctacgataaaacagcgaatacgcaagttgaagtcgcacaaacactttacggcttatgtaaaaccatacagtctgtggtcggtactgcaccggttttagataaatctggaattaacgatgagattaataaagaggtaacagaagaatcaaaagattttgtaaaattacttattgcagaattcgaccgggtcaaattaaatttagatccttataattgggaaattattaccgggtggaacgataaagtaaatagatataaaaaccctatttatgcgtttaaagttcgtgataaagagataaaaattgaaacgcatacagagtcgctatcacacacacaaataccaaaaatagcgcttcctaaataccaggcttggggcgatatcctaagatggtgtttacaagaaaacgtgccaggagaattcccgtacacttcaggattatacccgtttaaaagaacgggagaagatccagcacgtatgtttgccggagaaggtgggccagaacgtacaaatcgccgttttcactatgtaagtgccggtttacctgcaaaacgcttgtctaccgctttcgatagtgtaacgctgtacggaaacgatcccgatttacgtccggatatttatggtaaaattggaaatgcaggggttagtatttgctgtttggacgatgctaaaaaactgtattcaggatttaatttagcacacgtattaacatcggtgagtatgactattaatggtccagctcctatgttattagggttctttatgaatgcagctatcgatcagcaatgtgagctttatattaaagaaaacgaattagaagaagacgtcgaagctaaaataactgaaatatataaaggtaaagaacgcccgcaataccgcggcgaattaccagaaactaacgacggtttaggcttgatgcttttaggggttaccggagatttagtgttaccggcagaggtttatgcagagattaaaaagaatactatcgctcaagttcgtggtacagtgcaagccgatattttaaaagaagatcaagcacaaaatacttgtattttttctacagaattcgcattgcgattaatgggagatgtgcaagagtattttattgagaataatgtgcgtaacttctattcggtatctatttctgggtaccatattgccgaagctggcgccaatcctattacacaattagcattgacgttatctaatggttttacttacgtggaatattatttaagtcgcggaatggatattaataaattcggaccaaacttatcgtttttcttctctaatggtgtcgatccagaatatgcggtaatcggtcgtgtggctcgtaaaatatgggctaaagctatgaagcataaatatggcgccaatgcaagagcacaaatgcttaaatatcatatccagacgtctggacgtagtttgcacgctcaggagattgattttaacgatattcgtacaacactgcaagcgttatacgcaatttacgacaactgtaactcgttgcatacaaatgcttacgatgaagcgattacaacgccaacagaagagtctgtgcgtcgtgccatggctattcagttaattattaataaagaattaggtttagcgaagaacgaaaacccaattcaaggctctttcattattgaagagttaaccgatttagtggaagaagcggttttattagagtttgatagaattaccgagcgtggtggtgttctaggggcgatggaaacaatgtaccaacgtagtaaaatacaagaagaaagtttgtattatgaaacactgaaacataatggcgaattcccaattattggtgtaaatacgttcctaagttctaaaggatcaccaacggtggtgccagcggaagttattagagctacagaagaagagaaagaatctcagattaacacacttcgtaatttacaagaatcaaatgatacttcagcgttattaaaagaccttcaagatagagcggttaataacgagaatatatttgaagccttaatggaggtgtgtaaagtgtgttctcttggagaaatcacgtcatcactattcgaagttggagggcagtatagacgaaatatgtaattaaattagagatttattttctcatataactattaaaaagatagccttagggctgtctttttttttggatttaattctctgatggaatattttgctgcgagtcgttggtggggctgcgttgggttctcgtgataattctcgcgatggcatagaacagttcgcgagctttccgtagctctctctctctctctctctctctctctttctttctttctttctttctttctttctttctttcttctagaaattgcgctcgaaattgcttcagaaatctcgaatttaatctatccagaattttcttatatttacggatggaatatgaaaaatagaaaacggaatagattagaagcgtataattattagcgagataatttaattgcgttacgatctgtgtgcaagataaagtatgttgttttgctgaggttttgaatatttcttcatttgaaaaatctaatatcgtaatgtacttaaaggcgtatggcaaaatagttttagaacgcttgcaatggctaccaacccaataggaatatgttgtgtttcacgctagtgtggtaatgccaaatcacgtacacgttattatagagatagacagcttgaaagcttctggaaaagaggttaaaataaaatcgttgtcaagtgtagtcggtgcttttaaaacatcggcatctaaacacattcatctttctggttttagtgcatttaaatggcagcgctcttttcacgatgctattattagagatcaaaaagggtatcggaatatttcaaattatagtcctaaaaatcctgagaaatgatatgaagacaccttttatagtacgtcttaattatgggttctagagtatctgttttattgatcttggtttttcaaagacgttaacaagagcacacctcttttatggcagcgcatttcattatcttcagctttaaaaataaatatgcatttaaatcatacttttaaagccaccgtagtttggacactaaaagaaggagaaagtactagtaaaccaagaactttcagtcggaatcatagtgttcatatttcagattctaagccagatttgtcggtttctgctgccaaagcgtttcgaggtgacgactcgtgttacaatcctgaagatttgttgctttctgctttagtttcttgtcatatgatgtcttatttatatgtttgtgcgcaaaatggtattgaagtgatacactacaccgataatgccgaagcttttttaaaagttaacccttctggaagcgggttctttaatcgcgctattttaaaaccattagtaactattacagaggcttcaaaaaaagacttggcgatacaattgcacgagaaagcacatcacttgtgttttattgctaattcttgtaattttccgattgaaattcagccggagatagtcgtaaatacgctctaaattagaaggattacttccgaagaaaacaaattaattatcctttttcaatacgactgtttttcggtttaaaatattggctttttgaataaaacgtctgcttctttcaaaatcgggacttgtaaaaagactacaaaccacgtacactattaacgatgctgaaagtccgataatcgcttgttttgctgatgcaatgtcccaagcgacgggcaaatctacacctaaagcaaccaagaggttgtatgtcgagaataagagtccgaaaaccatagaaatagttgcggcttttgcagttcctcgagcccataaaaagccgaaaattaaaggtacaaatgccccactagtaagaaagtcggaaccaatccaagaaatggttaataccgatttaattttaagtgcaataaataatgcaatggtacacattattaaggtggaccagcgcgcaatttttacactttggttctctgtggcttcgggatttatgtattttttatgaatatcgacagtaagcgataaggcccccgtgttaattaaagagtccatcgtagacatcatcgccgagcataaacccaaaaaaagcagagcactaagtaatgggttttctattttactaataagatctggtacaataccaacttgaggaacagtatcataaatgacactactaaacattcctgtgtaagtaaccataaggtatagcgggataaaggccaaaaagctaataaccatcattttttttgcatcggaggctttttttgctgccgaaatacgttgccaaatattcgcttgaatcatccacgaggttccaaaagtgatcacataagctagattatctgatactttattaaaaaatgaagtgtagcccgtgttaccgttggctattgcagtagactttacagcttccatccctcccgattgtgtgtaggtaagataaaacagaaaaattcctgtaaagagaaagaaaataaactgtaggaaatcggtaataacaacacctcgaaatccaccaaataaagaatacgttaatacgattgcggtgcctattagcgcgcccatttcgtaagaaatattaaaaaaagcattaaaaaacttcccgataacaatgacttgaatggcggaagcgattaccataaagataataataaatacggttaataatagggcaacattatcgttgtagcgctccctcattaactgcggttgcgagagactgccaatatttctaatacctttggcaaacagaaacattaatgcggtggcaataagcacgggaacaccgtaaatccagaaagagctcaatccgttttggtgggcgtgatcgaccaaatctatcgcggaaccaccaccccaccaagacgcaataaatgtaatggcaagtagccaagccggtaattttcgagaacccaaaaagtaatcttcgctgtttttacttttcctatttcgtattccaatagtaattattcctaaaacataaagtgatagaaatagaatggtaagggtgttattgggcatagcgtgttcgtggtacgttaattattgcgcaaaaataagtaattaggtttaatccttatagcttcagttggttttagatttaatcttattgtatttgaggaaaaatctgatagttttctctctttcagcttaaacaactataattcaggatattaaaagtgttttttattgatgctgatagcaatgtccgccgctttttacttttcttttacaggagttgccagcttgggtacgcgcgccacaagtagcagttgtagtggggtatttagaagctttaatagaagaagagttgttttgttttgtatgctgataacaatatccgtttgcaattctggtgttgtgtttgcacctggagccttttttagtaaagcctctacatctctccgattccgattgtcctaccgctttgtttgaagcggaataagtgcgcgaacgataagataaaacggaaggtttacaaattttgcaaggcgctaagttggattttgaaatgtcgttcgctcctaaaagttgtttcgagacgttttcaaccattctacacgatgataaatggtatttcttgccggaaggtgttttgtaaacactttgcgcgtgcatagaaatgctggttacacataaaaataagagtaaataatacttcataagtaggctaaactaattaaaaggagttcattttctatatttaatcttgtgaatttcttggtttcaaatatggtagtgttaagtaccttttaaaaaatcaataggatttaaataaaacattttacgccaaccttgtctatccgtatctatgcgccaaatataagggataataggtgctattgcataatgtaaatgttgtgattttccggctgcatttccgttagttccaatggatccaatggttggttttttggtaaccatagatagtgtgcttgtttttaaatcgtttagatgcgcgtaataatgtaaacgccatttggggtctagtataaccactatattttcacccattcttattgtgccagaacataaaacaagacctgacgtggcagcgctaatcttagttccctttttagcaagaatatccacccctttatgagttaccgatttcctccaaggataacaccaatacgatttcgaattatagtcggaagtggtagcatcgtttactggcatttgtaaattctgcggaactaaaagaccaattactacgagcgctaaaaatgatatgaagcagagtgtgcgtttttcaaaatactgataaaggggttgctgagggggggggcgagtaaataggaagcttaccaaccttgaggtttgtaacaaagcatcaccatagttttataagctataaaatacgcataaaacaggaggttaaacctcataatactttattgcatattatgtagtagattgtattaatattacatttataaacgcgtaattataccgttatagtttacaaataacgctaaagtatttatgaaaaagaaagagagtgagactaaaaaaataaagacggcctggccaaccaaaatggcaatggcgcaggtttacgaaatgaaactttggggtggtaatagtgctagtttctattctggtgcaggatcgcatgcgccagaaatagtaaatccatatatagatgcggtaacctcatttttaacagcttttgaaagtccgatagtagtgtgcgatttgggttgcggggattttaatgtgggaaaaaaattggtaaagtataccaagaactatactgcggtagatattgtaacagacctaatagagcataataaaaaacagtttaaagcagaaaatttagaattttactgtttggatattgccgtagacgaattgcctttgggagattgtgctttattgcgacaagtgctccagcatttatcgaatgcagaggtgcaaaatatactgtgtaagttaagcggctttaaatatgttattataacagaacatctccccgatggcgattttatatgtaatacagacattatttcgggacaagggactagactgaaaaaacatagtggtttaaatgtattagctccaccctttaatttaaagataacagccgaaaaacaattgttatctatcactttaaaagaaggtaaaggaagtatcgttactacgctgtatacactgttttagtttgtgataatagaagtttagggattattttaatgagagttgttgtgtgttttaccacaataataattgtgcggtggggttgtaatattcttttaaacaaaaaaaagtcctaccgaagcaggactaaagattttcatctacggcatatagccttattgtgataagattaaagattagaaattttaatcagttacaaatatagtgaataagttttaaatatacaatgtggaaaaccgtaatgtggagaattatgttttttgtagctttagggttcgaaataacaaaatgtatttatggcgaagattttaggattagatttaggaaccaactcgattggttgggcagtagtatacgatgagaataatgagattgcaggaatgggaagtagaatattccctgagggcgttgtggcaaaaactattggtacaggcgaaaaggaagagtcaaaaaatgcagctagaagaaatagtagacaacaaagaaggcagttctatcggaaacgtttaagaaaaataaaattgctaagaactctaattgatttaaacatgtgtccgttgtcacacgccgaattagatatttgggcgaaatgggataaatcaaaaggtaagataggacgtatagctcctaattcaaaatcttatatagaatggcatatacaaaatccatattatttaagaaacaaagcattacacaaagacttaacgctttttgagatggggcgtgttttgtatcacattattcaaagaagggggtttttaagtaatagaaaaggaaatgatgaagggaaaatatacaaaggtaaagagggaatggttggtattgaccaaactcaaaaaagtatcgtaggcagtactctggggagttttttaaattcaatttatccggtagaaggcgaaccgtttaaattgattactgacgaaaatggtaatgagcttcgtgttagggcgagatacaccctacgtgatatgtatgttgaagaatttgataagatttggactattcaagcaaagcaattggggttattaggaaaggttggagaaaaaaataaactcacttttttgaaaggtaatttgagttcaaatagaaataaaaagaaaatagaaaagctgtataaaaaatacggggaagagaatgttaacattgaggaaattaaaaatgggaaatcagaaaaaagtacttttaaaatagtaacaaaatctattttacctttaaaagaattttttggcggagaaattgaatatgacgaagaaggaaaagtaagatataagagtgaagatagtctgctgttttggcaaagaccattgcgatctcaaaagggattgctgtcaaaatgtagatttgaacccactgttgaaaaaggaggcgtatatctacagaaaggaaaatcaccttgtcatctttctcatcccacctatgaagaatttagggcttaccagtatataaacaatattgaatatggtaaaaagcagaagttaaatgggatccaaagattaattgtgttggacttaataaattgtaaggatagtaattttgatttttctgaaattcccaaaaaactaaaaatgccttatgaaaaatggaattatagcgatgatcaaaaggttcctggtaattacacaacaaagcacttggctggattgttcccaaaagagatttgggaaaatcataagaataaaatatggcattgtttttatgattttaaggataatgatattttagtaaaaaagttgatttcagattttggtttagatgaaaagctatatgataaagtaaagaaaatcaatttaaaggaaggctattctaatgtttcattaaaagctgtaaaaaacatactgccatttttaagagaagggtatcgaatgagtgatgctactattttaggaggggtaatgaatgcttttggaaatctaattagctattttaaagattctgaagatgttttagtaaaagacattataaagattataagagacaaatcaaataaagaaggggaagccatcgagaaaattaaaatttatttggtggaaaataaattcggttttgttaatgacgacaaacgttttattaaattatatcatcatagtcaagatatcgaaagaaagtcgcttaaagaaaaacttgaccctgttgagaacctaagaaaccctatagtgcaacaaggtattaatgaaaccagaagattagtcaaccaactaattaaagagcatggtcagtttgatagaattcaagtggaattagggcgtaatatcaaaaacagtaaaaaaggaagacaagaacaatcaaacagaattaacgaaaatacagtaaaaaatgatgctgcaagagaattactgacagagtatggtttaaagcataatagaaacaatattcaaaaagttttgctttataaagagatgcaagacaggggagttgttactgtttgcccatacacaaatacttcaattaatataagtgatgtgctaggagcggaaaataagatacagatagaacacattatacctagaagtatttccttaaacgatagttttgccaataaaactttatgtgattcaaaatttaatacacttaaaggaaaactaacaccttatcaattttatcagaagaataacgaccctaaactttggggaggagcagagcgctgggaagatattgaacaaagagcatataaattattaccttattataaagcaaaatgcttcacttcaaaaatcaaaattgaagactcagatgttcaaagtagctttatagaaagacagttaaatgacatgcgctacattagtaaaaagactaaagaaataatgagtcaagtatgcgatgatgtgcgtgttttacctggaagtttaacagccgaattaagacatctttggggacttaacaatatacttcaaccagtaatggatttggatattactaacaataacataaaagaagatagagtctatccacattatgttgtaatggatgaagataataaggccgtttcaacaattgtgttatataataaaaagcctgcactgaaacctagagagactacgataactggaataataaataaggacgtttttaaaacaatagatgactatgttaacttaacctatgataccagggcacttaataatggaaagtattggcttaaactaaaactatcgcaaccaacaaagatggttcgaatctttaaagagcgtccagaaagtacagaaaaagaacttgttttaagaggtaaaatagatcgtgaaaagtttaagaataatagtgttggaatgattaacgcaaaaaatttcgataatggttcttattgggcgaagctagccataaaagacaaaaagtttgttttaccagaaatagagaaacaaccaaaaaaattgagaaatcaagttttattgtttggtgaagtgaaagataattattttacatcatttatttacgagtgtgaaaccaataaaatagatggtaaatattggcttttattggatgtagatttagataacgctaattttaaccgcgctattaacgaaatgccagcgtttgatttaaaccagataagaattgaaggtacactcaatagtgagggagtttttgtttcagaagttgatacagatcaccgttttaaatctaaggaaaaagcagggaaatattgggtggtgttcgacattgttgagaaaccaaatgagtttaatgctattgaaaatccaaagccaatcttagaagacaatcagactttgatagaaggtaatatttgggttgataaatatactggagaaataaaattcgaccctaaaaaaaacaggggtgatcatagacatcatgcaatagatgccttggttgttgctttatcaaagcaaagttattttcaacaattaagtgactataatgctcaacgcgaagcaaaatataaagggttgccatatgaaaaagaacaactaaattttccagaaccttggacggattttcatactacagcaaaaaataaagccgagaaaattttagtctcgcataaacaaaatagaaaagtgttgacacaagttagaaagcgcatcattaaaaacggacaaacatatacaagtgttggggatgcggttagaggacagttacataaagaaaatatttatggacaaagacaggcgccgtttgaaataagtaaaggttatcatattcggaagaaggtaagcgacctaaaagataaccagctaaaaaagatagttgatttagagattcgcaaaatcattgttaatgcaagagtagaagaagtgaaaatgcaaaagcaaataacgatattgctcacacagaaaaagaaatctcgtacagatgaagaagaattgattattgcaaatcaaatagaatcatttcaaaaagatattcaacaactttatactttaaaaaacaaaaatggagaacccgtaccaataaaaaaagtaagggtaagggaggaaatgtctaatgcgcagaaagttaaggaattaaatcagtatgtaaatccaaggaacaatcatcatattttaatttataaagatgaaaacggtgaattgaaagaatgtattaattcattttggaaagtagtagagcgacaaaaacaaaaacaaccaatatatcaactgcctaatacatacaataaaggcagaattataaacaccttagaggaaaatgatatgtttttattagggcttacagatgaggagtacaatgatagcaaaatgaactatgattttttaaccaagcatttgtttagagttcaaaaaatttctgaaggagattattcctttagacatcatttagcctccactttagaaaataaaaaggagcaagtcagaattggcagcttaaagaaatggaaagaaatgaatccaattaaagtgaaattaactgaaattggttctttaatttaaatttaaaataattagaaagttctttgacatacgttttatcctaagtatctaaaccactacggaaaagatgtctttctcaatgttaagtggactgtttgtgaatcttcttgcagtcgatttgattaaagattagaaaacacgatatttcgcaagtagatacgctagaaggcattattgttgtggtttgattaaagattagaaaacacgatattacgcctggttaaatgcgccaacgccgctagttgtggtttgattaaagattagaaaacacgatattataacgctctccataagttaacgcagaaccgttgtggtttgattaaagattagaaaacacgatattatcactggggatttaaattctagcggtgcggttgtggtttgattaaagattagaaaacacgatatttagaacgtacttaacaacattaccaagatggttgtggtttgattaaagattagaaaacacgatattaaagtggcgtaaccttaacgacgacttgcagttgtggtttgattaaagattagaaaacacgatattctccagcctttaatataaagtttgattgttgttgtggtttgattaaagattagaaaacacgatattgtcaggcaaccgcagagaacggcttatctgttgtggtttgattaaagattagaaaacacgatatttaataccttttaacgattttcgctgtgtggttgtggtttgattaaagattagaaaacacgatattatattagcgttactatcgaatgtttttattgttgtggtttgattaaagattagaaaacacgatattctactctgctttataacgcgcctagcaaatgttgtggtttgattaaagattagaaaacacgatatttctttgttaacggtgtacgacgacgattggttgtggtttgattaaagattagaaaacacgatattattctcgttaaacccgaaggaccaacgtgcgttgtggtttgattaaagattagaaaacacgatattcctatgggagatgtagagcaaggcgatgcggttgtggtttgattaaagattagaaaacacgatatttttatctttgaaaaagagttagatattatggttgtggtttgattaaagattagaaaacacgatattgtatctcaagcattccagaacccgtgttctgttgtggtttgattaaagattagaaaacacgatatttattcgagggcgttcacgatgcaattaacgttgtggtttgattaaagattagaaaacacgatattcttgcttatggattaaaggactaccaaactgttgtggtttgattaaagattagaaaacacgatattcaccgaacactaacactttggttaacttgcgttgtggtttgattaaagattagaaaacacgatattaatagctgtctttggtgaagccaacacggcgttgtggtttgattaaagattagaaaacacgatatttaattggtgatatggctgattataataatagttgtggtttgattaaagattagaaaacacgatatttaattcagcactagtagcacccatccattgttgtggtttgattaaagattagaaaacacgatattcaatgggatatcattaatggtttagctgcgttgtggtttgattaaagattagaaaacacgatattaattcgagagcatacagttgtcgcctaacgttgtggtttgattaaagattagaaaacacgatatttatgtctgctatatcacgcgcggtttctgttgtggtttgattaaagattagaaaacacgatattccgaggtcacaacctctaattcctgtacctgttgtggtttgattaaagattagaaaacacgatattaatcacttaagcgaaaaagacgcgttaattgttgtggtttgattaaagattagaaaacacgatattttcatctttgtattcgtcatcatcgctattgttgtggtttgattaaagattagaaaacacgatattataatgtaattaattgcattatatttgtgcgttgtggtttgattaaagattagaaaacacgatattacatctttaacagcactcgccgtaccttccgttgtggtttgattaaagattagaaaacacgatattttagatgttcctttataaagattactggtggttgtggtttgattaaagattagaaaacacgatattaagccgacgaaaagtcacttgaacaaaaaggttgtggtttgattaaagattagaaaacacgatattcgagaaagtaattaatataaaggccgatgcgttgtggtttgattaaagattagaaaacacgatattaagcacgtattatattaacattcccctcgtgttgtggtttgattaaagattagaaaacacgatattaaaaactaaaacaggattaagcgtagagttgttgtggtttgattaaagattagaaaacacgatattttatataatggaattacttgttcatcggttgttgtggtttgattaaagattagaaaacacgatattaaaaacccattatttatgagacttgtcatcgttgtggtttgattaaagattagaaaacacgatattcccaatgccgcattataaccgtttgcccgtgttgtggtttgattaaagattagaaaacacgatattggattgctttctgttacctcaaactccagcgttgtggtttgattaaagattagaaaacacgatattctaaagatttatcttcattccttctaaccgttgtggtttgattaaagattagaaaacacgatattaatttagcagaaataggtcaagcgaattgtgttgtggtttgattaaagattagaaaacacgatatttctttctactaaaggttgtgtataagttgtgttgtggtttgattaaagattagaaaacacgatattctgttgccaacccctctgatacggtgaatgttgtggtttgattaaagattagaaaacacgatattatcaaaaaaggaacatctcgtgtcaactgggttgtggtttgattaaagattagaaaacacgatattctaacacgttctatcttgctcattgagacagttgtggtttgattaaagattagaaaacacgatattagtcggcttgttatcgacttatagtaagctgtttaggtaaggatattgttttaaaaaatgcttcttttttgttctgataaggcactcttgaggcattttttagttttaaacagttttttaagtgctattttttaaaaaatagtagtgtataattaaaaatagtttaattttattagccccctttcaaaataaaagatgtctcttactttttaaaataacatcttgcttttagtaaattattttgagaagatattgaaggtgttttttcttttaaagtttatcctgtttgttagttagtatcaagtattgttcttggttctaagagtacagcggtctcatgtctattatcgttctagaatgaaaaaaaaaataaatcgttaaaacaactccagttgcgtgggtaaagggtctttagagactgcagctttaccccaaaaattcataatgtttccaaactgtttatctgttatacgcaaaatactaaccttacctaacggcggtaataagcgtttaattcgtttttcatgcacatcagcactttcactactggcgcaatgtcgcatatatacagaatattgcatcattgtaaacccgtcttttaaaaggttttttctaaatcctgacgcattacgtctgtctttaatagtctcggtaggtaaatcaaaaaaaacaaataaccacataattctataagcgtttaattccataactgtggaaacttaattttttttctatgtccggtatagcattgctgcaacgaactcgctgttttttgcaagcctaccattactgtgcttttttcatttttaaaaaatacggttcgcgtaagtgtttttagtagttccgatttaatatccgtagttagctcttgctcatcataatgttccattataaaatggaccgcttcatccactattggtctaaagggttccataatatcgtctgccaaagcaaaggcattatatttgtttttatgatgtatgcctaaggtgtttaataatccacttcctgacaaagctctcgctgttgctgctcttaaaatagcgtaaccataattcagaaaattattggggtaattaccataacgctcacgtttaaagtcttgctcaaaaaacgatttccaataaaagttagcagcaacgccttccatattactagtgtctccgcttaatactttacttgcaataaaatcgaatttattattctgttgtgttatttgttctaaaagaaatccctggtttttaattttctcgatcactgtttgctgccaaagttgtttttttaagggaagactagccataatttgatgtctaaaaagctgttgttgtttgtggtggctatttaaatttaagaataaaccatttggtaaatgagaagcgtcgcatattataacggcagcgttattagcaatgagtaaatttaaggtgggaatactaataaaaacttctgggctatctataactataaacccaatgtcttcaatgggtatactgccttctcgagtctcgttttttattataagttgaaggtttttacatgagactttactttttcgttcaattaataccgtcttttttagcatataagatattttttatacagtaatataccaatactaagtataatacagaaattttatgcggtgtataatagaaagactgtttcaggataatctagcagttgtactcatagggcatttctctgtcgtctctaataatggtaaaatcgcaattgtcgcttctttactcgtttatggactaaatgtggttgtggttattataaatttacggtgtgatataagtagtgtaagtatataaaaatttatttttttccattagattaaatcaatagttttgttgtgttattttttgcatagttataactatctaaaaagagtgcttgaaaaataaataagtacttaaaaacttctgcattataaataaaacagtctccatattatatgaaaaaaaataaagttaaacactcaagtcgttttgttattgcgctagtaatagttgtgctttcatctactctttgtagtgcgcagtctattttgaaagaagagtataacgattccatacgtaaactaccgtatttttctattcacaaaaacaattactttatttcgggtgtgcccaccaataaacatattgaccgcaatacggcaaatgcaaaataccaaataagttttaaacaaatgatctctcgagacgccctgccgtgggacgcttatttatttataacttatacgcaaaaggccttttgggatatttacaaagagtcgcttccgtttagcgatattaattttaacccttcagtggacgttggtaaagctatattcaataaaaataatgaattgcaaggtattttgggactgtctctggagcacgaatctaatggtagagatagtatagcatctagaagttggaaccgattaacggccaattataccacaactattttaaaaaatacgaccgcaagttttgaggtgtggctgccatttatgtataaagaaaataatgctgatttgctggaatatgtggggctaggagagattaatatctcccacgaaataaaaaggaataaactttatgcggaggtgatggtgcgtaaaggtttaaattttaatggcaaaggagttgtgagatcgcgtatttattataatccgtttaaacgtaatctatccaatcaatatataatgttagaatggtatttgggccaggccgaaactttattagattaccaacaatcgcgaagtataattcgcttaggttacgttataaaaagtaacgagtttaattggtttaaacaaaggaaatagggggcgttaaaaaacaaaaaaaaagctgataagaatgttggaaaacataattatcagctttttttttaagagactgttttattttgttgctgagttgaatttgtaagtcacaccaaaattaattccgaaagaagaataaggtactttttcagctaattttttagaaggatcagtgttgtcattcgataactcatctacgtaagttgtttttttaacatagcctgctggtaaattatctaagctgtaaaatccgctttgagcaacggtaccgtctggtaatttgatgtctgtattaaactctgtaatttcagaatctttacgttttaagctaataccatagtattctgcttccacaaataaaccaaagttattgcctaagtcaaatttatacccaagcgctccaacaaatcctaaaggaaattggccgtgaaaatcttctacgtaatccgtttcagaatacgaaccttctggtaggccttgagcatttgcttctgcaggagagaatgtagatctttggttaactacagcttcagttttacccccaactttaattaacgctccaaaacgaccgtaaagattatttgtaaatttgtaaactatagaagctgatgctccaaaagcacgtgctctagcaactgcatctacctgttgacctggtacattcacttcagaaatagtttggtccgtaccatgaagataccccagagcgatatctgccccaaatgaatcgttgaaaaagtaagtcccccttatttgaacattagcgccctcaccgtaactgccataagagttttctctttcagaggctgtaaccgtttcgcctaatttcatacccgcactacccattgcgtaacctgtactagcagatatttcaaattgagcataagacattgtgctcataaataacactgctaaaagtactattttttgtttcataatttttgattttaattcaaagcaatttaaagattataaaacactttagcaacacacttatgtactgttatccataaatagcgttaaatatttacaacgccagcgcagcatgattaaaatgtttgttttaaatagtaatagggaaagtgcgtttttagattgatagtaagagacttataaggcgttaatggtggctttatatttcctgatttaaaaagaaaggaggtgggttattcttaaaattaacttaaaataaaaaaatgtgccaatatagcggatactttaatagcaagaggtaattgtataagcgacaccaaaattagcagtatctttatcggcttaaaacaatagttatgttaccccttatagaaaataacgttaccgctatcgtgtgtttaatttccgctgtcattattcagcgtatttttataaaagaattgcgtcgtggaacggataaggaagagattgaaggtataaaatggtttgggttagccatccttttttggggattgggtgcgtttataaacgtgttgtgtattaccttatttaattgggaaacgtcaaacaaaatccttatatatttaggggtgattatttcgttagcgaattccctatttatcttgttgtctttacaatctatagaacacgactcaaaacggagtttaattgttagggtggtgcaacgtttttcaacccgagaatttgtaggattatattgtgcagttctaggaatgattgcctttgtgtttgtggccgcatcatatagcaatagtgccattagtaataattttatttggctaatcgatatccctatttcggtgtttgtagcattatcgttattctttgaattaaataaagcttttaaaagcagacaaatgcagtttatgtatttgccaacgtttgccttgtttacacttataatgattgcggttttgcaacgcattattccacaagaccgtgttgttgctatcgtcgatcaggaattttggtctttaatggggaccattactgctatttcgtttaagtttttattcatatttctattctcgatcttattatatagttggaaatttttatctgaaaatgaacaacaagaaagtcaggttaataggttaactgccgaaaataaagcactgtattctaagttagaacactttgaaatagcaagcgaaagtcatttagataccataaaaacgataaaaaaggaaattacaggcctacgtgaagctcaaaaaacagtattatccgaacgccaaaaagaagttttagcgtacttagcacactacggcaccacaaaatcgtatggtgaaatagcagaaataatgaacattagtgtcgacggatttcaaacccatatttatcaagttaaaaaaatattaaatattagtgggaatgcaggtaaggagcagctaattacctacgccttagtacaaaatcttcgcattaatttagaccaaaaccccgctacttaaccatatgcttaagtagcgttaacctaaatttaaacattggttaaccttgctgcttgcgatggtttatctcaatttggtaaaaaaaacgaatgcagccacttttagtaatgcagaattctctagacgatactataaactactattttggcaatgcaacccaatggtttgtagatgctgttttttacgaaattcctattaccgacggtgttagtgtgccgtgggcagtaattatccttattttgggagcgctttattttacggtgttctttaagtttgttaacataaaaggattccggaccgctattaatgtagtaaaaggtaaatacgatgctatagacgaggtgtcttccaaagacaaagaactcaaatctcccgaaaataatagcagcaacactgcaaagtctcctaaagataaaaataatggtgaagttactcattttcaagccttaactgctgctatttctgctacggtaggtttaggtaatatcgccggtgtggcaattgcgttaaccataggtgggccaggagcaacgttctggatgattattgctggtctcttcgggatgtcttcgaaatttgtagaatgtacgctcggtgtaaaatatcgagaagtcgctgcagacggtacaatatatggcggtccaatgtcgtacttaaaaaacggactcaaagagaaaggtttcgctaagcttgggaaagtattagctgttatttttgcgtttatgtgtattggcggctcttttggtggcggtaatatgtttcaagttaatcaagcctacaaactcgtggagtatgttaccggaggagaaaacagtgttctacacggtaatgcttgggtgtttggtttaattatgtccttttttgtgggtattgttatcttaggcggtattaaaaaaattgccaatgttaccgataaattagtaccgctaatggtgcttgtttatctacttgccattattactattttagttcttaattataccaaaatccctaatgcgttcttagcaatttgggatggtgcttttaacccttcaagtatggcaggtggtttagtgggggttattattcaaggatttaggcgtgcagcaattagcaacgaagcgggtattggtagttcctcgatcgcgcatagtgccgtaaaaacaaattatccagcaagtgaaggtttagttgcccttttagaaccgtttatagatacggttgtggtgtgtactatgactgctttagttttaattattacagggcaagtaaccacaggaatggagattaatttcgaacaaggtgtactcttaaccgcatcggcattagaaagtggagtctcttggttcccctatgttttggctgttgctgttgtgttatttgcgttttcatctatgattacatggtcgtattatgggtatcagtcatggagcttcctattcggaagaggaaagaaaacagagtacacttataaaattttattctgtgtgtgtaccgtaatcggttcagcagtgagcctttcagcagttattaattttgctgatgcgatgatatttgctatgctaattcctaacatgattggtttgtttattctgcgtaataaagtgaaagaagagcttatacggtataagaaggttatcggagcgaaattttagtgctgaaaaaataatgctataaaaaggcatctt

SEQ ID NO: 1017 - DNA, 20780 bp, synthetic construct
  misc_feature 1..20780: note = Synthetic
  source 1..20780: mol_type = other DNA
tttgtacctgaggccggggtcgaaccggcacgacattgctgtcattggtgtttgagaccaacgcgtctaccaattccgccactcaggcaaattaatgacaggggtgcaaaattagagaaatgttttttactgcaaaaattatttttcaatttatgaataaaagttttgtaacaaaggtttcacttccgtcatcattagagcaaaagatgaggtaaactcctgtatttacctttcttccgtcaaaagtttttccgttccaaacggcttgtcctccgagtgccgtagtttcgtacacaacatttccggatatatcggtaaatttaacgtttacatcggaagctaagcctgtaacggtaatttttccttcgtaaccgggtcgaaccggattcgggaaaacataaacattcccgaatacattttcggcatcggttgcatcacttcggtatgacattatgcctttatccgtcagaaaaaaaacttctcctgttgtgccgtttattgctatgtcgttaattgaatttgaaatcagcggactgttatatttatcaaaatgaagaatttcttctttgccgttttgtgaaactaaaaaagcacctgaattttttgttgcaatccattttcggtttgcaccgtcagtttctatatcggatatttcggcagtttgtaataaatactgctcggttgtatctttgccgtaagatgttaattgtattctgtcggcatagaaatcatcttcaaaagcattatcggaattgtaataaattacgacaccttctccggttcccatccaaatattgttgtctttatcttctgaaaaagcagtaacatcagatgaaattagtttaccttcacttgttgtcggtttgatgattttatacctgtcgtcatttttatttaatggtgtgttattatcgtcgaaaactaaaattccgttactttgtcccaattcaacccatttaaagttattttcggtaacataaatatcttcaacataatagtttgtaattgtactgccgaaattgaaactttgccattggttgtcctctgtttttacggaaacaggatttgctgttccttgatttgtaacccaaagattattgtttttgtcaaatgccgaaccgtaaattcttatataaccgtacggataacctgttattggttgcaacgtgctgttaagattattatatgaagctgtccatttgttaccttcaaactcaaaaacaccgtatccccacgaaccgaaaaaataattattttcatctttcgggttaactgctatcgaaaataaatttcgggcagtatcaacataaatatggtttgatttccattcttgatttttaaaaatattgtatgtgggacgatgccatgctgttgcagtattattgccgtctgtggtaattaatttgttgcctgcagaaaatgctttagctgtataattattataaggtccgttaggatatatataagtaatttgcttattaaatactgacacaagacctttattgctgtcggctatgtatagtttatcgttgtcaataattgtgtagttgattacgggtatttccgaaaaagttcctaaattatattcattcagttcttttataagattgagatttacatcaaaaattttaagtttgtttctttccgataaaattattttgttatttgatgtactgattgattgcaggttattaatattattgccgaacaacttccaaacattattttttctgtaatataatgtgtcattttcgccggaagcatctgtttgatttgcaaataaatacccgttaaaagtttctgtgcaattaaatttgaaattattattaggaatatcgggaactaaattccaatttctgtaatcggcaaggtcggtatttgtaaaataggcataaaataaaccttggtcggttgcggcataaatatttgtttcatcaaaagcaatgtcgtttacttttacgtaggaagcatttggtccgatgaaataagtgtctttaaattcaagtttttcggtatcaatcagaacaattccgaaaccgcaggagaggtaagcatccttgcctgaaaaagttatgttgtaaattgttttatcagtacttaatagttttctttttatttccgaaaggttgtatattatattgttttttaagatatcgatatttgaatttttgtaggcaattattaaaacgttattgagtttattgtatgcaattgtctgaatttcagcatcggaatatccggtaatttttgttaatttttcaattgtaccttcggttttatcataagagaaaacggcattttctgtcgcaacataaattttttctccggcatcggcaaggcaaattgcttttctgtacgaaaaatgatcacgccatttaccgaccggaatttgagaataactgtttgaagtaattgcaattaatgaaattataagaaactttttcaacataaaaaaatatgatttttgttattgagttttaacggtaaaaacggaacaaaattgcttacaatgtttttaagaaattaatgagtttttgagttgcaagtccgcggtggcttattttatttttttcttcctgcggaagttcggcaaaagttttattgtatccgtctggtaaaaaaatcgggtcgtaaccgaaaccgtcttttcctcttttgttttctgttattgaaccgtttataattccttcaaacagagactctttaccgttaattattaatgaaattacggttctgaatttagcgtttctgttagtttggtcttttaatttttgcaaaactttttgaacattatcttcgtaggaacagttttctccggcatatcgagcagaataaactccgggttcaccgttcagagcttcaatttccagtccggtatcatcggcaaaacaattaatcttatatttattaaaaataaaatgtgctttttcagaggcgtttcctgctattgtattttgagtttcgggaatttcttcgaagcaatttatatcgttcaaacttagaatttcaaattgattgtcaagaatttctttaacttctttaagtttgtgattattatttgttgcaaaaacgagtttcattattttttagttgaaagttacatattttttggattgaaagtacattaatctgttgtttcagagttagtataactttattctgaattcgttattccttgttcaatagtctgtatttgtttgaaaatattaagctgttatgtttcattaaaaattatcagttaaaagcggacaggttacgaattttagattttattttccggtatgaccgaatccgcctgagcctctttcagttttgtttaaaatttcaacttcaatgagttctgctttttcgtgttttgcaattatcatctgacatattcgttcgccgtcatttatcgtaaaatcttcattagataagtttacaaggataatacctatttcgcctctgtaatctgcatcaattgttccgggtgtgtttaaaacggatattccgtgtttgtatgccaagccgctcctcgggcggatttgtgcttcgtatccttcggggagttcaataaataatccggtttttattaatgctcttcctaagggtttgagggtaaccggtttatctgtatttgcacgtaaatccattcctgccgataattcagtttcgtatgccggaagtttatgttttgatgtgtttacgatttttatattcatacttaatttcgttaaaattttgaaagttgaaggtatataataaatatgtgatacaaagttaaaatgttttttattttttatgttcggaagttttgatttctaaaataaattttaaaaatcggaatgaatttacgttatttgttttttctttttaaataattactaaaatcataaaataatggttgataaaattaaacattctttaagagagtccaaaggtgcacgttggacggcattaattttggcttctttgtcaatttttggtgcttattactttaactatgccttgtcttcaattaaaccgatgctcgaaagtattttgggatggaacagtgaagatttcggaacttatacttctgcatatgcttggtttaatgtctttttatttatgcttattataagcggatttattcttgataagttaggagtaagaaaaaccggcttaggagcaaccataattatgtttctcggaacagcattaaattattgggcagttaagcatcaatttgctgaaggagcagtaattcacattcctctgttgggtgctatgaaaacgcaagtttttctttcagctataggatttgcaatcttcggagtaggaacagaagctatcggaataacaatttcgaaagcagttgtgagatggtttaaagggaaagaaatggcacttgctatgggtatgcaaatgtcaattgctcgtttgggaacggctttggcattagtaatttcaatacctttagctaaaaactttacagttacggcacctattttatttgctttgattgtaatgattctcggtgttgtttcatttattcttttctcaatattggatatgaaactggataaatcggaagaaactgtaacgaaagaaaaatcaagtgaagatgaatttaaaattaaagatattttattaattatcggaaacagagggttttggtatattgctattttatgtgttcttttttattctgccgtattcccgtttttattttatgcaacggatttaatggttaataaatataatgtgagtccttatttggcaggagctattccggcattacttcctttcggaacaattattttgacaccgattttcggaggtatttatgataaattcggaaaaggtgctacaataatgattatcggttctgtgatacttatttttgtccatggaattttggcaattcccgttctgtctgtatggtggatagcagcatcaatggtaattattttaggaattgcattttctcttgtaccgtctgcaatgtggccttccgttcctaaaattattcccgaaaaacaacttggtactgcatatgctgttattttttggatacaaaatataggtcttttgtttattcctttacttttaggggttgttttaaattcgactaatccggatgtctcgccgaataaaattgttataaaagatgcggttgaaaaagcattctcagaagttttaacggcagaaaatttttctgcaaaagaaattcataaagcaacagaaaaagcaaccggaactgctgttgattcaatagttcagtatgctgaatatgaacctgtttcagtagaaaaaactgattcgaaagatgtagggaatgaaatttatttaagtgtatcccaaaatattaagaatgtagatttatccggaaataaagataaagttttaaaagaaattattaatgcagggagtaaaaatacatttgatattataaaaaaagaaaaacttaatatccgctataactatttttatgatatgctaatatttttaaccttatcaattttgtcattaatttttgcatttttacttaaaattgaagataagaaaaaaggttacggacttgaacttccgaatattgaaaaagaaattgttgcagaagattagaataaatttaaaaccgcttgtatatttgcaggcggttttataattttgcaaaactttttgagatcctttagctcagttggtttagagcacttgcttgacaggcaaggggtcggcagttcaaatctgccaaggatcacctttaaaatgaaaggcttacattgatttgtgggtcttttttgtttttcatttgcatacaaagatttattgttatttctctttttgtactgattttcttgttaaatcataaaatgcgaaaataaaaaatattggaattttgtagtttgtaaaagacaaaatgcttcatataaaggaataaaacatttgcctttgagattattttttactgatttcgtataatttcctgttagaaattcaaattttcgggtttcattaacagaaattaaaaagcctctgccgaagcagaggcatagttcttttgaacttcggcatatagccttattgtgataagatacaaaaggaatttgtgttcttatgtttataaaattacataattttttatacttttcaaaatcttttcataaatactcttattatggcaaaaatactcggtttagatttaggaacaaattctatcggttgggcagttgttgatgatgaaaaaaaacaaatactcggaacaggaattagaatatttcccgaaggtgtagttgcgaaaacaatcggaacaggtgacagagaagtttcaaaaaatgctgcacgaagagaaagcagacaatctcgaagaggtttttacagacaccgtttaagaagaattaaactgttagaaacattgattgaatttaaaatgtgccctttgaccggtaaagagttaaaacaatggaaacagtacgataagaaaaaaggacaagccgggaagacttttccgagttcagaggaatttaacaaatggctgaaattaaatccttataaattaagagcaaaagcattaaacaacgatataagtctttttgaattaggcagaattttttatcatcttatacaaaggcgcggttttttaagtaaccgaaaagggaatgaagaaggtaaaatattttcaggtaaagataatatgaccggtattgatgaaaccaataaacagattaaagataaaacacttggcacatatctgaattctgttatcccgaaagaatatgaaccatataaaaatataattgacaaaaacggaaaagaattacgtgccagaggcagatatacgttaagagatatgtatgttgatgaatttgagaaaatttggcaaaggcaatcgaaacaactcgggcttaattctatacaaaaagaggtaaaaaaagaaagtattatatccggttcaatctataataaacgaaacaagcacagaattaaaaatttacaaaaaagcaaaggcaaagaaaatgttgaaataaaaggcaatatactgacaataaaagaacatattcacttaaaagaatatctcgccggtaaaatttattacgatgatgaggggaatttaaaacataaaagtcaggacagtgtcttattttatcaacgaccgctgcgttcacaaaaaggattacttgcaaaatgcagtttggaaggcagaaagttttatgacaaaaaagataaacgttggcgaacagcaggtccgacaccgtgtccgttgtcgcatcctgaatttgaagaattcagagctttacagtttataaacaatattgaatacggaatcaaaaagagacttgatgaaaatcaaagattgattttgttgaatttatttaacagaaaagatacaaattttgattttaagctaatcccgaaagaattaaaactaacttatgaaacatttaactatgcagatgatttaaaagcaccgggaaattatacaaatgccaaactcagtaaacttttcaatcccgatatttgggaaaagcacaaagagaatatctggcattgtttttatttttattctgataatgataaacttattaataaactaaaaacagattttggtttagaagaaaaaaacgaagaaaaagcagcaaaaattaagttaaaagacgattatgcaaatgtatcattaaaagctatcaggaatattacacctttcttgaaaaaaggatataaattaagtgatgcagttttgcttggaggtgttcgtaatgcttttaaaacaactgatacagaaaacaaaccctatgacaggtgggagaattttaacaacgaacatgaaaaaattgaaaaagatattatacgtataaataaagataagaaaaacaaagagggcgatgcagtaaaaaaaataaaggagtatttacataacaattgcggttttgaaaaagacgataaaaactttaaaaaactgtatcatcacagccaagaaattgaacaaaaaaagatacaagacaaacttgataaaattgaaaatttaagaaatccgattgttcagcaaggcttaaatgaacttcgcagacttgtaaataccttgattgatgaacacggtaaatttgacaaaataaaagttgaactcggaagaaacctgaaaatgggtaagaaacaacgtcaagaaactgaatttaaaataagagataataataagaaaaatgaagaggcaagagagaaactttccgaatacggtttagcccattcaagagaaaatattcaaaaatatttattgtggaaagaaattgaagatcgaagcggaacggcaaaatgtccttataccggaaaaactataaacatcagtgatttactcggtaaagaaaacaaatttcaaattgaacatatttttccgagaagcacatcacttgatgacagttttgcaaataaaacattttgcgatgcaaaatttaacggattgaaaggaaataaaacgccttataatttttataaaaaaaacaacgatgcaaaactctggggcggtgcaaagtcatgggatgaaataaaacaaagagcatttaaacttttaccgtacaaaaaagcaaagcgttttactgctgaaaaagttgatgaaaaagcaggaggttttattgaaagacaattgaatgatacacgctacatgagtaaaaaggcaaaagaaatactttcacaaatttgcccgaaagacaacataagagttatgcccggtagtgtaacatctgaattaagacatctctggggattgaataatattttacaacctgttgagatattagactttaaagaggcaaaaattaatattgataaactcgaaaagcattgggtagtttttgatgaaaaaggggaagttttaagtttttatcctatacataatgaaaaaccgaatttaaaaccgaatgaaattacaatttcaggttatttgaataataaaggtgaattttcttcaaaatatattgccttaaaatcagtatatgaagaattaaaaggtgataattttaaaggagaatattggaaaaaattaaaattatcaaataaaccgttacaaactgttaagatttttacggataaacctgctgtagatgatgatgaaattgttttaagaggaaaagttgcaaaaaaatattttgaaaacgatacaatcggaaagaaaattaaaacaaattttgaagacggctattattgggcaaaatttaaggtaaataatgttaaatttgaaaaacctataccgaaaaaacaacccaaaaagaagtcggggcaaattttattatacggaactgttgaagatgcaatttttaaatcatatatttttgaatgtcaaacaggagaggctgacggcaactattgggcaataattgatttagatttcgacactgttgatttttctaatacaatgaacccaaagcctgaaactgatgataataaaattctgatacaaggcagcataaacgaaaccggtttgttttcctctgatattgataataagcataattttgaaacaactttacctcaaggaaaatattggactatttttgaaattgaaggagaagatgcaaaactttatcctcaaataaatcttgaaccgaaattgcaggataaacaaaaagttgttgaaggaactgtttggatagataaatatacgggtgaaataaaatttgacccgaaaaagaacagagatgatcatcgacaccatgcaattgatgcaataactattgcacttacggaacaatcttatttgcaaaaattaagcacatataatgcacaattagatgaaaaaagaagaggcaaagcgaaaaaaccgacttttgaaatgccttgggacaatttctataacgatgcaaaaaaagcagcttccgaaatgctgatttcgcataaagcaaataataaggtcttaacaaaaattaataaagtaattcataaaaatggaagaacatatacaagtaaaggctatgctgccggagggcaattacataaagaaaacgtttacgggaaacgccaaactcccggtagtaaaaaaccgtattatcatatccgtaaatcggtagaaagcttaactaccgataaacaaattgataaaatagttgacggaaaaataagagcaattatcctacatggaaaagcacaagaaaaaagaataaaaaaagaaattgatgaattaaacaaacagtttaaaaaagcaaaaacagattttgaaaaagcagaaattcaaaagcaaataaaacaaaaacaacaagacataaaaatgttattttctttgccgaataaaaatggagaacgggttccgataaaaaaagtgagggtaaaagaaaatctcggtaatatgatgcaactgaaagataaaaaggtgtttgcagaaaagaaaggcaaagaagttgagctaaaccaatatgttaacccgcgaaataaccaccatgttgccatatataaaaatacggaaggggaattatttgaaaaagtcgttacattttgggaagccgtagagcgtaaaaaagaaggattatccgttattgataaaaacccgacagaaggcagtgtatttgttacatctttagaaattaacgatatgtttttattagggataaatgaagacaatattaattgggaaaatccgaattattcagatttaacaaaatacatttacagagtacaaaaagtatcatcaagttattatacgttcagacatcatcttgcgtcaaaacttgataattcaaagcaagaaattagtttgcaaagttttaaagcatggcaggaagtaaacccgattaaagtgaatattgatatactcggcagaatatcaaaagttgattgattccggaatgaatctatccctgtcagggttaacaaccatgacagggatagacggttgtttgtaataatgaaataagtaaaaaagatgtctcaaaagattatacccatagagtacgataaattttatcatatatataatcaagccgtaagcagagaaaacctttttcgtgaaaaagcaaattatgaatattttttgaaacaatatgataaatatatagaaccgattgctgaaacttttgcttggtgtttaatgccgaatcattttcatatattggtgagaataaaagaagaaaatgaaattgatagaatgaatttgcctatcactgtcagggttgtcaaccctgacagtgattattcaaatattaaaataaagcagccgtcaaagtatttttcagatttatttaattcatatacgcaggcatataacaagaaatataatcgaagcggaactttatttaaacgtcctttcagaagaatatgggttgataatgaaaaatattataagaatttagtaatttatattcacaataaccccgtgcatcacgggtttatggaaagtattattgagtatccttggacatcttaccttaccgtatgttctgaaagaccgacaaaattattaagaaaagaagttttgaattggtttggtgatattgataattttgtatttttacataaaaatgaagataataataacggaattgaaaagtatcttattgactgagatattaaaattcctgaataaaatccctgtcagggtttcaaaccctgacagggataaaaaataaaagatgttttttgttctttgaaataatgaaaaaaggaaatattataaaaccggatatatccgacagttattgaggttgtggtttgataacgaaagattccaactcaatgttttaaattatcaatttaaaacattgcaacaatatctaattcgtagttgtggtttgataacaaaaggaaaagggatatatttttgcattcataaaaggatataaacctgcagttgtggtttgataacaaaaggaaaagggatatatttaaatcttacaataatgtattacatttgttgttgtggtttgataacaaaaggaaaagggatatattagacatgcagtcagacagttggctttcaagttgtggtttgataacaaaaggaaaagggatatattccgttgaagtttcatctgttcacgatacacgttgtggtttgataacaaaaggaaaagggatatattgaatagaaaaattactcaaatggttgttaagttgtggtttgataacaaaaggaaaagggatatattgtatttttcacgtggttgggtcaatggtcagttgtggtttgataacaaaaggaaaagggatatattatatagttatagatactattacatctttaggttgtggtttgataacaaaaggaaaagggatatattagtttaatgtttatgaataatcttgacatagttgtggtttgataacaaaaggaaaagggatatatttgccacccattagtatcttcttctctgtttgttgtggtttgataacaaaaggaaaagggatatattaaaacgtgttcctgttatccgcccgcagcgttgtggtttgataacaaaaggaaaagggatatatttatattttgcttgataatgttcaatatacagttgtggtttgataacaaaaggaaaagggatatattaaagaattgatatatttatcaatccttttagttgtggtttgataacaaaaggaaaagggatatatttaaatcaataaattatccggctaaaatcaagttgtggtttgataacaaaaggaaaagggatatattggcagttcaacggtcatgctaaaaaatggagttgtggtttgataacaaaaggaaaagggatatattaaacgtgccgcccttcaatttggagtaggtgttgtggtttgataacaaaaggaaaagggatatatttttggttctttaattgtatcacagtctgctgttgtggtttgataacaaaaggaaaagggatatatttgtgccttagaaatataagaagaaaataaagttgtggtttgataacaaaaggaaaagggatatattaactgcattaacagtacctgtactattactgttgtggtttgataacaaaaggaaaagggatatattaaaaaacaagcaaacaacaacggaaccggagttgtggtttgataacaaaaggaaaagggatatatttctatttacaagatattttccaatttccttgttgtggtttgataacaaaaggaaaagggatatatttttttctttttctttccatcgccttttcgtgttgtggtttgataacaaaaggaaaagggatatatttcttcataatttagaatgtcatatgttttagttgtggtttgataacaaaaggaaaagggatatattgtttcctgaaataaattacacggaaagattgttgtggtttgataacaaaaggaaaagggatatattataaattaaattgtccattcgtcatcttcagttgtggtttgataacaaaaggaaaagggatatattcatctttaactgtgtataaatctctccttggttgtggtttgataacaaaaggaaaagggatatattaacctgctacaatcttatcgggagtgtacggttgtggtttgataacaaaaggaaaagggatatattatattgttaaataactttataatattcaccgaattacaacagaaacgcgagaataaaaatgatgcttttacagtttttttaaatatttgtattcgtttttttatttataaaaaaagatatatcctttaaaaattctcgttcgattaaaaaaaatcgttcggggattttttttgaataagttaaaaaatttccagttgcatcggggcgttttcgagcggaatctcttttttgccccaaaaatttacaatatttccgtattgcttgtcggtaaccggtaaaatattgatatgccctaattcgggtatgcctttttcaactcgttttatatgaacgttcatactttcgcgacttgcacaatggcgtacataaacagaatattgcatcattgaaaatccgtcgtcaagcagggatttgcgaaatttggaagctcggcgtctttctttttttgttgtagtcggtaaatcaaaaaatacaaataaccacataattctataggcatttagtctggtttgatgcattgtaatttatttaaacacaggataagcaatatttttagtttctcctttataacattttaccaaagatgccgttgtcatacttaatcctacagataatggtcgagtaactttcttaaatcgggtatccgttgtaagaacattcattaaatcaaattttatttcttttgttaagtctttataatcgggaaattttgcaaaagtttcttttacaatcctgtcggcaaaagggcggtaaggttccataatatcatcagctaaacggtaagcattatatttatttctgtgatgaatgcccaatgcaggcagcagtcctgaacctacaatggattttgccgttgcagaacgtaatatcgtataacagaaattcagcattgaattcggttgtttgccgtctttgtgccggataaaattattgaacaattgattccaataaatacgtgctgcatacgattctctgtttgtagtatctccgctttttacatgtttggatatttctcttaaagcgtttccgtttttcttaaaataatctaaagcagctgcttgattttgtatttttgcctttatggtttgctgccacaggttttttttcagaggttcgcttgcttttaattgagcatctgcatgttgtccgtgtaaatgatgcgattcaaagttaatcatcatagaagtcggcatgtgcttgtcattgcagaaaataacggcagtattatttttggaaaataattgcataaccgaatgggtgtatgtaatttgcttattatcaaagataatgtaaccaatgtcttcggcagctatcattctttctttatcaattattttgtcttttacatatagctgtttgtttttaacaaaaaggtggtaggggtttacgaaaaaaagagttcttttcagcatgatgttgatttttaattatttaaaaactacataaattatgccgacctttaaaagaacgaaattataatctcattttactcatctgcatatcttggttgaatactaaaacaatattttttttaactcaaatatttccgaaattttgaataaagtatattcccgaagtaaaacaattaaatgtataattgcttgattttaaaataagcagaaaaataaatttggattagaacacagaaggttaatgaaaagtaaatttttaaaaaataatcgaaagcaaatcaatatctttgtagtccatatcaaatttctttgctaagcgttcgtttgttaaaatgccctcgtaaatatatgcaccgtattttaattccggaatgttatgaataatattcggaatggttttttctaaacttattttttgcaataaaggaaatgttgtgttactgagtgctatcgaagctgttcgtgcagcttttgaggcaatattaggcacacaataatgaatgacaccgtgagtttcaaaagccggatttccgagatgcgtaactttagaggtggcaatacaagatgcactgtcggtattcaaatcgataatcacggaaccttttttcatttcagcaatcattttttcggaaataataaatagattttcatcatttgtattttctgcagcagctatcaaaacatccgcagtttttaatgcttttgaaattatttcgttttgaaaaacagaagtgtaaagttgaatgcctaatgtatttttcagattttgtaatcggaataaagagttatcaaaaacttttacctgtgcaccgagagcagcggcagctcttgctgcatattctccggcggttcctgcaccaaaaacaagtactttcgcagcaggaataccggttattccgcctaataaaatacctttaccggtaatcggattacttaaatattcacttgcagtgtttattgccaaaattccggaaatttcactcatagtctgaacataaggatgaaattcatcattattttttatcagctctaatccgatgcaggtcattttctttgcttttaaagcattaattttttgagctgtttgtgtattataatgtaatgcggaaattaataattgatttccggtgagaagttttatttcattcgattcaattggtgcaacttttaataaaatttcggatgcaaaaacttttttcctgtcttcaataacggcaccggcttttacgtaatcggtatcctgccaccggcttcgtaatcctgcaccggcttctataacaatatgatgtccttctttacaaagctgttttacagcttgcgggcttaacacaatgcgattttcgtatttatctgattctttaggaattccgactgttaaaatacgtctgttctttttttcttccagcatttctgcttgcggcattaattgttcactatatgagaattgtcctgaaggattttgagaaaaagaggtcatgttgtattacatttttaagaattgttgtttggtaaatggctaatttacaactttattacaagatatataccgaactgcattttctttttctttaatttcgattttaatataattttcgggcagtaaatcttcaattaattcaggccattcaataaggcaaacagcaccgccgaatatataatcttcgtaaccgaaatcaaatacttcttcttttgtttcaatacgataaaaatcaaaatgataaataatatcatcgttttcggtaaagtattcattcacaagtgaaaaggtcggactggtaacggaatcaattacttttttgtatttgcatatttcctttatcaatgcggtttttccgctgcccatttttccgaaaaaagcaaaaattttctcatttttattggtgtcaataattgcttttgcaattttcggcagatcatctgtgctttcggcaatatatcggttcattttaactatcttttcggttttaatttaatacaaggtataagcatttcttcaagggaaataccgccgtgctgaaaggtgtttttataatattttacataatgattgtaattattcgggtatgcaaaaaaatctgaattgtatgcaaaaatataggatgaactgatatttgtaaccggtaaaccgactgattccggttttgttatctcaaagatttcttttttattatatgccaaatttcttccttgtttgtagcgcagattagctgttgtatgtctgtcgcccacaacttttatcgggttatcgacattaacggtgccgtggtcggttgtaataaaaacggtaacatcttcttgtgccagtaattttattaagtttaaaagcggtgagtgttcaaaccaagtcaaagtcaaatccctgtatgcagattctccgtcagcaagttcgcgtatcatttttgtatctgttcgggcatgcgaaagaatatctacaaaattatagataataacagataattggttttgcatcaggtttgcaatattttcatttactttttcaccaaatttattatttaagattttgtcgtaagaaaactttactttacgtcggtatcttagaaaaagttcggcaagtaactctttttcgtgtgcattttttcctccttcttcttcatcattcagccaatattgcggataacgtcttgaaatttcgagcggtgttaaaccggcaaaaaaagcatttcgggcatactgtgttgcagtcggcaacatagaaaaccaaagttcttctttttctgtttcaagatattgattaataacaggttgcaaaagctgccattggtcgaaacgtaaattgtcaatcattaatacgcagactttcttttttgcatcaagcaaaggaataatttcatgacgaaaaaaatcgaaaggcattttcggtctgtttttcgtatcagggacaaaccaatctttataattatttttaataaactttgaaaattcaatatttgcatcttttttttgctgaattaaaacttcatccattgtatggtctcctgatttgtcaagttccagttcccaatatactaagtctttgtaaagattataccactcatggtatgtgccggcttgagatatttctgtatttaattttaaaaattccgattgatacttttcagaagttttttcgctgattaattgtcggttttcaatattttttttaatggcaagaataatttgcttcggatttacgggttttatcaggtaatcgtcaatttttgaacctacggcatcgtccattatatcttcttcttcatttttcgtaaccatcacaaccggaagagcaggtttaatacgtttaatttccgataatacatctaatccggaaatgcccggcatattttcatctaaaaaaacaatatcataattattttctttcactaattcaacagcatcaaaaccgttattagcggtaaaaactgtgtgtcctttttcttcgagatataaaatttgaattcttaagaggtcaatttcgtcatcaacccacaaaacttttgcttttgtcatatttatttcggttctttcagtttaattacaaatataaggaaaaatattttatacttgcataactttttaagtagtaaattattgtaatataataatggtaaaaccaaaaaaatatctcgggcaacattttttaaaagataaaaatattgccgaaaaaattgtaaatgcactttcggcaaacgggattaatgatgtgttggaaataggagcggggacaggaattttaacggaatttttgttaaaaaaagatataaacttatttgttattgaaattgatactgaatcgattgattatttgaaacaacattttttcgagttgaaagagcgacttctgagtgaggattttttaaagtttaaattatccggattttttaaaaatgatatagcacttatcggtaattttccttataatatttcaagtcaaattgtgtttaaaatactggaaaataagcatatcgtaaaagaagctgtcggaatgtttcaaaaagaagttgccgagcgaatatgtgcttcgcccggaaacaaaacatacggaataataagtgttttaacgcaggcatattacgaagcggaatatctttttacggtaagcgaaaaagttttttatccgccgccgaaagtaaaatcgggtgttataaggttattgcggaaagattcggtaaatttaaactgtgatgatgttctttttaaaaaggttgtaaaaaccggttttaatcaaagacgaaaaactcttcgaaattctttaaaaagtttaacacataacatagaaacagaaaatgtaatttttaacaaacgaccggaacaattaagtgttgaagaatttgttgaattaacacgaattatttacgggtaacagctatctgcacattattttacatccatattttaaatataagatttagttaagaataattaaaacgggtatcctattgctaaataaaaagtccagtcatcatatccaaattttttgtatcggtaaacccatctgttgtttacgggtaaagacgggtcaaaaagtttcaatcccatatcggctcttaataatacaaagccaaaatcaaaacgtaagccgtagccggttcctacggcaatttctttatagaatgtattaaaattaaattttgcacccgggcgaatatcttcatcattaattgcccatatgtttccggcatcaacaaatagagctccttcaagtttccaaaataatttcattctgtattcaatatttgcttctaatcgaatatcagctgtttgattgggataactgttaagtgtatcactcagcgaataggagccgggtcccagggttctgctttgccatgctctgacactgcttgctccgcctgcaaaatatcgttcgccgaaaggtattacttttaaatttccgtatggtaatgctgctccggtaaaaagtctgaaagcaattttatcattttcacgcgacagttttttatgaaaccttaattcaatatcttctttaataaattgggcaaaaacgatattattaattcggtaacttccgttttcttgcggcttgtcaagtgctttcataactgcggacaaactgtttccggctaattttatattaaaggtaaataaaaaagtattttttttgcctttaataaactgattattaagtgtaaatttataggatgtcccaaaaacaaaatgtgtttcataagtgtcctcaagttgtaaaatttttattaaatctctgaattcctgagttgaatttcttaaatcaacaacatctgcggttaccggtaaaaaagcatgactgattgtttgagacgaattccaataataaccaatatttcctccggcaacagtataggtgtaatccggacgttgtaaaaaattataatttgccgcaataacggttttaggatttcttcgtttgaaaaatttctttaaaggaacgggtgcgagtaaccgaggaaagtccaaactgaaatttacaccgtattcttcgctgttaaaaaaggcagatgtattactcggcaaataggacttattttttgtcaagcgtttaaatgcaagttttgttccaacatttaaaactcctgcatttcgaaaaatattattatgaatataagaaaacgttccgcctacaccaaaattaccggaagtattagtcagctcagcagttgtatttgttgattgtaattttgattgtgttaaacgtatttcgcaatttaaccaagcaacggtatctgaatcattgtcattttccgtttcggtaaatttcacatttgcaatttgaataacaggaagtgaaactaaataacgataagttgcattgacatcattcaaattataataatctccggctttgataaaaatacctcttataattgccttgggattaattcgcggcatttgattgtata

SEQ ID NO: 1018 - DNA, 18664 bp, synthetic construct
  misc_feature 1..18664: note = Synthetic
  source 1..18664: mol_type = other DNA
tgtttgtataggtgtggtgcaacacattgtgttgtattttccaattaatagcacttccacctactaaatttattaagtaacctaatgctgaatttatttttttattttttgaataaacgccatggttggcatcatgcataatggataacccaattcctgccataccaattcccattaaaacccataaaagaaaaacggaaaaagtgttttcaaaagtgttggttagaactaatatgtaaggaacaatataaagtgccaacataaaaatggttttaataaccatattggcgtttccatatttagaaatattattttctttgaaataattatttactctagctcttagttcttttgtgaaatctgcgttaatcttggtgttaaattttacttgttgttccattaaaataataaataatttgatacaaaattaatcattttttttaacctaattattcctctgtttcatccatagtgtgatatacgttttgcacatcatcatcttcttcaattttttcaagtaatttatccatatcggcacgttgttcgggtgttagttttttggttagttgaggtatgcgttcaaaacctgacgataaaatttcaatgttattttcttcaaaatgcttttgtaatgaaccaaaacttccaaaaggtgcataaacaataacgccatcttcatcatcaaaaacttcttcggcaccaaaatctattagttcgagttctaattcttcaatgtcaattcctgtttttgctattctaaagttgcatgtatggtcaaacataaaaattacagaaccagaaacgcccaaactgccttcacatttgttaaaataacttctaatgttggctactgttctgttgttgttgtctgttgcggtttcaactaatacagcaattccgtgcggtccatagccttctaaaattacttgtttatagtcggaaacatcttttgaagtggctttttttattgctctttcaacattttctttaggcatgttggctgcctttgcattttgcattacggctcttaaactggaattcgattcggggtcgggtccgccagctttaattgctattactatgtcttttccgatgcgagaaaacgtgcgagccatttgaccccagcgtttcatttttcttgcttttctaaattcaaaagctcttcccatttttatttatttttattagttaagtcaattaagtctaaagtttataaagtataaagtttataaagtttataaagttataaagcataaagtttataaggttaaaacatttgaaattcaacacttaatattcaacatttctttcataaagtcttatttcttaatacctttgttctttcgtcttgttaattaaatatcaacacattaaaattagtttccttcaaataaaccatgtaattcggcatctacattttggattattttacctaagtcttcggctttttcagaaaaattattactatccacatcaataattaaaatttttccttgatcgtaagtagaaacccatgcttcgtagcgttcgttaagtcttttgaggtaatctaatcttatactttcttcgtaatctctacctcttttttgaatttgatttactaatgttggcacagaagccctaaggtaaattaataaatcggggggggttataaatgtttcttgtagtttaaataaggaaaaataggtttcaaaatcacgggtggtcattaagcccatggagtgtaagttaggtgcaaaaatataggcgtcttcataaagggttcggtcttgaataacggtttttttcccttttcttatttcttgaattttgcttattcggcttgtcatataatacacttgtaggttaaaagaccaacgctgcatatcgttataaaaatcgttcaaataaggattgtcgtcaacatcttcaaaatgaggttcccatttgtaatgttttgctaaaagtttggttaaagtagtttttcctgagcctatatttcctgctattgctattatcataaatgtgtgtttctataaagcggttaaaagtacaaaattataaattaattgcaggagagtgttctaaaaaaaataattttatgaagtaagaaatccgaagtaggaagcaatactattaaaaattcgtgcattcgtggcataactccgtgttcctctgtggtttttaaagtcagaagttggaagacagaagtaggaagttagaggttaaaaatgttttaaaagctcaacattgctacattgctacattttcaaattgttacatttctgttatgctttttgtgttgtcggtataaactcgttctataagaattttacgagggtctatggcagcttttgcaggcaaggcatttaccgtaaaagtgaaatggttatttttcttattaaacagaacttttttctcatagagtaattttttttcatctttatcggcataaacaccaatatttacccaatcattcagttcaactttggtttcgttgccaatagtgtcggcttttaatttataagcttctactttcattgtaatttcatagttgttgttcacttttttgtaggaggcttctgttaatctaaagtcgtataatgtaatttctttaaaccaatcggttatcaaatatttttgagaatcgggcaattgagcttctaaatggtttaaaaaatttaacgaagttgggtaaggaggttctttgtatcgatattcttctaaaaagtttttaagtgcggtgtttacgtttttttcaccaacataatcttgcaaggcatacataataacactcccttttccgtagtgaatatatccttgattttctactttgtatagtggcaactcgttttctgtttcaccacttcttccattcaaatatctatctaaatcgtattttaaaaagtttttcatttttaacgaatcgttcaatgtttttttcatcaccattaaagcagaatattcagcaaaactttcgcttaacattgttccgccttgcatattagcaccaactacttggtgagcccaccactgatgtgccatttcgtgagcaatcacaaagtcgattacattatttttttcggcatctcttaaatcgataacaaaaccaaatgcttcggaatagggcatagtgccaggaaacgcttgtgcaaatgtggaatatctcggaaattcaataattcgggcttgtttgtgaaaataaggaccaaaattttcggtgtagtaacttaatgatttttgtaaggcatcgagcataatttcggtgttgtaggtgtgttttttatcataatacacttctaaatctattcctttccattttcttcgggctacttgatattctgccgacataaaggagtagaaattttgagaaatagtatctactttgtaattaaaataatttcggttattttcttgccattcttttattaatgaaccaggtgcaacagccaattggtttatggaggttgatattacggtttctacagtaacccaatcggctctgccattacttaaataattttgcatgcaattaacaccacaattttcttctagtttgggcattcgttttttttcgggtaagttgtgcttttttcgagtatttttatctgctatttctacaccctcgttgtagcccatgtagggtaaaatattaaaattattgaagaaggttccgttttttataatatcaaggctacttacttcattttcaatacctttgttgatgtatgttgcttctactaaaatggctattgtatcgtttggcaacaaagccttatttaatttataaatagtgtaatctaatttttcatcgtttaaaacttgcttcgcatttttgatgtatattttttgattccactttttggttaatgaaaaatgtaaactatctataggtaaagcggttttgtttactaatttcagcttaattttagcctctacttttcttgtttcaggataaatggctatatcatattttatatcaaccacttttgggattagactattttcgtattttttataggttgtttcataagcaatctggtctttttcatcttcgtcagaagtgttgtaatgatttaaaatttgcgtattgtagtataaaaatccggcaacgccaataaacgctataaaaacactactaattcctattgtatagtttttgttaaggtgtttttttagggaagtaactcttattttaaagctttcggaagtgcctcttatccaaaacaaacccgctaaaagtaaacagaaaacaccaaataaaaaccaatataaattaaaccataaaacacttggaagagctggtccaaattcattcatatcagagtaagtcatacttggtgttgctccaattctaaacatattggtatttatttcgagcattaaaaaaataatatctaacaaaaaaagaaataaaatagaaataaaataaccaatgtatttattgttaattattacttgaataaaaagcaaaaccatagaccaagtagcgtatttaggcaaattgttgtataaaaaatctaaggcataaacagaaagttctaaattagtgtagccatttattaattggtaaaatagggcaattaatattaaaaataagttgattaatgaagtaacaataaccaacgaaacggcttttgcaattaacgaaacaattgaaaaatgcggtgtggaatctattacttcgttgatgtggctatttctatctttccaaattaattcgccactaaaaaacaccagtataatgataacaaaaatagaagtggtattgtttatgtcttctatcatattgtatgttagcggataagcgtgcaacccataatattcaaacccgccataaaaagttacgatgataagaatggtgctaaacacaaaaagaattttgtaagtagtgctttttaagatacttaatagacttattttaaagaaactattaaaaaaggtaagttggctttttgcattaaagttgaggctaatttttggcaaataaaattgtgtgatggttttcttttcgggtttaatttcttttgttttcttttgtttttcggtaaaagaaaatagtttataggcaactgctaaaatcaaaatccctacacttatccaaatcattctgttgtagagcaaccaaccgctaaatccaatagaaacagtatttttttccataggcgtaaaataacgagcatcaacactataagctctcataccaaaaatatcggttaatgctcctaatacttgattttctaagtccgataaaagcgttccagaaacaaggtatccaataattataattaatgttccaacaaaagaaattacggtgcttttccattggtttgccattgcaaaaatgatagctcctgcaaaaaacatattaggaagaatgagtagcaaataattgtttacgaaagaactaaaataaaacggccctattcggtcgggttcgatccaacctgctgccggaccaatgactgcacctaataaaaaacctaaaaaaacgcccaacaatggaatagttgatagcactaatgctccaaaaaaacgaccgaaaaaataagccgattttttaattggagtggagaacaaaatttcgttaaaatcgttttcgtaatcacgcagggctgcattattaaaaaaagcagtggctatcattaatccaaaaatggttaatattgatacataggttgttattacgtgcggagcatttttatacacattaccaaccgaaccgccaataactacattgtcgctagccacagcaccaaaaaccaataaggtaattatgaataaaaaaatataaatcattgggcgttttaacgcacttgtgatttcttttgtgaaaaattctgtaaacatttttaaagttaaaagtttataaagtcataaagtcttaaagtcttaaagtcataaagtaatccctaattactaactactaatttattttcgtaaaaaaaacatcttctaaatttggctctaccaattcaaatccattgcttgggttggtttctgaaagcacgtgtataagaggtgttcctgctatcattttatcggaaataacttggtatttttgttgatattcggctacctcagttcgtgctattgatttttgccacacttttcctttaagctcttgtataacatctgttggcgaaccgtgaaaaacaagttgccctaaattcattattgccatttttgaacacaattctcgcacatcatcaacaatgtgcgttgaaaggataataattacctcctgccccacatctgccaataaattatgaaaacgatttcgttcgcctggatctaatcctgccgtaggttcatctactataattaattgcggatttcctattaatgcctgagcaataccaactcgttgtttcattccgcccgaaaatccctttaccgacttgtttcgttgctcgtataaatttactttttgaagtagataattcaccatttctttgcgttctttaccgttggtgatgccttttaaaatggcaatatgattaagcaattgttcggcagttatttttggataaacaccaaattcttgcggcaaataacccaatgttttccttagttctatcggattgtttaatacatctatttcattcaaaaaaacggtaccactatcagcttcctgcaaggttgctaaggtgcgcattaaagatgattttcctgctccattcggaccaagtaagccaaacattccgttagaaatttctacgcttacgttgtctaatgcttttactccgtttggatatacttttgtgagattttcaatttttaaagttgccataaaataatgtttatcaatacgattactcaaaaataacaacaagacgaatgtgttacactaaatgttacataaaaggtaaaaaatggaggttgaatggtaaggggaggtgttgaaatattaactaaagtttcggagtagctgattagtgtgatgaaggagcgtatgggacgacctttggtaaattttgttcgttttcttttgtcagtccgagtaggctcaatggagtgctaacggaattgaatcgtatcgagaacaatataaaattggagtaaaaaaccatcaacttctcgatacgtttttcgtgcctcaaaacactcgaagtgacagtttttttgacccatcagaaacaatgtagtacaaaagaaaaagttaaaagccttgcagttccaattaagtgatacattatgattagaacaaaaaatgcttccattaaaaattgaatacaccaacaaaatcaacacctactagcaattataaaaaaaatacataaaaacaagtccgaaactttagatattaagacattaagaaataatatagaccgaaactaaatgggttttcgggaaatgaaaacactttggtttcgagtatattaaaaatttaaattttagaaatgataagttctttgcttttggtgagtttaaaaattaggttttgttctatccgaacggctaaaatcttttcaggtgccgtttttggggtcgtttaaatatacttgattgttatattctactaaaaaattaggttgtatgtttttgttcaataaattagctatttgcactgatttgttagtggttttcaactctatgtctttccgtataagttcaaaacgaatggggttgtaataccaaattccatcattataagaacgacaaaccagcgaagtttcatcaatatctaacgtagttaaatcaataatggaagaggttggagaaagggtgttgtcgagtgtgataatttttgtaaattctttaaaatagactaatatttttagtggattataagcatctacgctcgaaatttcgccaagcaaattattgctatatgagtagagtaactttcctttgttggaatatttttttatctcaacatcgctaaattcgtaataattgccaaactggtcggttgtaaaactttttcctgcaaaaggaatagaaatttgcgattgagcaactaggtttagagttaatattgagaaaagtagtaagctatattttttcattgttcatttttagtttataaagtagaaagtttgtaaagttcataaagttgttatttagtttcacattttttgtttttgttgtcattctgaacaaaattttaccaattcgcctaagcgaatggagtaaaatgaagtgaagaatctgttaagttcgtaaagttaaaactcaacatttctttcctaaagttttacgtcttattgtctttattttatcatcttgttaatagcattaaaatttcatctattatttttctattatttgttaatcgaggtactttgtgctgccctccgagtttgtttttttgctttagccaattataaaacgtattttcttgtgcaataattacttcgggcatagccaaaatcataccgttaaaacgttttgcttcataatcggaattcaatttttttaatgtttcatctaacatatattcaaaaatagtaatgtcggctggttttttttcaaattcaattaaccactggtgcctgcccgaattggttgagttaagaaataagggagcaaccgtatagtcttttacaattgcttgtgttttattacaggcttcggtaattgcaatttcggcattgtgtatcattaattcttcgccaaaggcattaataaactgttttgttctgcccgtaattttaaatctgaatggatgtatagaagtaaattcaatggtatcgcccaaccgatagcgccataagcctgcgttggttgtaattaccatttcatagtttttatacaacattacattttctaacgaaactgttgtaggttgttctttttgagcatcttcaatggctataaattcataaaaaattccataatctaacatcaagagcatttcattgctgttgtgttggtcttgaattccaaaaaaaccttccgaagcgttgtaactttcataatagttcatttttgaggaaggaattatgtcttcaaattgctttttatagggagcaaaattaactcctccgtgcatatatagctctaaattgggccaaacatcaagtaaattagttgtgttgttaatttctaaaattcgttttaataacaccaatgtccaagaaggaacgccagaaatgttagaaacatcttcttgagaagtggagtttgccattttttcaattttttcttcccaattttccattaaagcaatttccatttcgggcaccctacgctgttccacccaaaaaggaaagtttttcataatgatggcagataaatcgccataataggaactttcgctaaacggattaagctgactactgccaccaacaaccaaggtttttcctaaaattaatttcgattgcggatgattttgatggtaaattgccagcaaatcttttccgcctttgtagtggcagttttctaacgattctttgcttacaggaataaatttgcttttgcctattgtgcctgatgatttagcaaaccatttgaggtcggaatgccacaaaatattttgttcgccttgttttattcggactatcgttttttctatatcgttataatcttgcaacggtacgctatttttatattcttgataagtagaaatggtgctaaaatggtgttgttttccgaactcggtaaaacgagcatcgtaaattaatttttgaagcagctcgttttgaacatcaataggatattttataaaaagttccatttgatgaatacgctttttgattagccaagaaaatacagaatttattatttccatttttatctttataaaataaaccataaagatatagaaattagtggaaagtttcaatattgtttttttgtccgttcgagtaggtttaatgtagctttagcggagttgaaccgtatcgagaacacaaaaaaaaagtcccaccgaagcgggactaaagattttcatctacggcatatagccttattgtgataagattaaagattaggattcttttttcttgctgtaaaagtatcattttttttataaaaaaaatacctatttttagattttatttaaaacacacacattatgagcaaaattttaggattagatttaggaactaacagcattgggtgggcagtggtggatgatacaaacaataaaatacttggtattggaagtaggatatttccagaaggagtaaaagctgatacaataggaaaaggagataaagaagaatcaaaaaatgcttcccgaagaactagtaggcaacaaagacgacaattttacagaaaacgacttcggaaaataaaattgcttagaacattaattgacttaaaaatgtgtccattaactcatttagagttagatgtttgggcgaaatgggagaaaacaaaaggaaaagcaggcagaaaagcaccagattcacccaattatgaagaatggcacagactaaatccttatgttttaagagaaaaggctttatatgaagatttgactctttttcaaatgggacgtgtgttatatcatttaatacagcgaagaggatttttgagtaataggaaaggaaaagacgatggagcaatatacaaaggaaaaccaggaatggttggcattaaagatacccaaaaacaaatttcagaaaaaaccctaggtagttttctacattcaatttttccgaaagaaggagaaccttttaagttaattaccgatgaaaatggcaatgaactccgagttagagcaagatacaccttgcgagatatgtatgtggaagaatttgaccaaatttggaacagacaagctaaagccttaggattagatgacaaaaacgcaacaaaaacaaaaatccaatttttaaatggaagtcttaaaaataacaggaacaaaaagaaaattgaaaaccttcaaaataagtatggtgttgaaaatgtaaaaattgaagagttaaaagacgggaaaagtaaaaaaacactttataaagtaactacaacaaccaatgttccactaaaaatatttttaggtggtaaaattgaacacgatgatgagggaaacgtgaagcataaaagccaagacagtgtgctattttggcagcgaccattgcgttcgcaaaaaggcttgttggcaaaatgtaggttcgagcctgattttaaggataaaaatggcaaatatttacaaagaggaaaaacgccttgccatttatcacatcctctgtatgaagaatttagagcgtatcaatacatcaacaacattgagtatggtaaaaaacagaaattagaagaaacacaacgacttcaagtattagagttaattaattcaaaagacagtaatttcaatttttcggaaattccgaaaaaattaaaaatggaatatgaaaaatggaattattcggacgaccaaaaagtagcagctaattctactactaaacatttaagtacattattttccaaagaaatttatgaagcaaacaaggaagaaatttggcattgttttcatttttttgaagacagcgacaatctaatagaaaaactaaaaaaagattttggtttagcagaaaaagacattgaaaaagttgataaaatcaatctaaaagaaggttattctaatgtttcgttaaaagcaattaaaaatattttaccctatttacaacaaggactgcaaatgagcgatgccaccattttaggtggcgttagaaatgtatttggcaaacgttgggattattttaaagatgctcacgagcaattggaaaacgatattttaaaaattaatcacgagaaaaataataaagaaggagaagcaattcaaaaaattaaaaattatttggctgacccagaaaataaatttggatttttaaaagacgacaaatcttttatcaagttgtatcatcacagccaagaaattgaagaaaaacaacttcaagatagattagatgcggttgaaaatttaagaaacccaattgtgcagcaaggtatcaacgaaactcgaagattagtaaaccaactaattggtgaatatgggaaatttgatagaattcaagttgaattaggaagagaagtaaaaaacagcaaaaaaggaaggcaagaacaaacgagaagaatttatgacaacactaccaaaaatgacgaagctcgaaaattgttaacagaatatggcttaaagcacgatagggaaaacatccaaaaagtgttgctctataaagaaatgcaggaaaaaggggtaactacagtttgtccttacaccaataaatccatcaatattagcgatgtgttgggcagagaaaataaaattcagattgagcatattattcctaaaagcgtttctttagatgatggttttgccaacaaaaccctttgcgatgccaagtttaatggtttgaaaggaaacttaactccctatcaattttatttaaaaaatagcgattcaaaattgtggggaggagcaacaagctgggaagatgtagagcaaagagcttacaaagtcttaccttacccaaaagccaaacgatttacatctaaaattaaagtagaagatgccgatgtaaaaagtagttttattgagcgacaattaaacgatatgcgttacatcagccgtaaaacaaaagaaattatgtcgcaagtttgcgaagatgtaagagttttgcctggtggtttaacagccgagttaaggcatttgtggggtttaaataatatacttcaacccgtaatgttggtcgatttgcccgattataaattagaagcaggaaaatcaataccacattatgtggtaatggatgaaaataataaacccgttttaaccttacctatttacaatgacaaaccaaaattaggagaaaacgaaacaaccattaccggcaaagtggagaaaggagtttttaaaacctccgaacaatttgtaaaacttgaagttaaaactcccgaattggtaaatggcgaatattggttgaatttaaaactttctgaaccaaaacaaatcatacgtatttttagagaaagaccagaaacctcagaaaatgaaatagttttgagaggaaaggttgaaaaggaaaaatttaaaaatgagggcattgggttggttactgccaaaggttttgataatggttcgtattgggcaaaatttaccattacaaacaaaaagtttgaagcacccgaaaaagataaacaacctaaaaaatcgggaaaacaagtattgttgtttggcgaagtaaaagaaggcttttttaaatcgtatatttattcgtgtgaaacaaatgaattagacggtaaatattggttgttgttggatattgatacagaaaatgcttcatttgaaagagccataaatgaacgtcctattgtttcggatgctaaaattattgtggaaggtagtgtcaatgatgaaggtatttttgtttctgaaattgatgctcaacatcaatttaaaaccaatgaaaaaccaggtaaatattggtttgtttttgatattcttaatgaattaaccgatttcaatgccatcgaacaacccaaaccacttttacaagaaaaacaaacattagttgaagggaatatttgggtagataaatacactggagaaattaaatttgacccaaagaaaaacagagacgaccaccgccaccacgctattgatgccttagtaatcgctttatcaaaacaaagttattttcagcaattgagtgcttataatgctgctcgtgatgctaaaaagaaattaaactcatttgaaaaagaacaattagattttcctgacccttggaatggttttcataccgatgccaaaaaagaagccgaaaaaatattgatttctcacaaacaaaaccgaaaagtactcaccgaagtacgaaagaaaattaccaaaaatggaaaaacatttacaagtgttggtaatgccgtacggggtcaattacacaaagaaaacgtgtatgggaaacgacaagctccctttgaaactacaaaaggttaccacattcgtaaaaaggtagtagatttaaaggacaatcaattggataaaattgtggacttagaaatcagaaaaattattataaatgcccgaaaagaagaagtaaccataaaaaaacacatagacgttttagaaaagcaaaaaaagaaagtgcatagcgatgaagaagaaactgctttaaacaaccaaatacaagatttgaaaaaacaaattgatttgctctacaccttaaaaaataaaaacggtgaacgagttcctattaaaaaagtgcgaattagagaagaaatgagcaatgcccaacaagtaaaggaaattaaccaatttgtaaaccctagaaataatcatcacgttttaatttataaaaaagaaaatggggatttagataaagatgtggttagtttttggacagcagttgagcggataaaacaaaataatgaaatagtacaattgcccagcgatggagttgaggttgtagaaacatttcaagaaaatgatatgtttcttctatttttagagaaagatagaaacatagaggatttaaaccaaaaggagatatttagccatttatttaaggttcaaaagattgctggagcagattattttatggaaatctgttttagaagacatacggatagcaaaatttcaaccgaagcggattatgtttatattaaaggatttagagagggcaaaacagggtggtatagttttaatccaataaaagttcaaataaccccaacaggcaaaatagaaaaaatataaaaccaactgtatgtatcatatacattgtgtatatttgtaaaaaaaataacaaatgcggaaaaatattgacatagacgaagctattttaaccaaattgaagatattatctgtttttgaaaacaacagtgtaaaaggcttgatggaagaagccgtgcgttggtttgtggctcaaaaagaaaaacaacgcttagataaacttaccagcgaagaaaaagaagatttaggcttactgttattgatgcaacaagccgacagaaccgatttggcaaaccgtgatgatattatggaaatcttaaacaaaaaatgaaagtcatctttttaaacagttttaaaaaagatttacttaaaattacgaatgtaaaagagagagaacaggtaaaaacaattattttagagatagagaaagctgaaaatttaaaggagttgaccaacctaaaaaaattaaaaggttattctactgcataccgaattagaataggtaattaccgattaggattttattacgacaatgaaacgattgaaatggctcgtttggtaaaacgaaacgatatttataaagtttttccttaaaaattcattttataattttttcttaattttgaaacaggaatagaacacataaaagttatgaccacactaaccctaaaaattaacgacaaaacaaatgcaggaaaaacttttttagcttttcttaaaacctttgttgctaaagaaaaagcagttgaaattattaaagcaccagttgtaaaagaaaaaagcccttacaatcctgagtttgttaaaatgataaacaaagccgaaaaaagcaaaaacagaacagaagtaaaagatgttaacgatttatgggcaagtttgtagttttcttaacccaaaaggcaaaagacgatattgccaaacataaaaaatcaggcaataaagccgctgaaacaaaaattaaaaagatactggaggaactaaaaaatcacccaaccacaggaacaggacagcctgaacaattaaaacacgaactcgcaggtaaatggagtaggagaattaaccaaaaagaccgtatggtttactccataaacaataccaccgtagtggttgatgttatttctgcaatagggcattatgctgataaataaaaaacttacaatatatgacaacactaacattaaaaattaacgacaataccattgcaggaaaaacttttttagcttttcttaaaacttttgttgctaaagaaaaagcagttgaaattgttagtgcaccagttgtaaaagaaaaaagcccttacaaccctgagtttgttaaaaaaattaaagatgcagaaaaacgtgcagattatttagaaattaatccaaatgatgtatggggaagtttaggcttaaaatagaaaaagcagcacaaattgatattaaaaaacattataaatttgggaataaaccaaccattaaaaagttggaacagattttaaaagagttatcagaccacccaacaacaggaactgggcaacccgaacaacttaaacacgagcttgcaggtaaatggagtagaagaattaaccaaaaagacagtatgatttatactataaataataataccgtaacggttcaagtgctttctgcaatgggtcattatttagataaataaaaaaacttggtgtgggatatgaaaaatagaatattccttaattttaactactaaagctctttgacatactcctttttactaaaaataggatagaaaaaatgaaatcaaacacaccttaacttgtatataatcattcatttacacaggtcggtgaacaacagcaataatttcatttttaatcgtaattgccatgttgtggtttgattaaagattaggaaacacgatattttttccttcttcccaaagtggataagtgatgttgtggtttgattaaagattaggaaacacgatattttttcatcaacaacataaaaacttgcgttgttgtggtttgattaaagattaggaaacacgatattattgttgtttttttaatgataattatttatgttgtggtttgattaaagattaggaaacacgatatttagttagtatttcacttcgttcatgcttcggttgtggtttgattaaagattaggaaacacgatattgcttccaatttcgctccttagccatttcatgttgtggtttgattaaagattaggaaacacgatattcattgcatcaaaatcggattttacgacaagttgtggtttgattaaagattaggaaacacgatatttgtcaattagtatttctgcaacatagtcatgttgtggtttgattaaagattaggaaacacgatattaaaagccaattaactaccatgtcgattaaggttgtggtttgattaaagattaggaaacacgatatttttcaatagctccgttgttaactcttatctgttgtggtttgattaaagattaggaaacacgatatttacgtccttcttttaccgacatagcacattgttgtggtttgattaaagattaggaaacacgatatttttattatttatcattttaattgcgttttgttgtggtttgattaaagattaggaaacacgatattttaacctctgtttggttgtatctttgcggtgttgtggtttgattaaagattaggaaacacgatattgcacgatgacaacgaacttacagaatttgtgttgtggtttgattaaagattaggaaacacgatatttgcagtaatttccatagctttaggtttttgttgtggtttgattaaagattaggaaacacgatattactctattaaataaggtatcttacttgatagttgtggtttgattaaagattaggaaacacgatattaatccacatcaccgttttctcctcttactggttgtggtttgattaaagattaggaaacacgatattaatgaaatatgaatgttcatgcacatcacagttgtggtttgattaaagattaggaaacacgatattggttgctgtaactgttctcgctccttgtcggttgtggtttgattaaagattaggaaacacgatattaaaatgctaaaaagcaaaatagacgaagcagttgtggtttgattaaagattaggaaacacgatatttttttctattgttttgtgtttttcttttaagttgtggtttgattaaagattaggaaacacgatatttatcaaaagaccattcaatatattcagaggttgtggtttgattaaagattaggaaacacgatattaccttccttatcatatcgcggtcatctcgggttgtggtttgattaaagattaggaaacacgatattactacgcctgatatatttgacatggttgttgttgtggtttgattaaagattaggaaacacgatattataacacaagaattacatctcgtaaagatagttgtggtttgattaaagattaggaaacacgatattttcttcagataattcatcgcaccaaagcctgttgtggtttgattaaagattaggaaacacgatattcttagattaatatgctatgatataactaatgttgtggtttgattaaagattaggaaacacgatattcaattaggttatgacaacaataatataacagttgtggtttgattaaagattaggaaacacgatattgctgaagcaattagcaaattccaatttaaagttgtggtttgattaaagattaggaaacacgatattcagccatgcattgcttgatggaagaatattgttgtggtttgattaaagattaggaaacacgatattagcagttgcgaaaattgttaaaaatcaaaaagttaaaaaagaatatcggatataaaaaatgcttcttttaaggataaaaatgccttaattgaagcattttttgttttctatagccttcgtcattcaggaggaacccagctaaaatgatagcacaaaatattaattagaactaaataataagcaagattccttctgaatgacaaaaaacagcctatcatttaggaggaacccagctaaaatgatagcacaaaatattaattagaactaaataataa

SEQ ID NO: 1019 - DNA, 16832 bp, synthetic construct
  source 1..16832: mol_type = other DNA
  misc_feature 1..16832: note = Synthetic
aagaggctgtctaaaaaggcagtctctttttttatgctttagatttagaaaaaagctttgattttcgtatcttaatgttatgaaaagcaacgttatatggaagaccaatagccagtcacaattgagtcttctcccacccagttataatgattttgttccagagcatcatcccgtgcgtatcgtcaacagcattcttgatcaaatagatatcagttccatagaaaggacctataaaggcggtggcacctcgagctatcatcccagggatctgctcaaaattttggtctatgcttatcttcgcaacttatattcatcccgtaagatcgaacaggccttgggtgagaacgtccattttatgtggctcggcggctgtatccagcctgaccataataccatcagtaattttcgatcgggaaaactcaagggaaagttcaaaaagatctttaaccaagttgtcattctgctggcagaacagggctacctgagcttaaaggacatctttgttgatggcaccaagatcgaggccaatgccaatcgctatacttttgtttggggaaagagcatcaagacctcgcgcacgcgcattgaaaaacagctcaaggatttatggcgctatgtagagaccgtatatgcagaggaagaacaaaagcccaaccagcctgataattttaaagccatagatcccaatgaagtatcccaaacgatcgataagatcaaccgggctctccagggaaaggatgttgataagaaagtaaaacaaaagctcaattatgccaagaagaactggccaaagaatattgccaaatacaatagctacgaagcgcagataggcgggcgcaactccatgagcaagacggatcccgacaccacctttatgaggatgaaagaagaccacatgctaaatggccagctcaaaccaggttataatctacaggcagccaccaacaaccagttcatagcaaactacacccttgcacagaccacggcagacactgccacacttatcgagcataccgaagattttataaaaggttatggaaaaccgcccgaaagactgacggccgatgcaggctatggcagtgatgaaaactacacctacctcgaagacaatgatattgaggcttttgtaaaatacaattacttccacaaggaacagttggatgaaaaacgtggcaagaacaaaaatccttttgcagcagataagctgttctataacgatgaagcagatacctattattgccctatggggcagccgatggataatatagggagctatgtgagaaaaacagctaccggatatgaacagaaaatagacagatatcaggctaaaaactgtataggctgccagcttagaagcctgtgccataaatcaaaaagcaatcgtattgtagagaggaaccacaagctggtcaggcttaaggcaagagcgaaacaaaaattattgagtccacaaggtattgcccacagaaaacaaagatgttgggatgtggaggcagtatttggtaacataaaacacaatatgaacttcagaaggttcatgttaaggggccttgataaggtagaaacagaaataggcctcattgccatggcgcataaccttaaaaaagtgagtttagcgatgtaagaatcgctttgcccaattttaacccagaactaattgcccaattatccgagcaaatccataatgaaaccaaaagaaccaaaaaaataaaaggtcgcctaaatagtttttagacgacctctttttgttttaggtgggttttgacttttcgattgagtcaacttagtgcgtaaatcgcatcataacacaatacggtttttatgggtttggaagctttcgggattccgcgagcgaaagaagtaggatccagcaaactatatcaaactgtaaagaattaatttatttcctttacttgttttcatgcactatccatactttatccatacactatccatggagtatctacgctatacctattttgtaagacccatcctagaggcatatccagagaaatatttatgaagcgattttatctataaaacaaaaaaagtcctaccgaagcaggactaaagattttcatctacggcatatagccttattgtgataagattaaagattagaagttttaatctgagacaaacataataaaatgttttcaaataagcaataaggtttccagtacattagattcaacttaatgtgtatcttgaagcaattaaaattgaaaatatcatggcaaaagtattaggtttggatttggggacgaactcgattgggtgggcagtggttgatgatgataaacaaaagatattcggtatggggagccggatttttccggaaggtgttgttgctaaaacaataggaaaaggagaaaaggaagaatcgaaaaacgcagcgcgaaggaacagtaggcaacaaagacgtcagtattacagaaagcgtttaaggaaaataaaactgttgagaacacttattgatttagatatgtgtccattaactcataaagaacttgatttatgggcaaaatgggataaatatagaggaaaggctgggcgaattgctccaagttcaaaagtttatattgaatggcatcgacaaaatccttatcacttaagagataaggccctaaacgaagacttaagcttacatgaaatggggcgtgttttgtaccatttaattcaaagacgaggttttttgagcaatagaaaaggaaaggatgatggtaaaatctacaaaggtaaagaaggaatggttggtatcgaccaaactaaaaatagtatcgataacggtacgttaggcagtttcttaaattcaatttatccgccagaaggagaaccattccaattaataactgacgaaaacggcaatgaacttcgtgtgagagcaagatacacgttgcgggatatgtacgttgaagaatttgataaaatatgggagcgacaggcaaagccattgggattgttggaaaaaacaggagaaaaaaagaagctgacttttctaaaaggaaatttggatgccaatagaaacaagaagaaaatagaaaaattatatcaaaagtatggggaaccaaacgttaccattacagaaatagaaaataaagatactagaaaaagtatttttaaggttgtggttaaatcgattgtgcccttaaaggaattttttggaggagaaatcgaatatgataaagaaggaacaattaaacacaaaagtcaagatagtgtcttgttctggcaaagacccttgcgatctcaaaaagggctattggcaaaatgccgatttgaaccaactgtaactaaaaatggtaaatatctgcaaagaggaaaatctccttgccatttgtcacatccagtttatgaagaattcagagcctaccagtttataaacaatattgaatacggtcgaaaacaaaaacttaatgaataccaaagattgcaagttttggctttgatgaatggcaaagacagtaattttaatttttcggaaattcctaaaaagctcaaaatggaatatgaaaaatggaactacgccgatgaccagaaagtgccaggaaattataccacaaaacatttgtcgagtttattttctaaggaagtatgggaaaaatacaaacatgagatttggcactgctttatggattttgaagacaatgacaatttaattgaaaaattgatttcagattttgatttaaatgaaaaactaatcgacaaagtagaaagaattaatcttaaagagggttattccaatgtgtcgttaaaagccataaagaatattctgccttttctaagagaaggatttcaaatgagtgatgccactattttcggaggtgtaatgaatgcttttggtgatcaaataaactatttcaaagattcaaaagaacaattaaaaaaagatgttctgaatattgtaagagacaaaaccaataaagagggagatgccattgagaaaatcaaatcctatttggttgaaaacgattttggatttacaccagatgataaacggtttataaaattgtatcaccatagtcaggatatagaaacgaaagagttgaaagacaaactggatgccattgaaaatttaagaaacccgattgttcaacaaggactcaatgaaaccagacggcttgtcaaccatttgattgatgaatatgggaaatttgatagaattcaagttgaattgggtcgtgatgtcaaaaacagtaaacaaggaaggcaaaatcagtcgaataggatcaaagaaaatacaacaaaaaatgatgctgccagaaaattacttaccgaatacgggttaaggcacactagagttaacctccaaaaagtcttgctctataaagaaatgcaagatcgtggcgttgtcactgtttgtccttacacaaacatttccatcaatataagtgacgtcttgggaagggaaaacaagatacagatagagcacatcatgcccaaaagcacctcattaaatgatagttttggaaataaaactttgtgtgattctaaattcaatggactaaaaggtaatcttacaccctatcaattttacttaaaaaacaatgatccgaaaatatggggtggcgcagaaacctgggaagacatcgagcaaaggatttataggttgttgccatatcctaaagcaaaacgatttacttcaaaaataaagatcgaagatgctgatgtacaaaatagctttatcgaaagacagttgaacgacacccggtatatcagcaaaaagaccaaagaaatcatgagtcaggtttgcgaagatgtgagagtgctgcccggagggcttacttcggaattaaggcacttatggggtttgaataatatcttacagccggttatgaacttggacatcaacctcaagaacatggaagaggatcgagtctatccacattatgttgtaatggacgaaaacaataatctcatttcgtcattaccaatttataatgaaaagccaacattggaagctaatcaaaccactatcacagggaaagtaaataaaggtgtattcaaaacgttaaacaactatgtcaatataactgttagtgtgccagaattgaccaatggaaattattggttaaaattgaacatttctgaacccaaaaaagtggtgcgtatctttaaggagcgaccggaaagtacagaaaacacgattgtattaagagggaatgtagaacgggaaaaatttaaaaataatagtatcggactagtttctgccaaagctattgacaatgggtcatattgggcgaaattgccagttatagataaaaaattcattgttccagaaaaagaaaagcaacccaaaaaaacaggaaagcagattctgttgtttggcgaagtaaaagataattatttcaaatcgtacatctatgaatgcgaaactaatacgacggatggaaaatattggctgctattggatcttgatacagagcatccagtttatgagagagccattaacgaaaaaccgagctttgcttcaaaccaaatttgtattgaaggaacggtaaatgaccaaggtgtttttgtttcagagatagatgcagagcatcaatttgctaccaacgaaaaggaaggaaagtattgggtggtgtatgacatcgtaaatgagccaaatgaattcaatgccattgagaaccaaaaacccccgatagaaaaaaatcaatcgttgatagagggaaacatttgggtggataaatacacaggggagataaaatttgaccccaagaaaaatagggatgatcataggcaccatgccatagatgccttggttattgccttgtcaaaacaaagttattttcaacaattaagcacatacaatgcacagcgggtggcaaaatacaaaggattgccttttgaaaaagaccaattaaatttccctgtaccatggttgaatttccatacgtcggcaaaaaaggaagctgaaaagatcttggtgtcacacaagcaaaatcgaaaagtgttgacacaagtaagaaaacgcattactaaaaatggcaaaacttttacaagtgtaggagacgccgtaaggggtcaattgcataaggaaaatatttatgggcaaagacaggcacctgcggaagttagtaaaggatatcacatgcggaagaaagtgagcgatttaaaagacaaccagctaaagaaaatcgttgacccagaaatacgaagaattattacgaaagcgagaatagaagaagttaaaatcaataaagaaatcgctttattggaaaaacaaaaaaagcaaaaaggagttagtgatgaagaggaattggttatcgtagatcaaatcaactcgttaaaaaatgacatccaacaactctatactttaaaaaataaaaacggagaacgcgttcctattaaaaaggtaaggttaagggaagaaatgtccaatgcacaaaaattaaaagaggcaaatcaatatgtgaatccgaggaataatcatcatataattatctatgaagataaaatgggagaacttaaagaaactatagtttctttttgggaggttgtagaaaggcaaaaacaaaatcaagaaatttatcaacttcctgaatttgataagcacggtaaaattataaataccttacaagaaaacgatatgtttgtgctgggcttggatgatgaagagtttaatgaaaataaattagactctaagtttttaatacaatatttatatcgcgttcaaaaaatatcagcgggagattattcgtttagacatcatttggcatccaccctgagaaacaaggaagaggaagttagagttacaagtttaaagagatggaatgaaataaatcctataaaagtaaatctgacagaaacaggttcaataattgaagcctaaaaaaacttacaagtttgttgacttgaaattaaaccttttaaattttaaatgatggcacttcaatgtattacattgaccaaacaaaataatgattggttagaaaagcaagtagatgcgcaagaatttctcagcaaaagtgaaggggtaaattatttaattaatcaagcacgagagaaacaagaatacgacgattttgttcaaataaaaattaacaaaggcttgaaaagtggctatacaaaaaagcagacaagagaagagatgttggctgaaattaagagtaatttgaaattttgatcgttgtaagatggtaagattttgcaaataaaagttctttgacataaatggctttatcttaaacagccaagccacaacgaaaaattgacgctttttaatttttgtcaacgatttttcgttgtggtttacaaacatattattctaatattatttgaatgtttgtgaatctccttcgtcgattttattgaagattagaagatacgatattaccgtcaagatggtttcgcaaggacacgccgttgtggtttgactaaagattagaagacacgatattttaaatatttaatcgtaataaaactcgtacgttgtggtttgattaaagattagaagacacgatattctgttttattgaacagcaatccaatgtccgttgtggtttgattaaagattagaagacacgatattttctgtcagccgtaggctttggatgatgtcgttgtggtttgattaaagattagaagacacgatattgatttaggaattgttacctgctttaaaccgttgtggtttgattaaagaatagaagacacgatattatatctaacaaagtcatttaggtactttgtgttgtggtttgattaaagattagaagacacgatatttattcccgcaactcttaaaccttctaatttgttgtggtttgattaaagattagaagacacgatatttccttctcgtttacacatgttaagacaggcgttgtggtttgattaaagattagaagacacgatatttagacgtttaaagaattatacaacgtttgggttgtggtttgattaaagattagaagacacgatattggagtttcggaagtgaaaagaaattaagttgttgtggtttgattaaagattagaagacacgatatttgtagttatactggcttcgagttggaaagtgttgtggtttgattaaagattagaagacacgatattacaatgctgttatctgtgatgtagtagccagttgtggtttgattaaagattagaagacacgatattaccttgccaaatggaccactcgtatcacggttgtggtttgattaaagattagaagacacgatatttgaagcaggaggttgagcagtatcttaagcgttgtggtttgattaaagattagaagacacgatattcctaatgaatataaaaatatcaaagttactgttgtggtttgattaaagattagaagacacgatattaagaatacacaggagatattacagcggttagttgtggtttgattaaagattagaagacacgatattgtttcgggttcaactcttaaagcaatcgttgttgtggtttgattaaagattagaagacacgatattgcattggcagagggcacatccttgaccgatgttgtggtttgattaaagattagaagacacgatattatggtctgtaagttttagccgcccggcattgttgtggtttgattaaagattagaagacacgatattggacgaaaataagataggtgtgtttaacgcgttgtggtttgattaaagattagaagacacgatattacaacaaaaactttgctgtcgtcatccaggttgtggtttgattaaagattagaagacacgatattgaggaagatgatttgattgctgggtatattgttgtggtttgattaaagattagaagacacgatatttgagtccgacgagcgccgtacatcgctgttgttgtggtttgattaaagattagaagacacgatattcaagttgggccattaattcagcttcttcttgttgtggtttgattaaagattagaagacacgatattaacgcaacggttaaagaattagccgagtctgttgtggtttgattaaagattagaagacacgatattcctcaatactaacgtcaaacgtcaaaatcagttgtggtttgattaaagattagaagacacgatattagttggtcttgtaccttctgatagtcatgtgcttaaagcaagatatcgtataagaaaatgcttcttttttgcagtgataaggcaagattgaggcatttttttgttttaaaataactccagttgtgtgggtaatggctcttttgggacttcggcgcgtccccaaaagttcataatattgccaaattgtttatcggtaattcggaggacgctcactttccctaaaggaggtaataggcgtttaatacgtttttcatgcacatcagcactttcgctactggcacaatgccgcatataaactgagtattgcatcatagtgaagccatcttttaataggttttttctaaagcctgcagcatttcgtcggtccttgggcgtttcagttggtaaatcaaaaaatacaaataaccacataattctataaccgtttagttccataattttggatatttaattttctttctttcaccagtgtaacattgttgaagtgaactggctgttttttgaaggccaaccattaaagggcttttttcgtttttgaaataaacggttcgcgtcagcacctgaagcaattcggattttatctctgtggtcaaatcttgctcatcataatgttgcatgatgaaatgaacagcttcatctacggccggccgaaaaggttccataatatcatcggccagagcaaatgcgttgtacttacttttatgatgtatgcccaatgtattcagtaatccacttccggataatgctcttgcggttgctgcacgtaaaatagcatatccgtaattgagaaaattattagggtaattgccaaatcgttctcttttaaaatcgatgttaaaaaacgatttccaataaaaattagcggctacggcctccatatttgtagaatctccgcttaagactttgctctccaaaaattcgaacgaattttttttatttgttattttctctaatagaatgccttgatttctgattttttccttgatggtctgttgccacaattgttttttaaaggtaaactagcggctatttgatatttgaaaatttcttgttgtatatgatgactgttgaggttgagaagcattccatttggaagatgtttgtcatcgcagataatacaagcacaattattattaattaatttattaagcgcgggaatacttatatatacttcattatgatcaataacgacataaccgatatcttctattggaatagttctgtttatactgtctgaagtgattacaagctgctcattagcggtagttatggcgcatttgtttgcaaagaacaatgttttttttagcataattggtcagtaagttaggttggaattttgccaagcataagcgggagggaactttaaatatataaaattcagttgttaaaatgctgaaagccagcaagattttttaaggcaactacttcatcctttggttataaatctaaaccacactattaaagcacaccttacaagccaagctgccaaattacaatgaccgtgttttttctactaaataatacatcttataagtgcattctatttttgccatgcgtgcaatgatagaacccattatgtaagtttattgcaccataataaaaaatgttaaaagggtatatctttcaatagtctaaaccaagatcaaatagctttactcccatcagtattttttaacacctccgagcctatttcaactagtaaaagacaattttgattcatacctcgtgcccttatccgtccgttccattcggatggaccccaaggttcttgcataatgtattcggagaaatttcaacatttagtccagcagaaagagtcaatttaatttttattgtttaaaattctaaaattcagtgtgttgcgattttgattgacatatttaatactaaaaaagatgattttttaaaaccgaccctttgaaaatctcgtaagtagagttcaaagcaaaatagtttaacaaaaaatcaaaaacatgaaaaccaaaattttaacttcactgttagtcaccttcttaatgttcacgagttgtagtaatgacgacgacgctgctatgatccaagaaacgggagagcgcaaaacctattctttaatggctgtttccgatccgtcaatttcaggaatggtcacgtttgtaaagaacaccgataattcaactactgtaaaagtagatttggatgggacctcatcaggaatgcatccggcccacattcacattaatacggctgccgagggtggtgctattgccattagtttagagccaataaatggggctacgggcatgagttctacaacctttagtacaaaggatgacggcacaccgattagttacgaacagctattggattttaatggctatgtcaatgtgcacaaaagtgccgacgatcttggaaccttgattgctcaaggcgatatcggtcaaaacgaattgaccactatgtccaaaacctatgccttaggctctaaatcagatccaagtattatgggcgatgccaaattcacaaaacgcgttaacggcaccacattgattgagatcatgttggagggtacgtctgccggtgatgagcatccaggacatattcacatgaatactgccgctgaaggtggagacattgccgtaacctttaccccgttagacggagcaactgggatgagtaaaacgcaggttgcaatgttggctgatgggacagcaatttcttatgatgaacttttagattataacggatacatcaatattcacaaaagtgccgacgatcttggaaccttgattgctcaaggcgatatcggccaaaacgaattgaccactatgtccaaaacctatgccttaggctctaaatcggatccaagtattatgggcgatgccaaattcacaaaacgcgttaacggcaccacattgattgagatcatgttggagggtacgactgccggtgatgagcatccaggacatattcacatgaatactgccgctgaaggtggagacattgccgtaacctttactccattagacggcgctacaggtatgagtacaacgcaggttgctatgttggccgatgggacagccattacctatgacgaactgttagaatttgatgggtatatcaatattcacaaaagtgccgacgatcttggtaccttgattgctcaaggtgatatcggtcaaaacgaattgaccggcgaagctaaagcatacactttggttacggttggcagttctggtgttgacggtgaggccacgttttatgagagaacaaatggtgaggctttattggttattgccgtgatgggaaccatgaacggaaacagtcatccgtctcatatccatatcggcgatattaataatcctggtgctattgcggtaagccttaatcctgtggatggagatagtggcatgtctatgacaaatattgctaaattggatgatgatagtgtatttggctatgaagacgtattaacttataacggctatattaacgtccataaaagcgctgcagaattggatgttttattaacccaaggaaatattggtgtcaactaaactttggtttgttgtgattgctgaaaggctgcctactaatgggcagtctttttgtttgatccgtaattcatattaagcgtcagatagccaagcacaaattggttaaaaaaaatcccacagatgatgatatctgatgggattttaggttgtgttgctactattgattttagcagctccagattaattaaataaggctttaattcttactgatttagttatcaaatcgttgtaaatgtaagatgtcaatttttgatttatcgttccgtgagcgcaccaagatggtaaaataatgttgttctacattatcataatctgctccagcgctgtagctaagcggtttcacatctatcatggtatgccaattgccgtcagcattggcctttacgggtctccagtcttcaattaccttactgtaataacgattggtatcggtatagttatcaaccgtcctttttcctgattgcactctaatttcaatccattggcgtttgtttgtacgaccttttacggttatttttccattcaacccttcgcctaccgagagattgctttttggtgatgtaatggctacgtaaactgcttccgttgttggcgtgatgacttgttctcccgtaatggggtcaatgcggccatgctttacacgttctttaattggggtcaccttggctttagaccgtggtatcaccttcatttcctccatagtcttggcttttttggttttttctaccttgactttttgttccaccttttgctttgaggttttctgtgcgtataattgagaggtcattaccatcaatactactgttgctgtcattaataatttaattttcataaactgttgttttaattaatattctatgttaatcgatgtgtttgctttaactgaaagcaagtcggttttctatgctcatgccagcttttggtcaaaatgcaaaatttttggcgcagtcagtttttttttaattattgactcttgacatctcacatgttgttaataaagtggtatcacaaatcaagcgttaatggacggcgttctaattaattgtcgtgcatatcttgagaaatccttaacaacgagaattctgctggtctcgatggtgatatcccgatgtctacaatcatctttccgttatttacatcgtgttctgtcatggtttcattcagacccacccttacaaaataagcctgttctggtttagcacccattaatgcgcccgctcgccagagctcgatgaggtaatttgtgatcattgctttcacattgctccacgttgcagggttgtttggcgcatttttaaattgtgccagagcattttttactgaggtttcaatggtcatgcccattcgcatcacaggaatatagcgccattcgtaatcattgctggccaatgtgcgggcaccccaaaccataacccctttgcctttaaaacttctaatggcattaatggattttcctgagctgtcaacattaagattggcctgagcattgttatcaatggctagtgttggtgctgtaaccttattcagggatatattggctggtgctttccaaacgcctctggaggcatcagccttggcgtaaacaccagcaacagctgcactgggcggtaatttgagatggattgtattgatcctctgttttatctgttggtattgtgttctataatttccattatcagcgtgatataaagaggtctcagctttgcttggatctcttgcaatgaggtcttcaggatgcttcaacaccatggttttattgttttgatttagctttacttgaatcttatcttcagaaatatggtaattaagggttgtttgcaaggatggaaagtaagccgctccatatttaagattttcggtccccatcgagaatcggaatttttctaccgaatctgaaatatcactatttgattctttgacatcgcagatcagaaaacgatcctttctttcggcacattgggcaagtgcggtcttatagacttcggctgggtctccaatgttttcagaactgctgatatccggaaacagaatcaaggttggtatgtcttcgttttccagcaatgctaaacccgacataaagtcttcattttgtatgagattatcataatggccaaccgaggtaatgaaacaatcgtcaccgccattggcaaaaaaaagttccaacatatagtacatcttgtattttggagtagtcaatagctctgggggaatgatgcttccgtcattggttatctgaaacacacctaaatcagctgggttagcgccaccaaatttagatatatactcctgcatagaacggatccgtgttgggctattggagcctttttcagtataccctataaaagcaggaatagacgtctccacttgtgtaattgaagggatggcacttgaaacttcttgaacataaacgcctggagtgcttctgtttttatgagcattgctccctttgttatccttactaaccttaggcatcttctttagccgtttgtgaggtaggctacgttctgtttttgtctttcgatttgtgatcttgtttttaacctgtgagaaagatccataggaaaaaatgaaaagaaggataatacaaaaaaggtgtgttttgttcataattcattgtcgtttttgatgattatactcgcatttctatagcttgcttcgaattccacttccaaatgtcgtcatcatctctgatagccctacgggataaggacactccgccaaatttcactttttcgtttaaggttctgtttttcgttttatcaagcacctattcgaatacttcaaaaacccttcagatctttactatctggagggttttgaatagaggagatgattaattgttttagtcaacgagttcaaaacgcatccaaacaaaagcttttctattgttatgagcgtttctcatgcggcctcgaataggtccctctaaaattgtccttcctgaataactcacctttctaagaggtaaggatgcattgtcaaaattatcaaatttcaaggattgactcacatcaccatcaaaatatgtatgggatgcatttaagtccttagtgccatttaaaatggcaagaacgtcgtagatggcaactctcatttttcgaggatctttgttgagtacattatcataatcttctcttactaaaatattggatagtgttgtactactgtattctttaatccaggtgtctattgtgaattcggcattcctgtcattggcttcgtcaggggtaatttcaaaaataacagagttgttgatatttggcgaccgtctatcagttacttttgattcttgtacttgaatttgcctatctctattgccgcaaatcagagctgttgaccccgcccaataactattttggtctcccggtttacattttctattgttacgaaactttttgatgtccctgctaatcggactttttatctttccattagccttatatttcacatgctgcgtgatgccataatcatctattttatcgtcatcttttgatactgcacattgaatttcaagcaaggttacttttaatttcacattaggaatgggtttccacatcgtcttggtggttggttcagaataaatggttctggttgctttgttacctacttccttaccattttcttttcgtactgctgtgatatcgtgagtcaccttaccatctgctttgtccacctttatagaatagagcttaaccctgccccattcgcctttgttgtctgtagatagattggtttttgttctttttgtaatcgcctcgccattttctttataggtagttgttatcatgagttcgatatcactattccttttggcggtgcccccaaatacaacgggaattttggtgaatgatgaaatttgcggtggagaaatgatgcgtgtttctgtatcctcaagatctaaattgagggtgttgccaacatctaatttcttatctacttttactggcgtcttcatttttgcaggctgtttaaccaggcgccgctcaaccttggatgatgggacttcttgaggcaccaaggtgagctttggattgagtgccctgaatttcttttcagtcatctccactcgagaaatcatttgaatgggctgattggttgaaacactgattttcttttcactatcggtccttgaattatctgtaactataatttcaaaacggagattttttgagccctctggagcccacaaattaacaggcgtactttgccatttcccattgttgctggctgttgctgtaaatgtacccaagcct

SEQ ID NO: 1020 - DNA, 6844 bp, synthetic construct
  misc_feature 1..6844: note = Synthetic
  source 1..6844: mol_type = other DNA
agtttgctttatcggttaatttatcttcttttttcttgctatcgtcacccgtttttaggttcgttattttttttaatgtttgtgaagaaaggttatagatataggcgttattctctgaagtaaaagcaatggtattttcatcagctaaaaaaaccggattgtacaggctatttataaattccaaaacttttgattcctttttactttttatctcataaataaaaagagcattgttttttacatatatttttttggtttttgaagcattataggagccgcgattaggaattctatttttttcttctctccattttactttttcaattgtattttttgattttagtgaaatgcgatacaatgaatcggaagggtcattgtctttgttgtaattaaaataaagaacatcactttgttcattccattctatattagaaggaaaagtgcccatccatttaggatcttgcattattttttcaacagaaagagaactctgctgtgcaaaaaaaggactagatactaatgaaaaaatgacaatgaaaagaagatttttaaacataattttggttttgaagtactgttacgaaactaagaaaaatttataaaaagtatggtctttgcacatttaaaaggaaaagattccttatttcttgtttttatcaatagcgtattgcaggaataccatttttaaaataaagatttcgcaaaaaaaagtcccaccgaagcaggactaaaggttttcacctacggcatatagccttattgtgataagattaaagattagaataaaattttcacttctcaaagatacaaaaaatatcggtttaaaaaaacaggaaaaacccttaaaataatgatgtactattttgtacattgaaacttttattatcagagaaagtatatattcaaaaaaaataattatggcaaaaattttaggattagatttaggaaccaatagtattgggtgggctgtggtggatgacaatgccaataaaatattaggtatgggaagcaggatttttcctgagggtgtaaaagctgaaaccattgggaagggcgacaaagaagagtcaaaaaatgcggcaagaagaaatagtaggcaacaaagaagacaattgtatagaaagcgtctccgaaaaataaaactccttagaaatttaattgaccttgaaatgtgtccgcttacgcatcaggaattagatgtttgggcaaaatgggacaagaaaaaaggaaaagcaggtaggaaagcacccgattcagctacttatgaagaatggcacaggctaaatccttatgttttaagagaaaagtcattacacaaagatttaacgaagtttgaaatgggtcgtgtgttatatcatttaattcaacgaagaggatttttaagcaatagaaaaggaaaagatgatggtgctatttataaaggaaaaccgggtatgatagggataagtagaactcaggagcaaataggaagcaaaaccttaggtagttttttaaattccatttacccaacagaaggagaacctttccaattaattaccgacgaaaacggaaatgaacttcgagtgcgagccagatataccttgcgagacatgtacgtagaagagtttgagcaaatttggaatagacaagcgaatttgttgggcttggacaacgcaaccgcaatgaaaacaaaagtacgatttttaaaaggtagtcttgatagaaaccgaaacaaaaagaagattgaaaagcttagagaaaaatatggagcagaaaatgtaaagatagagaaactgaaagatgaacgaaataaaaaaacactttttaaagtaaccactacaacacaagaacctctaaaaatatttttaggtggtgaaatttatcacgatgacgaaggcaatgttaaacataaaagccaagacagtgtacttttttggcaaagaccgcttcgttcacaaaaaggattgttggcaaaatgtagatttgaatccgatataaaaaaagatggtaaatatttacagcgaggtaaatcaccttgtcttttgtcgcatcctttatatgaggaatttcgcgcctatcaatacattaataatattgaatacggtaaaaggcataagttagaagaaacacaacgtcttcaagtgttggatttaattaattcaaaagacagtaatttcaatttttcggaaataccgaaaaaattaaaaatgcaatatgaaaagtggaattatggagacgaccaaaaagtggcaggaaataaaaccatcaaacaattaagtgctttatttccaaatgaagtctggaaaaataagaaagaagaaatttggcatagctttcacttttttgatgatgacgataatttgatagaaaaattaaaaaatgattttggtttagcacaaaaggacattgaaaaaatagagaaagttgatttaaaagagggatattccaatgtttccttaaaagctataaaaaatattttaccctatttacaaagaggtttgcaaatgagtgatgccactattttgggtggcgtgagaaatgcgtttggtaagcgttggcattattttaaagatgctcaagaacagttggaaaatgatattttaaaaattaatcatcaaaaaaataacaaagaaggagaagcattagaaaaaataaaaaattatttggcagaccctgataataaatttggcttttctaagaatgataaatcttttattaaattgtatcaccacagtcaagagatagaagaaaaacagcttaaagataaattagatgcggttgaaaatttaagaaatcccattgtacaacaaggcattaacgaaacccgaagattagtaaaccaactcattgatgaatatggaaaatttgatagaataaaagttgaattgggaagagaagtaaaaaacagcaaaaaaggtcgacaagaacaatcccgaagaatttatgacaatacggctaaaaacgatgatgcacgtagattacttaccgaatatggcttaaagcacaatagggataatattcaaaaggtgttgctctacaaggaaatgcaagaaaaaggagtgactactatttgtccttacaccaacaaatctatcaatattagcgatgttttgggcagagagaataaaattcaaattgaacatattatccctaaaagtgtttccttagatgacagttttgctaataaaactctctgcgatgcgaagttcaatggcttaaaaggaaatttaacaccctatcagttttatttaaaaaacagcgattcaaaattatggggtggagcgacaagttgggaggatattgagcaaagagcattcaaagttttgccctatccaaaagcaaaacgatttacttctaaaattaaagtggaagatgccgatgtaaagagcagttttattgaacgtcaattaaacgatatgcgatacatcagccgaaaaacaaaagaaattatgtcgcaagtgtgcgatgatgttcgggttttaccaggcggtttaacgtctgagttaaggcatttgtggggtttaaacagtattcttcaacctgcgatgaatttgaatattgatataaaaaatattcaagaagatagggtttacccgcattatgtggtactagatgaagataataaacccgttttaaccgttcctatttacaatgataaaccgaaattaggagttaacgaaacaactattacaggtaaagtagataaaggcgtttttaaaaccaccgaaaagaccgagaagtacgtaaaattatcggctgaaacacctgaattagcaaatggcgattattggttaaatttaaaattatccgaacccaaagaaatcgtccgaatttttaaagaacgtcccgaagccacagcagatggattggtgttgcgaggagaaatcaacaaagaaaaatttaaaaatgacggcattggtttgattacatccaaaggattagacaatgggaagtattgggcaaaattcactattataggcaaaaaatttatagcacccgaaaaagacaaacaacccaaaaaaataggaaaacaagtgttgttgtttggtgaagttaaagagggattattcaagtcctatatttacgcttgtgaaaccaacgaaatagatggtaaatattggttattattagatgttgataccgataatgtattttttgataaggcaatcaatgaacgggcacaagttactgaatcgaaaattatcatagaaggaagtgtaaacgaagagggtgtttttgtttcagaaatggatgccgaccaccaatttaaaaccaaagaaaaaccgggtaaatattgggttgtttttgacattcttaatgaattaacagaatttaatgctattgagcaacctaaaccacttttgcaagaaaaacaaatattgttagaaggtgttttttgggttaataaagatactggtgaaatagaattcgaccccaagaaaaaccgagatgaccaccgtcaccacgccattgatgccttggtaattgcactatccaagcaaagttattttcaacaattaagtgcgtataatgcggcacgagatgccaagaaaaaactaaatccttttgaaaaagagcaactaaaattccctcatccttggaatagttttcgtattgatgcccagaaagaagccgaaaaaatattggtttcgcacaaacaaaacagaaaagtacttaccgaagtgcgcaagaaaattaccaaaaacggaaaaacctttactagtgtaggtaatgcggtgcgtgggcagttgcacatggaaaatgtatatgggcaacgacaagcgccttttgaaacaacgaaagggtatcatattcgaaaaaaagtagccgatttaaaagataaccaattggataaaattgtggatctggaaattaaaaaaataattaaaaatgctcgaaaagaagaagccatcctcaaaaaacacattgatactttagagaaacaaaaaaagaaagtacgcaccgatgaagaagaagcccaactgaatcttcaaatgcaagaattaaaaaaacaaattgagttactctacactttaaaaaataagaatggggaaccggtgccaataaaaaaggtacgtattagggagaaaatgactaatgcacaacaactcaaagaaagcaatcaatttgtaaacccaagaaataatcatcacgttttgatttataaaaaagagaatggtgaattagacaaaaatgttgttagtttttggactaccgttgaacggatgaagcagaatagtaaagttgttcaattaccttccgatggtgttgaaattattgaaacgtttcaggaaaatgatatgtttttgcttttcctagaaaaagacacaaacattgaacaattaagtcaaaaggaactatttaatcatttgtataaagttcaaaaaatagccggggcagtttattttatggaaatttgttttagaagccatatagatagtaagatttcaactgaagccgattatgtttatattaagggatttggagatggaaaaacgggttggaacagatttaaccccataaaagtaaaaatcacccccaccggcaaaattaaaaaagtataaaatcaactatgtatatcatatatattatatatatttgtaacaaaaacacaacatgcgaaaaaatattgatatagacgaagctattttaaccaaacttaaactgcttgctgttttcgaaaacaacagcgtaaaaggtttaatggaagaagcagtacgttggtttgtggctcaaaaagaaacacaacgaatggataaacttaccagcgaagaaaaagaagatttagggttgttgttattgatgcaacaagccgatagaactgatttggcaagccgagaagaggtgatggaaattttaaacaaaaaatgaacgttgtatttttaaatagttttaaaaaagatgtgcttaaaattaccaatgtaaaactaaaagagcaggtaaaatcagttattttagcggttgaagtggctgaaagtataaaggagttgactaacctaaaaaaattaaaaggataccctactgcctatcgaattagaattggtgattaccgattaggtttgtatattgaaaatgaaaaagttgaaatggctcgtttggtaaaacgaaacgatatttataaggtttttccatagtaagtacaaaagaaatcttttacttggtaaaattaaagagcggcgcccaatttcgccaatgggcaacccaacgcctcaaaaaataattgatgataaaattaattgtgaatttaattgtaacaacatagagttgttatcattttcataaaaagttctttgacatagtggtgtcaaacccgtttaaacatccaaaccacaacgaaaaatcgacctttcgattttttgttacgacgatttttcgttgtggtttgattaaagattagaattcacgatattcagaggcacaggcggataaattgatgatacgttgtggtttgattaaagattagaattcacgatatttcaagaaaaatttaatgcaatttacaaagtgttgtggtttgattaaagattagaattcacgatattcgtattatttgaaatcactcaaataatgttgttgtggtttgattaaagattagaattcacgatatttttttcattgcaagccgtttcgtatgcgatgttgtggtttgattaaagattagaattcacgatattttgaattaaatgaattacctaaatttcatggttgtggtttgattaaagattagaattcacgatatttcttccaaaacattactaaagatatggtctgttgtggtttgattaaagattagaattcacgatattaaaattgtcccaagcatctgtgactaattggttgtggtttgattaaagattagaattca

SEQ ID NO: 1021 - DNA, 23483 bp, synthetic construct
  source 1..23483: mol_type = other DNA
  misc_feature 1..23483: note = Synthetic
gcaaaccgcatatcgcagcccagcacatcggaccgatgggtatattgtttgtgccagccgccgaacaccttgttgctggatgagttttcaatgcccattttattctcccgttcgcccgccttgccggaattttaccggcagggcggggttttcgtatgaagctggatgttagggtcaggacccactaatttgtttgaaatggtcaatcagatttgtgcggatacgcgaagcaaaaccgcaggaagatatttatctttcaaggttttgcgacaaagtagcccgtgcaaatccgattgatccgaaggacaggtgttatatttgcgaactccgtcgtcaaaccccttgtccgggatgccgacccgcacggcgggcttttccttggatttcgcaaatctaacacctgccattccaatcaaattaatgggtcctgaccctattagtaatgaatgaccgaacggatgctttcgccttcatgcatcaggtcgaaagcttcgttgatgtcttcaagcttcatggtgtgggtgatgaaatcggacagtttgaattcgcccttaaggtagcgttcgacataatcgggcagttgtgagcggcccttgaccccgccaaaggcggtgccgcgccagacgcgaccggtaacaagctggaacggacgggtcgagatttcctgtccggcaccggcaacaccgataatcaccgactccccccaacccttgtggcagcattcaagggcggaacgcatcacattgacattgccgatgcattcaaagctgtattcaacgccgccatcggtcatctcgacgatgacgtcctggatcggtttgtcgaatttttgcgggttgatggtgtcggtcgcgccaagctgtttggcgagttcgaatttcttttcgttgatatcaatggcgatgatgcggctggcacccgccattttgcagccgatgatggccgaaagaccaatcccgccgagcccgaaaatcgcaacgctatcgcccggtttgaccttggcggcgttggtggcggcccccatgccggtggtgacaccgcaacccagcaggcagacttcttcaagcggggcggttttgttgaccttggcaatcgagatttccggcagaaccgtatattccgagaaggtcgagcagcccatataatgatagatcggcttgccattctgcgagaaacgcgtggtgccatcgggcataaggcccttgccctgggtggcgcggattttctggcacaggttggttttgcccgatttgcagaatttgcattcgccgcattccggggtgtaaagcgggatcacatgatcgccgaccgcaacgctggtcacaccttcgccgattgattcaacaatcccgccgccttcatggccaaggatggcggggaaaatgccttcggggtcgtcgcccgacagggtaaaggcatcggtgtggcaaacgccggtggcaacgatgcgcacacgtacttcgccggccttgggcggggcgacctgaacgtcttcaatcgatagcggcttgcccgcttcccaggcaatggcggctttgcaggtgatggtttgggcgctcatgtcgctcctccggcttgaatgatttactgccaacagtgtatttatttcccctgatctgataatccggtatttcggtaaatgacttttacggtgatgtaataatgaatgcgtgggacgggatcagcgaattcgtcgccgtgacggaacgcaaaagctttacggcggcggccaagcagcttggcatttccgtggcccaggtcagccgccagatcaccgcgttggaagaaaagcttggcgttcagcttttttaccgcaccacgcgcaaggttagtgcgaccgaagccggattggtttactaccagcattgccgacagttgctggatggtttgcaggatgcggaacgcgcaatcggtaccctgacacaggtgccgcgtggcaagcttaaactgaccgcgcccaccacctatggggaaaccgtgattgcgccgctggtcaatgatttcgtcgcccgctatccggaacttgaagtccagtgccgctttaccaaccagaaacttgatctggtgctggaaggctatgacatggcgatccggcttgggcggctggatggtacgaccggcagtctgatgagccagcagctttcaacccgccgcctttatgcctgtgcatcgccagcctatctttccaaacgtggggagccgcattcgctttcggagcttgcgcgccataactgccttgtcgggacgctggattactggcgttttgaggaagacgggcgcgaacgcaccatccgcattcacggctcgatccatgccaatagcggccaggcgcttttggatgcggcgcttaaggggatcggcattgtccagttgccggattattacgtcgatccgtggatcgccagcggtgatctgatcccggttctgtccaaattccagccgaccgatgaaggcatctgggcgctttacccgaccaatcggcacctcagcccgaaaatccggatgctggtggagcatttggggcggtatttggggtgaaacgcaaaacgggccgccgtaataggcagcccgtttggggatgaagcaggtaatcaggttattactgtgcggtccagccaccatcgaccgacatatgtgtgccggtcatttgggatgcggcgtccgagcacaggaacagggcggtctggccgatctgttcgggggtgacgaactgtttggacgggtgtttgtccgagaccagattggttgcggcctgttcgacggaaatgccgccttccttggccttggcttcgatctggcgttcgaccagttcggtgcggacccagcccgggcagattgaattggcggtgatgccggtttcggcggtttcaagggctgtgaccttggtcaggcccatgatgccgtgcttggccgcgacataggcggccttttgcaccgatgcgaccagaccgtgcgcagatgcggtattgatgatccggccccagtttttctttttcatgttcggcagggcaaagcgcgtcgtgtgaaaggccgaggtcaggttgatcgcaatgatcgcatcccatttttccggcgggaaatcctcgatcagggcggtgtattgaatgccggcattgttgatcaggatatcggcaccaccgccgaactttgcggcggcgtccatcatcatcgcttcgatctggtcgggtttggagaggtccgcgccattgtaatgcgcggtcacgccaaattcggtttcaagcgatttgcgggtggcctcgatttcgtccttgtcgccaaagccgttcagcatgacatccgccccggcccctgcaagggccttggccatggcaaggccgatgccgctggtcgatccggtaacaagtgcgcatttgcctgtcagcatgatgtttctccctgtgggtgaggagttgttcctcttgttaagtgagggtcaggactcattgatttgattgtaatggcaggcgttatatttgcgaaatccaaggaaaagcccgccgtgcgggtcggcatcccgaacaagggatttgacgccggagttcgcaaatatagcacctgtccttcggatcaatcggatttgcacgggctactttgtcgcaaaaccttgaaagataaatatcttcctgcgattttgcttcgcgtatccgcacaaatctgattgaccatttcaatcaaattaatgagtcctgaccctatggatcatgccgcaatgcaacatgggaggcaagatcaaccggaaatgccatatttgcgaagcttgcgggcaatcgcagtgtgcgagattccaagccgttcggcaagcttccgcgagcttggataatccgggtaaaggcgcatcagcatttcacgttcgagcatgtccatcccctcggcaaggcttccttgggcgatggcggcattgatcgggtcggttgcgggggcggtggttgcgggatcgcgggatgttgcggtttcatccgtggccgtggcgggcgggttgcttgcggtggtggtcaggtcgcgtgcggtcaggatgtcgccatccagaagggcgaccgcccggaataaagtattttccagttcgcgcacattgcccggccagtcgtggctggcaagccaggacagggcgtcccttgcgatatggggtgttgcgcgttcggtttgctgggcggtgcgggtgacgaaataaagcgccagttcggcaatgtcttcgcgccggtcgcgcaagggcggcagggtgatgccaaggacgttaaggcggaaataaaggtcttcgcggaatgtgccgtcatgcgacatggtttcaaggtcacggttggtcgcactgataatgcggacatcaaccgcaatttcatccgtgccaccgacgcgccggaaccggccatcctgcaacacgcgcagaagctttgcctgtaaatacggtgtcagttcgccgatttcatccagaaacagcgtgccgccatcggccagttccagaagtcccggcttgccgccgcgacgcgcactggtaaaggccccggcggcataaccaaatagctcgctttcggccaggccttcgggcatggcggcacagttaagggccagaaacggctgatcggcgcggttgctcgcccggtggcaggcgcgggcgaaaagctctttccctgtgccggtttcaccgaggatcagaagcggggcatcgaccgatgccagtcgttttgcctgtgccttgacccgtgccagaaccttgctttggccgatgatgtcgtcaaatacggtgtggctgcgatcctgaagcgcggtcatgacccggccaaggcgtgcggcgcggtgaaacaccatgaccccgccccatggttcgtcatcggcggcatcggtgccgtcatcgacatggccgatgggttcgacctgcaacagataggtctgcccgcccaatgtgacttcgcgttccggcaggcggaaatggctttggcgcaggtcatcaatatccggatcggtcaggaaatcggccaagggccggtcacgcagcagcgcatcgggggagccggcaatgttctgggctgcggggttggcctgtgcgatcaggccgttggcatccaccgcgatcaccggatcaccaagggcggcaagggttgcgtgcaattgggcgcgcctgcgttcggttggcaggcggtcaatcggtttgacgtcctcgatgccgggtagctgcatcaaacgatgggccagcagcggaaaacgttccggccggatcgccgggatatcggcaaagatatggtgggttgtgacctcaaaggcgcggatatcgagtttgaaatccgccagcacattgacgacgtcccgcgtgatgccgaccctgttttccccggtgatttcaaaacgcatgattgtaccgaaatgtttacactgtaacgaaaactatacagtcgtaagaggctgttttccagtggttttgacgaaatgtcgcggttggtggaggtgtttgtaaacttaggtttacagtcgggtgcagtgcgattttactaagtatctgaaataacaggattttcaattctggcatgggccttgcggttatgggggcagaacatttcaaataacgggagcctttcatgtctgatccgcgtcacaccaaatccggttttgccacccgcgccatccatcatgggtatgatccgcaaagccataatggcgcgctgaacccgccggtttacatgagctccacctttgcctttgaaaccgccgaacagggcgggcggatgtttgccggtgaagaacagggctttatctattcacgtattgccaacccgacgctggcccttcttgaaagccgtctggcggtgcttgagggcggcgaagcggcccttgcgaccgcatcgggcatgggggcgattacgtcggtcttctggacattcattgcgccgggggacgagatcattgtcgatcgcacgctttatggctgcacattcgcctatttccgccacgggctggaaaaattcgggatcaagcatacccatgttgatctgaccgatcccaaggaacttgaaaaggcgatttcggacaaaaccaagatcgtttatttcgaaaccccggccaacccgaacatgcgtctggtcgatatcgaagccatttccgacatcgcccataaacatggggcgaaggtcgtggtcgataacacctattgcacgccgtatctgcagcgcccgattgaactgggggctgatattgtcgtgcattcggcgaccaagtatctgggcggtcatggcgatctgatggcgggtgcggtgattggtcgtgcggaagaccttgaacaggttcgccttgtcggcctgaaagacatgaccggtgcggtcctgtcgccgcaggatgccaatctggtgatgcgggggctcaagacgcttgaacttcgtatggaacgccattgcgacaatgcggaaaaaatcgcggccttccttgaaaaccacccgaaggtcgaaaaggttttctatcccggtcttgagagctttgcgcaatatgaactggcgaaaaagcagatggcccgctttggcggcatgatcgcgtttgaacttaaaggcgggatcgaagagggccgcaagctgatgaatggtcttaacatgatcacgcgtgcggtcagccttggcgatgccgaaaccctgatccagcacccggcatccatgacccattcgacctatacgcccgaagagcgcgccgaatatcagatcaccgacggcctgatccgtctgtccgccgggcttgaaagcatcgacgatattcttgccgatcttgaacaggcgcttgatggggatcagatggcgattgccgccgaataataatcccgcattttccgaacaagggaggcggaccgcaccccccgaacgatttgcggtccgtataaggttgcgcatggtgtggatgccgttccacgccatgcggcaaccgccttggcagcgttagagccttttccgtttagattgaagcgattttgttcgcgtttggcgaacggttttgcaaggcacagcgcgcaagggcgatgcggggcatcgttcaagcggtgtaacgtagcgaaacgttgccaaacccgaacccttcgggccgggacattcttctgccccgcagcgtcaaggatcttgaccgtagccccgctacgctctgcgatcctttccttgcaggacagaagaatgcctccggcaaaacggttcaatctaaacggaaaaggctctaaggcatcccgaatcgggattgaagacagccaaaaatcaattccgggcctgtgtgccacattcgacgaatttcagaaaacttgcgtgggctgaacgagggttttttgaaagtttcgtcaatcctgcgatttttgttgctttcgcttgattggggcttcgtagcagcaaaaatacgcaaatccataccgaaataaggcgtgcgggaataccggtgcaaccgggccgaaacgccagcgagaggcgagataaagatgtcagcacaaaacagcacacctgaaattggcgaaatgatcgaagcaacctcgaccgggcgcgtggcggccaaggatcttgagatgctgggccagattgaaaaaaaggtgcgctggctatcaagctggaccatccataacgccaaccatatccgcccgaagcgcgatggcatcaaggtcggcggccatcaggcaagctgtgcatcgatgaccacattgatgacggcgctttatttcaacgtcctgcgcccgcaggaccgggttgcggtcaagccgcatgcatcgccggttttccatgcgatcaattacctgtttggtcgccagaccagggaaaagcttgaaaacttccgcgcatttggcggcgcgcaatcctatccgtcacggaccaaggatggtgatgttgttgatttttcgaccggatcggtcgggcttggggcggcggtgaccaactttgcggcgcttacgcaggattacctgcgttacaaggatatgctgccgcgtggggaacagcccggtcggatggtcgcccttgtcggtgatgcggaacttgatgaaggcaatatctatgaggcgcttcttgatacctggaagcacgatattcgcaatgtctggtgggtgatcgattacaaccgtcaaagccttgacggcatgatcgatgcgcatctgttccgggtgatcggccggtttttccgcgcggtcggctggaacgtgatcaccatcaaatatggccgcaaactgcatgatgcctttgccaagccgggtggcaggtcattgaaaaaatggctgaacgaggcaccgaatgatgtctattccgccctgaccttccaggggggcgcggcatggcgcaaacagatccttggcgatatgccgggcgacaatgcgctggcaagcctgcttggcgattatgatgatgatgccctgcatgacctgatgaccaatctgggcgggcattgcatggaagcggtcctgaatgcgtttgattccgttcccaatgacaagccgacaatctttatcgcctatacggtcaagggttatgccaccccgcttcaggggcataaggacaaccatgcgggccttatgaatgtcgcccagatggatgcgttcaaaaaacagaacaatgtccaggacgggcaggaatgggattatgccgccggtcttgacgtggccgaggataaggtgcgtgcctatatcgacgcagcaccctttaatgatggcaaatcgcgcaagaagctggcaaccgtcatcgatattcccgaaatgccctatgcgcgggttgatacatcgagcacgcaggaagtttttggcaaaatcctgaacgagcttgcgaaactgaaggatagcgatctggcggaccggatcgtcaccacatcgcccgatgtgacggtatcgaccaaccttggcgggtttgtgaaccagcgcgggctgtttgcacgcgaaaatcttgccgatgaattccgcgaacgcaaggtgccctcggcccagaaatggatcagatcgcccgaaggtcagcatgtcgaactgggtatcgccgaaaacaacctgtttttgaacctggccgcccttggcctgtcgcacagcctgtttggccaacgcctgttcccgattgggacgctttatgatccgttcatcgcacgcggcctcgatgcgttgaattatgcctgttatcaggatgcgcggtttatggtcgtcgccacaccaagcggtattacgctggcgcccgaagggggcgcgcatcagtcgatttcaaccccgatgatcggcatggggcagccgggcctgaccagtttcgagccaagctttggcgatgaacttgcgaccatcatgggctggtcatttgatcatttgcaaaatcccgatggcggatcggtttatctgcgcctgtcgaccaagccgctggcacagccggaacgtgatctttccgatgcgacaaaatccgaaatcgtatcgggggggtactggctgcgtgaaccgggcgagaattgcaaaatggcgattgcctattgcggcgcgatggcccccgaagccatcgccgcatgggaaaagcttgaagccgatcattcgggaattggccttctggccgtgacatcgaccgaccggctttataacgaatggcaggatctggaacgggcgcgccttgaaggtaaatcggacgggcgcatggcccatatcgaaaaccttctgaagccgctggcatccgatgcgcgccttgtcacggtgattgatggtcatccggcggcgatggcgtggttgggttcggtccgtggtcatgcggtcgccccgcttggcgtcaatgcgtttggccagtgcggcgacagcattgatctgtataaatattatcagatcgataccgatgcgatcatccgcgcgaccaaacgctgggattgatctgtctgatgattgcttgctgacgaaaaaaagggaggccggagcctcccttatctttcagcatgatagctttgttgcagctaccatccaaaatcgaacctcctgaactttatgcgggaatgttcttccttgcaataactttttgcgtgaagacataattgcctaatgtaatgtcaaaatcagggggatggaatgcgtggctgtgttcttggggttgatgtcggggttgcgtcccttggtgcggcactgatcgaggtcgagattatcaatggccggatgatctatcgcggtatcattgatggtgtcagtcatattttcccgtctgcacagggaggtgcagagcgacgccagcaggttgccatgcgcaagagttatcagcgccagaccttgcggctgaatgcattgcgcaaacggttggcccagttttttgaagttagcagtgattttgatgatcagccgacggatttgggacaggcatatgtaacggcatgcaagtcatctgacatgcctgtagtgttgtcccccaatagtcgtttccggttgcgggccactgggttgacggaaaagctgtcagcaggggatctggcgcgaaccattttgcatttggcgaagaaccgcggcatgcgtctgactcgtgcatttgacaacgggcgcgatgaaaaggcgggcaagcaggcgcaaaccgaagccgtcggtatggcaagggaagcgcaggaaaccgccgggtcgatgaaagcgcatggggttgtgacgcccggcgcatttttatggaaaattgaacaatccgcatccgaagggcacaagcgaccggcattgcgccatcgcaagggccgggttggggggtatctgtttaccagacagcaggtcgaagcggaatttgacgcaattctaaaggcccagtcggggtttcacccggaacttctgacaccggaaaagattacggaaatcagggaacaagtcttttgggagaaggatgcaccagaccccaaggttggaccgtgtctgtatttcattgatgacttgcgcatcccgattgccagtgatctttttcagaacaagcgcatttatgaagaagtcaattcaatcctgatcaagcacagtaacgaggcgcggcgacgattgacgattgcgcagcgggagctactggttgcagagttgctggctggtgaaaatctgaaagtatctaaaatcaaaaagctgcttggtttggaccgtggtctggaactatcgcttgaggccgggtatggcaagcgcacagaggccagggaaatcaagggacaccggatcatagtcgaattccgcaaggtgcaggggcttctggatatgttccgaagcctgtccccggtacgccagcgagaactggttgagctgctgcgcaccgaacgcgaccgtgaagtcgccattgtgcaactggtttcagggttcgggctgtccgatgtcatggcgcatgccgtgatggatgaagtggtgttacccaccggttatgctgcaacaggtgcgcgagcaacagaaatgctgtttgagacgctgcgcgatgaagtgatgccggatggcgaatatgccggtcgggttatgttgccatgggatgcggaacagtttcttggtcttgagcgggttggggcgcaaatcgtatcgcagtcgcgtttgccttattatggcaaggttttcccacatcttgtccgcgatcgcatgacgccgggtgacaaggggtttgatgccgcgaccaatgaacagaagtttggccgcattccaaatccggtggtgcatgttgccatgacccgaatgcgcaaggttgtgaacgggttgctaaagaaatatgccgcgacatatggccagccgatccgcgttcatgtcgagttttcccgggaaatgagcatgagcgacgatgagcgggccaaatacgaacggcgtatccaacaggagcataagcaaaatcaggaagatgatgcggaaatcatcaggaatggtggtgtgccatcgcgcaaggctcgtcggatgttgcgccttgcgcgggagcaaaactggtgctgcccttattccctcaggcagatagcgccaaccgatctgttcaaggatttcgaccttgatcacatcttgccgcgtgccgaaacgcttgatgacagtctgggaaatcttgttgtcgtttgccgtgattccaatcgggtcaaaggcaaaaaatctcccttcgaagcattcggggacgggcgggattatgaacgtgatgatggcaagaaaatcagtcacgagcagatgatcaactatgtacgcagttgcaagggtatggcgcacaaggcatggcgatttggtcccgatgcgatggaccggttcagggatgaaaaatcatttggcgaaaggtatctgaacgatacccgctatatcgcaaaatgtgcggcgcaatatttgcaatgtatctgtcggcccggtgcgatgggggcggtaaagccggttgtggcgcttaatggccggatcgtcagtgatctgcgctatggctggggcctcaggaagctggtcgaggaaatcgccgagtttcaggagcctgatatttatgcggctgatgctgatggtaaaaccggcaagaaggatcgccgtgatcatcggcatcatctgctcgatgcgattgtgacggccctgaccccctatgatcttgttcggcaattaaaggatctggcgcgagaaaagctaaaggccgggaatgatcggatcggtaatcttgtaccgcgccacccgtgggagggtttccagtccgatattcgtgatttcattgcgcagatcaatgcgtcacatcgggccaaccggaaccttaatgcccagatgcatgaggcaaccgggcttggagttatcgcccgtcttggggatggcagctatctgacccggacacgcaagcggcttgatccggcggactttacagatcctcaaaaactggaagacgtgattagtgtccctgaccgtatcgtcatggaaatgacaaaggcggttggtgatcccaaggcacaggttttctggtcctccagtgatccggttggcgatctgcaagacattgccgaggatctggaacaggttcggaatgatattctttcgctttacgaaacccagcccgaaagcgaaacgcaggaacgtaccgatgacgagccgctgatccgaaaactgaaacccgaagaacgacttggccgggcaattcgccaatatgtgaaacagacagggcggcgaacagtgaaggttttcggaacggctcaggcggtggtgattgatcataatgacagggaagttccaacccggacctatcgccccggtaataatgcctggcttgatctttatcgtgccgaggatggcaaaacgtcctttgaagtggtgcggaccattgatgcgatgcgccccggatttgtcccagcttggtccctggatgggggtaatcatcttttgttgcgactgtatcagggagatacggttgagattacggataaaaccggccagcgccgcagatgtgtgtttcgcgaaaattcaccgggtgactggtctttccaaccggttaaccttgcagtgaatgtacgcgatacgtcgttgcgatctcgattgagatttagaagcttcaaggggttgcttgctgccgatccacggcttgtcgtaaccgatattgttggcaacccggtctggcgcagtcccgcacgaaactggtgagaacaaggtctgacagcaaaaggatattggtatgtggcgactggtcgatatttctggcgagaatcgccatttgcgtttgtcacgaaacgcgatggaggtgatggaaggcgagcaaaagcttggtcgtctacccttgtctgatatcaatgcggtgatcattcatgcctatcgcgcaacattttccaccgatcttgctgcggctctggctgcggaaagtattcctgttatcctgtgcgacggcaaacatatgccagcttcaatcatctggccggtgacggggcattttgagcaggctgaccgtatcgcctgtcaggcggcggtacgcaagccggtgatcgggcggctttggcggcaaatcatccgggccaaaatccgggaacaggccaatacattgcggatgcatgatgcagacggggcagcagccctgatgcgccttgtacgtgaagtcaaaccgggtgatccggataatctggaggcccgtgccgcgcggttttactggtcccgtttactgggaggcgattttgtccgcaacccggatggcggggggctgaacggggttctgaattacggatatatcgtggtccgctctgccatggcgcgtgctgtggctgcggccggtctttccccggcgcttggcatctttcatacatccaagcgcaatccgttcaggcttgtagatgacctgatggaaccctttcgtccgcttgtggaccgggttgtctttgcccatcgcgaggaatggcgtgattgcatgacgtcggaggcaaagcaaaagctggcggcaattgtcaccggggcggttccgaccagtgacggtatttcaccggtttatcgggtcatggggcaggtcgccttgtccctgagtgaagtgtatcaggggcatcgcaagaatattgacttgcccgatgatatccggatcgagcgtcaattggagctggatggtctgtaaagctggtggatgaggtggatggcactatcggggtatcgggtaatgtgggcttttgtgatgtttgacttgccggtggtcacgaaaccggaaaagcgtcgggcgcggaagttccacgattatcttcttgatgaaggcttcgacatgaaacagttttccgtctattaccgcttctttgacagccgggcaaaggccgatgctgccagccgccggatatcgggccagattcccgagcgcggcatggtttcaatcctgcttgtgacggacaaacaatttggtcagatggtcaattttatggggaaagtgccgaccgaaaccgagcaaaaaccggatcaactggcactattttaaagcatgatatggttgtctttgaacggaaaaaatcccgcaacatattgaaattgttccgggattttcaattggtattgtagcaggttcgattttggatggtagctacaacgtcgaggtggtcaacaccgcaaagggcattattgtagcaggttcgattttggatggtagctacaacaggaattccgcaaatgggtactcgatgtgcattgtagcaggttcgattttggatggtagctacaacggaccaatgggccgatatcgcggatcatttattgtagcaggttcgattttggatggtagctacaacccgatcatctggcccgaaccaacccatggcattgtagcaggttcgattttggatggtagctacaacagaacgagcgcctggacacattcaccgcaattgtagcaggttcgattttggatggtagctacaaccgaagtgaccgactggacatcttcgggtaaattgtagcaggttcgattttggatggtagctacaactgaacccgggttgtcggacgttgaagccggattgtagcaggttcgattttggatggtagctacaacatgtttttttgccgtttctattgcagaagtattgtagcaggttcgattttggatggtagctacaacgtttggtgtcttggcgtctgaccggagaaatattgtagcaggttcgattttggatggtagctacaactgctcgtgccagcgccgccgtatcgttctgattgtagcaggttcgattttggatggtagctacaacagtggacagaggggagatatgcatgaccaaattgtagcaggttcgattttggatggtagctacaacaaccatgccagcccgacgcggcggcccttaattgtagcaggttcgattttggatggtagctacaaccctgtgtctgaccggaaccggcaacagcgattgtagcaggttcgattttggatggtagctacaacgaggctgcgcaagccaaatgggcggaaattattgtagcaggttcgattttggatggtagctacaacacgcggattgtccggaccgaagccaagcggaattgtagcaggttcgattttggatggtagctacaacataagccccgtcaggctcgtaacggatttcattgtagcaggttcgattttggatggtagctacaacatcacgttgaggcgaagctgtttcgggttgaattgtagcaggttcgattttggatggtagctacaaccaggccgcaaggatcagccagtcagaaaagattgtagcaggttcgattttggatggtagctacaaccaagccccggtcaaagaagatccgcgggctattgtagcaggttcgattttggatggtagctacaaccatcgcgcagtgtgatgtaaccatcccaatattgtagcaggttcgattttggatggtagctacaacgcagaacatccttggtgaatgtctcgggatattgtagcaggttcgattttggatggtagctacaacctgatccggccatgtaaccggcgataccacattgtagcaggttcgattttggatggtagctacaacggcagtcgcgttgctggcaaaggcggtgggattgtagcaggttcgattttggatggtagctacaacatgatggcaagtcttgatcttcgcgatcagattgtagcaggttcgattttggatggtagctacaacgtaaagacacccaccatggcgatcgtatgtattgtagcaggttcgattttggatggtagctacgacaacgaactagggtgatatccatctggaaatctgcgttaacggccgggaaattcccggccgttttgctttacgggcggaaatgtaatcggggtcacttgcgctggccctggggcgcacacacatctgcgcgctgtatgctgtgacaatattgatcattggcgcattttgggggctttggttatggaatatctgatgttgctggcgggccttgccggtctgtttttagggggcgaggcgctggtgcgtggcagtgtcggcattgcgcagcgtctggcgatgccgccgcttctgatcggtttgaccgtggttggctttggtacatcgaccccggaattgctggtttcggttgatgcggccctgcgcggggtttccgatattgcgcttggcaatgttgtgggatcgaacatcgccaatattctgctgatcgtgggggtatcggcccttgtctggccgatccgggtttctggcgatacgctgaaacgtgatacggcggtgatgatggcggcggcgattatccttgtgccgatctttgccttcgggatgatggggcgcgttgccgggggtatcctgtttgcatcgcttgttggctatcttgtgtttgcctatcgccagtcgcgcaatgcgcccaatgcgccacttgccgatgagggtgatctgccggttctgccagttccggcgcgtggcttgtggctgtcgctgatctgggtgattggcgggctggtggcgctgatgtttggcgcgcgcttcatggtcgatggggcggtgacgattgcccggacctttggcgtgtcagaggcctttatcgggcttacggttgtggcggtggggacgtccctgcctgaactggcgacctcgttaatcgcggcgttgcgcaagcaatcggaaattgccatcggcaatatcgtcggatcgaacattttcaacattctgggtattcttggcctgacggccatcattgccccgatcccggttgccagccgtttcctgaccttcgatctgccgatcatgatcgcggtttcgctggttctgactttgctgctgcgccgtcaaactatcgggcgggggatcgggattgtgatgcttgtcgcctatggcggatatgtttttgccgcacaataaagccagccagtgcgggcgcgatccggccttttgcagggcattgcgatcaggggccttgccgggaaaagttcgaaaggagggccgcgtgccctcctttttgttgggggatttatcggttgccgatattgacggggatgcgaattacaaatactagaaaaaatcgcatttataaaaaattgaacaacactgaaatgttcaataacgggccggaaatgaaccaatcctatgaaacttcgcaattttcgcgcgctttatccggcgataccggccagcacgcataaggaagccatccgtgccgggttcggggcactgatcgggctggggattgccggttttgttctgtcgttccttgatctgcagggggtggggctttatctgattgcgccgttcggggcgtcatcggtattgctgtttgccgtgccaaacagcccgcttgcgcagccgtggtcggcgattgtcggcaactctgttgccgcccttgccggggttgcggtttgctatgtgatccccgatccggttttgcgggtggcggtggctgtcgggcttgccattacagtcatgattctggcgcgcgcggtccatccgccgggtggggcggttgcgatggttgttgccatgaacccggatattgcgaccgagcttggctttcggtttgccctgacaccggttgccgcaatcacagccattcttgttctgacagcggtgctctatgcccgggcaaccgggcggaaatatccgttacgccatttcgatgacaagagcccctttcagacaacggaccgttccccgattgagcggcttggtctggacgagggggagctcaacaccattttgcagcaatatcgccagtcgctgaaccttggcgtcgaagaccttgcgcgcctgatcggggcggctgaatttcaggtcgccgcccatcgcgccgggccgattacggcaggccagatcatgtcacgcgatctggtgacggtgaatgcccaaaccccgcttaacgaggtcgccgacctgtttcgtcgtcatggatttacctcattgccggtcattcaggatgacggccgttttatcggggtgattttccagatccatctgatccggcgtgcaaccgaagacgcccttcgtctggatcgcgggttgctggcgtcgatggcgcgcctgattgatcgccgtcgcaatgtcccgatccgggccatcgaaatcatgtcggtgacagagccgcgggcaacggccaacaccccgattgcggccttgctgccattgatggcggatggggcgtgcgatgccgtcccggtccttgaagatcaccggatcatcggcatcgtcacccgaaccgaccttatcgccgcattggctcatgcggggttgaaggggtaggtaacgtcgaaggtgccgatcagaaaaacgcctgtttgatgccgtcgatgatgaactggatggcaagggcggcgaggatcatgccgagcaggcgggagatcacggtcgcgaccgtcgggctcaggcgtttggcgaccagattggccagaaggaacatggtcagcgcgcagagcatgacaaggccgacaaccgcgacgacgctgacctgcatcaccacgctgttttcatatttgcccatcagcagcatcacggtcgcgatggaaccgggaccggcaaggaacgggatcgacatcgggaagatcgaaatgtcgtcgggctcgtcttcgacctgtgccggtttggcatcggtgatctgctgatcaagttcgtgttcgtcttcaagttcctgatgaacctgttcggcgcgctggttgcgtttctggctgcggcgttcaaacagcatttcaagcgcgatcaggaacagaagcgttccgccggcaatccggaaggccggcatatgtatgccaaaaatgccaagcacgctttcgcccaccacggcaaaggcggcaaggatcaggaagcttgcgatgcaggcccggatcgccatgcgacggcgatgtctggtatctgtgccctgtgtgaggacgatgaagaccggcaccagcccgatcgggtcgatgatcacaaataacgtgacaaaggccgggatcagttcgctcagcatgtctaggcttggcatctggtttcctttgtccgttcgtagggtcctgaccctaaggctgatcgtttgtcatagtgccaattgcagccaggtttgtcgccgcaaaactggggccgtatatcggcccggccacgcaaggtaaacctttatgtcggcggcaaaatgcaatcggctgttgtcgattttcgtgattttaacggttgtggcggcgattacgcccgtatcgtccggcattttcgggccagtcgacataatcaacgggctttttgcgtatccatcggatgaatgtctgcatatcgggatgggggatgattttttcgggtgtattgagatcgcgtgccagcgtcgtttcgtcaaacaatcgatggatcatgcgatgacagacacggtgcagccattcggtatccgtgccgccctttgatttcggtgtccagtgatgccggtcgacactgtcgccagcaatcatcatccgcccgcaaatcgggcagggaccaagttcctgatctggcgtgggtgataccggcatgaaacaaggacgttgttgttatcagaattatcagaccgggctagtttgtgccgggcggacgccggttttcaaagaatttctgccaagtgcccggtttaaggtcgcgcaatgcccggatgcgggcaccgaccgagggatgggtatcgagcagggatggcggttgcgtgctgcgataggcgatcagacgcaggcggcggcgattgatctgatcgatatgcaaaagcgcatcgatcatgtcttcgggtccgttcagaaggtcgcttgcgccgtgatcggcgatgaattcacggtcgcggattactgcgcgctgcaacaggaagctgatcgtgggcaccgccccgaaaatgatgatcatccatgccggcgggttcagatcgccaaagatgaaaaccatcaatccgaacagggccaccgtccaggtcgcgcgatacagcacatcggtcatcagaaggatgcgggtatcgccatgccatgcgtgggcgatctcgtgcgccagaagggcgcgcatctggcgcggggaaaggtcatgcagggcgtcgctggagattgcgatggtggtatcctcggccgtgccggtggtgatcgcattgacccccttgcccggcagaaggaaaagtttgggcaggtaatcaagcccggcacggcgcgccagcatggccgccatttcatgaatggcggggaatgatccgctatcgagtggccgggcacgcagaagcttcatcaggatttcgggtgaaaccatgggggcaagcatcagcatcagcgcaaccgcaatcgcagccgaaatcgccatcgacaatccgcccagcatccatgcgcaggccgcaagaacacccgccatgcaggccatcaaagggaaggtgtgcgaagcgccccccggactgatggcaagaaagcgttgcaggaagccggggagatctgactggttgttttcgtcgttttccatgcggtttaccgattctctttccctgtatgaaaagttgttcctttgcgccggaacagcaagggcagagaatttcccggcaggtggtgtcaaggttatgtcaaaagccgtggtatggatttgagatcgcgcaattcaaaccggaaaatggatgatttccagtatgttgcccatgaattgcggccatctgttcgatggcagggcgttgctggcggggccggattcgcagccaatgatcgcatcgggggatgtgcgaaaggcggcattattgcccgcaaatcgttgaacttccttaatttgttaacacatccttatatgttgccctagaatagtgcttatgcaatcggataggtggctcgtaacaggtttgtcgcgggtcgtttggcgcgtgcaccatatttgatatgatacaagacttgctgcgaacggggtttcgggaaggaacgcaatgaccctgctggacaaaatccagtcggtccgcaaggcgggcgcgacacgggaaggggatcgcaccccgctggaacgggtgttctggcggtcgattgcccttgtcggcggattcagcatggtcatcaacatgctgaacatggtcatcccgatctattcgatgcaggtatttgaccgtgtcctttccagccgcagtgtcgatacgctgctgttgctaacgcttgggatcgttcttgtcctggtctttattgcggcgatggaacagttgcgttcccgccttctgatccgggttggcaccgcacttgatctgcggcttggtggcgatctgtttgcccatgtcgtgcagcaggcagcacgcggtaacaatatgcgccagcgaccgttgcgcgatctttatggtctgcgcgggtttctgaccggatcggggccctttaccctgatcgatttcatgtgggcgccggtttatatcggtgtggttttcgtctttgatacccgtcttgggcttgtggcctgtgccggggcgacgatcctgatcctgattgcgattgccaacgaggcggcggcaaagatttcggtcgaccggtccgaagaaagccagaaccgcggcattgcgcaggaagaaacctatatccgcaatgccgaggcgatggaagccatgggcatgaccccgtccgcgcgccagcgctggcaggcagaccagtccgatgccctgtattgggaaggtcaggccagccgccgggtcggcacatcgaccacgctttcgcatttcattcgtctggccatgcaggtctgctttatcggggttggtgcctatctggtgctgactgagagcatcacgatcgggatcatggtggcatccatgatcatggggatgcgcgggttggcgccatttgatggggcggtttcggcatggcggagctggaattcggcacgcaattcgttcgaacggcttaacaagatccttctggataagcgccagacgaatacggccccgctgccgcgcgggcggggtatgtcggtgacggtggatcggctggtctttgcaccaccgggcagccgaaacgtcctgttcaagggattttccttcaagaccgggccggggcaggtgatttccatcgccgggttcaacggggttggtaaaaccgcccttttgaagctgatcatgggcatctgggtgcccggatcgggatcggtcaagcttgatgaaatcgaagcatcgcgcattgatcgcggcgaacttggaccgcaggtcggctatctgtcacagaacccgttcctgtttccggggacgattgccgaaaatatcgcgcgtcttggcaatgcggaaatgcgcgacatcattcaggcggccgaactggccggggcgcacaaattcatccttgatcttcccgatggttatgaaacccgggttgaacggggcgggcgcaacctttcgggcgggcagcgacagcttattgcccttgccgccgccctgttcgggcggccgcgcctgttgctgctcgacgagccgacaaccgcccttgatgataatggtgttggtcatatcagcgcgctgattgacatcgtgcgccgggccgggatcacaacctttatcgtcagtcacgaacgcgaaattcttttgcgggccgatgcgatccttgcccttgccaacgggcagattcaggtcgtgccggtgcgggccaaggccgatcagatgatcgcgccaccacctgcacccgtggcatcgcctgctgtcgaaccggcgcgtgatggacaaatgcggatcacccccaaacggattgccgtgcccaatccggatgcgccacgcccgatcattgaaaagaattcgtcgcaaaat

SEQ ID NO: 1022 - DNA, 9320 bp, synthetic construct
  source 1..9320: mol_type = other DNA
  misc_feature 1..9320: note = Synthetic
cgcttcgagggccgcacgtcgcggaccgcatcgcccagggccgccttcatgcgggcgatcagccggtcgagctcggccccggcgagggcggcttccccgtcctccccggcggcctcctcctccaccggggggatcgccgacagatccacctcgccccgggtcagcgagcggaactcggcgtcccggaaggcgcgcacctcgggcagccagaactcgtccaccggatcgtccagcagcaatacctcgaccccgcgcgcccgcgcctcctcgagctggggatggttccgcagcgcctcggcattctcgccgctgatgtagtagatcgcggtctggcccggacgccggcgcgcgagatagccttcgagatcggtccagcccgtctcggcggtggtcttgaagcgggcgagggccaggatgcgctcgcggttctcggcgtcctcgatcagcccctccttgagcaccggcccgaaatcccgccaccagtcgagccaggagcgccgtttcccgttctcgtcgccggcgtcgtcgtccgcctgctccccggccggcttctcggccttcgcctcctcggccagcgcgtccaggatgcggcgcaccagcgccttgcgcatgcgggcgacgacggcgttgttctgcagggtttcgcggctgacgttgagctgcaggtcctcgctgtcgacgacgccggtgacgaagcgcagatagcggggcagcaggctgtcgagggcgtcggtgatgaacacccgcctgacgtagagcttcaccccgtggcggcggcgcgggtcgaggaggtcgaacgggcgcagggcggggacgaacagcagtgcggtgtaggagagcaccccttcggcggtgaaatggatgcgcagatagggatcgtcgaaggcgtgcgccacgtggtggtagaattcccggtactgctcctcggtaatctcgttgcgtgggcggacccagagcgcgctcgcgctgttgatctgccgcggctcctgccgcttggtcttggtgtcgccgggcttcgggcgcacctcgagcaggatcgggaaggtgatgtgatcggagtagcggcggacgatcgtctcgatgcgctcggggtcgaggaactccttcgcgtcctccttgaggtgcagggtcaccgcggtgccacgcggcggccgctcctcggcctcggtgacggaaaagccggtgcggccgtcggaggcccagatccagccccgctcctcgcccgcctttctcgacagcacgaccacccggtcggcgaccatgaaggcggcgtagaagccgacgccgaactggccgatgagatccaggccctccttgccgcccttctcgagcgcctcgaggaagcgggcggtgccggagcgggcgatggtgccgaggttggcgacgagatcctcgcggttcatgccgatgccgttgtcgcgcaccgtcagcagtcccttgccgcgatccaccaggatgtggatgcgcagctcgggctcctcgcccaagagctcgggttcctcgagggattcgtagcgcagccggtcgcaggcgtcggaggcgttggagaccagctcgcgcaggaagatctcgcgttcccggtagagggagttgacgacgatgtcgagcacgcggccgacgtcggcctcgaagggccggagggtgtcctgcatcggcgaagctccgctgcgtttccggaagaccgtctgccgcggatttgggaacgccccgggaccgcttcaagcgggtcggggattgccggtcccgagacacggaagccgcgccgaagcgcggcttcccatcttgtgcgcgacggcccgaaggccgtgcacttgttaacgtctggaccccaaagcagaaccagttctatggtttcgccattcttccgtcaacctccggcatttcaggggcgcgagcatgtcctcttcgtaccggctcggcatcgacatcggcaccaattccatcggctgggcgctgttcgccctcgacggaaaaggacatcccgaacgactcgtcgatgcgggcgtccgcatctattcgagctcgcgcgagcccaagacggaggacccgctgggaaaggcccggagggaagcacgccaggcccgccgccagcgtgatcgccgcctccagcgcaagggaagggtgatggccgagctggtccggctcggactaatgccggcgaatgccgccgagcgcaaggagctggagcgcctggatccttacgagctgcgggctcgggcgctcgacgaagcgctccacccccaccggctcggacgggcacttttccatctcgcccagcgtcgcggcttcaagtccaaccgcatcgccgaggacgagcgcgagaagggaaaaatacggcacagcatcgatacgctccgagaggaaatggaacgcgtgggcgcccgtacgctcggcgagtactggtaccacaggcggcgccgcggggaccgggtacgtggtgccttctggaccgaacgggcgatgctggaagaggaattccgagcgatcgtcgaggcccagaagcggcttcagccgggcctggccggtactctcgacagggcgttgcaaggcgaaagctgcctgttcggacggatcttccaccagcgtcccctggggccccagaaaacgggaaagtgcaccgtcgacggcgagagcgaccgggctccttgggcgcatcccttggcccagcagttccggatcctgcaggaactcgccaatcttcgggtgcgggtgccgccggatccgggattccgtcccctctcccgcgaggaattcacctttctccaccgcgagctttcgaaacggaaggagctcggtttcgatcgcatgcggaggctcctcgggctgcctgccgacgctcgcttcaatctcgagagcgaggggcgcaaaaagctcgacggggaccgcaccgctgccatcctggggaacaggaagatcctcggaaaacgctggcacacgctttcctccgacgagcagcagcggatcgtcgaacggcttctcgccgaaaccgaagaaggggagatcgtgcgtttcggccggtccctcggtctcgacgaggccgccgcaaaggccctcgcggccgcccgtcttccccagggccattgccatctcggcctcgcggtcctgaaggtgatcatcccgatcatgcgcgatcgggggctgggctacgcggaggcagtgaaggaagccggctaccaccactcggatctcgcggagaaaacggggcgaggccgccttccctattacggcgaggtgctgcgccgctggtgtctgcccgggcagggaaaaacgctacccgacgaggaaagcgaatatggccgtatcgccaatccgaccgtccatgtgggcctcaaccagctccgcaaattggtcaatgcgataatcgagacctacgggcgtcccgacgagatccatgtcgaacttgcccgggagctcaagctgggtcgcgagaacaggcggaaagtcgaacgcgagcaggcaggaaaccgagagcgcaaccgcgaagccgacgaagccatgcgacgtgcggggctcgaccccgagaccatgggggcgggctcccttgccgagaaccggcgccgctatcggctgtggctggaactggacgaagccgggccgcagcggcgctgctgcccctactcgggacgggcgatcggcattcgggcgctgttctccagtgaggtcgagatcgagcacattctgcctttcgcgcgcacgctcgacgacagcatggccaacaagacggtggcctatcgcgaggccaaccgggacaagagggagcgcacgcccttcgaagccttcggaaccagcccggtgatcgacggtcgccgttacgactgggaggcgatcgcccagagggcgagccggatgccgcagaacaagagttggcgcttcgcatcggatgccatggaccgtttcgagaaaacgggcaattttgtcgatcgccagctcacggacacgacttacttcgcccgcctcacccgcatctacctgcagtctctctatcggcgtgaggagggcgatcgcgtggtcgccatcccgggccggctgaccgcattgctgcggcgcaagtgggggctcgaccggctcctcgccgaaggcaactggaagaatcgggaggaccatcgccaccacgccattgatgccgcggtggtggcctgcaccgaccggcgcacgctgcaggccttcgcccgcgaggacgagcggggccggcaacggatcgtgattcctccgccctacgagcagtttcgcgaggagctgggtcgccggctcgccgggatgatcgtgagccacaagccggaacacggtattgccggcaggctccatgaagagaccgcctacggcgcgactcgtctggtcaacgaaaagggcacgccctgctatgtggtgcgttggccgacggagaagttcaccaacgaacggcatctcgaccagattcgcgaccggcatctacggcggctcgtcaaggagcacgtgggtcgcgagattgccattgggcgtagtttcaaggaggcgctggcctcgttccgcgcgccgaacgggaaggctgtccgtcgcctgcgcgttctcgtgccgttcgaggaaggcagtctggtcccgatccgcaacggccggcccgagcccttcaaatattacccgaccggagcgaacgcgtatttggacgtgctggaactccccgacggccggtggttcggttgggcggtttcgcggttcgaggccaatcgtctggctcgaaacccggggccgccgccgtggaaatcgaagcacccggcggcacgacgggtgatgcgtctctacaagggcgatctcgtcgcggtggaacgcgatgggagtcgggaaatcatgaaagtgttccagatgaaccagaacggtcgcgtgttgttcgccccgcactacgaaggggggccgctgcagaagcgtcatgatgacacgaatgaccctttccgctggctgatggcgtcggcgtcaacctttccgaaacttcggctgcgtaaggtgagcgtcgacattctcggcaggctgaaggatccggggttcgcggatgctcggaaggatcgtggagatcggcagcgacaaccgtcacctgtccgtggacagggggcacctgctgatccgcggtccggatgagcagaaacaacgcgtcgccctcgacgatatcgcggttctgatctgcaacgctcacggtctcacctgttccgccaacctcgtcctccgactcgccgagcggggggcggtcgtggtgttctgcggcgccaatcatctgccgacggcttggaccctaccgatcgtcgggcatcacgagcagagcggtcgcatgcgggcccagctcgcggcctcacctgcgttgcggaagcgtctgtggcaacggctcgtgcgcgccaaggtcgagaaccaggccgcggtgctgggagccgtcgggatctccggcgaggccctcgcgtccatggcgcgacgcgtgaagccaggagatcccgacaacctcgaagggctcgcggcacagcggtactggccgctgttgttcggcgagggctttcgccggaatcccgacggagggggcgccaacgcgcttctcaactggggctatgcggtgctgcgcagcgccgtggcacgggcggtggtcggggccggtctacatcccaccccgggcatccatcaccgcagcgccgtcaaccccatgtgtcttgtggacgacgtgatggagccgttccgcccgttcgtcgacctcgcggttcgccgtctcgtcgaggaggggaacgacgaagtcgggcgtgagagcaaggcgcgtctggtcgcggttctctatgccgatctcgaagtggaaggcgagaccagcccgatgttcgtctgtctggaaaggctgacggtatcgttggccaggagtttccgggaaggacgcgttcggctggtactgccgcatccgccgacggccctcgaactcgctccggtcggtcgagaaacatgctgagcgggtatcggctcatgtggcttctcgtgatgttcgatctgccggtgggtacgaagaaggaacgcaaggcggccacggattttcgcaagtttcttctggatcaggggttcgagatggctcagttctcggtttatctgcgcttctgtgggtcgaaggagcaggcggaaacctacgtccgccggatccgcaaggcggttcccgccaggggccaggtgagcgtgctccgtttcaccgacaagcagtacgaaagcatgtggtgtttcgtcggcggtaccgggcagcgcccgaaaagccccgggcagtacgctctcttctgagcctcgggagccggtgcgggtgagaaaaaaggccctgaatcagggccttttcgagggggtgagtgtagcggctgctgctttggggtccagccgcaacggcgatcgacagcgcacggaaacgccccttagtgtagcggctgctgctttggggtccagccgcaaccatctcggcgagaagcttcgccatctccgagtgtagcggctgctgctttggggtccagccgcaacgtatataggcgacatattcgcgccggcgttagtgtagcggctgctgctttggggtccagccgcaacagccccgaggtaagggttttcgtgcctctcagtgtagcggctgctgctttggggtccagccgcaaccgcgtcgctctcctccatgtcgcggcgccgagtgtagcggctgctgctttggggtccagccgcaactagtcgtctggaagatgaagccgcgtggccagtgtagcggctgctgctttggggtccagccgtcggcatcggcggagccagcgcgagggatggccccccttgccaagggggtggtcgcgcacgatggttggagcatgatgttccgggcttcggaccgcccccgcatcctcgccctcctgggccccaccaacacgggcaagacccacttcgccgtcgagcgcatgctggcccacgagagcggggtgatgggctttcccctgcgccttttggcgcgcgagatcttcgaccgcatccgggccgtcaaggggtcccgccaggtggcgctcgtgaccggcgaggagcgggtggggcccgccgacgccccctacgtggtggcgacggtggaggcgatgccgctgtggcgtcgcttcgccttcctcgccgtcgacgagatccagctctgcgccgactgggagcgcggccacgtcttcaccgaccggctgctccacgcccgcggcagccaggagaccatgttcctgggctcggacaccatccgccccctgctgcgccggctggtgccggaggcggtgatcgagacccgcccccgcctctcgaccctgacgtacacgggcgccgcccgcctcgaccggctgccgcgcaagagcgccatcgtcgccttcaccgcccgcgacgtctatctgttggccgaggtggtgcgccggcgcaagggcggggcggcggtggtgctcggcgccctgagcccgcgtacccgcaacgcccaggtggccatgtaccaggccggcgaggtggactatctggtggccaccgacgccatcggcatgggcctcaacatggatctcgcccatgtcgccttcgccgccctcggcaagttcgacggccgcaacccgcggcgcctgacgccggccgagatggcccagatcgcgggccgcgccggccgccacatggccgacggcaccttcggcgtcaccaacggcatccacgagcccgagccgcgggtgatcgaggcggtggagagccacagcttcacgccgctccgggcgctccgctggcgcaacgccgaactcgacttcggaagcctgcgggccctcgcccgcagcctcgaccggccgccgccgcagcccggcctccagcgggtgcgcgacgccctcgaccatcgctcgctggtgctgctcgccgcccgccccgagatccgcgcccgtgccgaccggccggagcgggtgcggctcctgtgggaggtctgccagatccccgacttccgcaagctcctgaccgacgcccatctcgagctgctggccaccgtgttcgcccatctcacgggccccgccggtctcctgcccaccgactgggtggcgcgcatgatcgcccgtctcgagcgtaccgacggcgacatcgacgccctcgtcacccgcatcgcccacatccgcacctggacctacctctcccaccgcagcgactggctgcgcgatccgcggcactggcaggagcgggcgcgggcggtggaggacaggctctcggacgcgctgcacgagcgcctgacccagcgcttcgtcgaccgccgcaccaccgcgctcctgcgccagctccgcgagcggggcgaggtggaggcgcggatcggcgaggacggttcggtgctggtggacggccatgccgccggccgcatcacggggctgcgctaccggcccgccgccgccgacgccgatctcgagcggcgggtggtggcacgggccgcccggcgcgcggtgcaggccgagctcaccgatcgcctgcggcgcatcgcgagcgagccgcagcccgatttccacatcgaggagcggacgatcctctggcacggcgaggcggtggcgcggctgcgggccgggtccgacatcctggaacccgcggtcgagatgctccacggtcccgaactcgccggccgcgcgctggcggccgcccgcgagcgcatcgccggctgggtggcggaacggatcgaggaggcgctggcgccggtgctggccttgcgccgggaggccgcctccgaccgtctcggcggccccggccgcggcctcgcctggcagctcgcggaggggctcggctgtctctgcgccgaggcggcggccgatctgctgcgcgccctcgatgccggggaccgccgccggctgagccggctcggcgtgcgcttcggccggctccggctctacgtggcaccggcgctccggccgcgcagcctcggctggcgggcgcgcctcttggggctgtggcacgaacggacgatcgcgccgccgcccccgggccgcaccgtgctcaggggtaccggcgacctgccgccggccatcctgacggcgctcggcttcgtgcccttcgacggcctcgcgcttcgggtcgacgtggccgagcggctggccgccgccctgcgccggcgggggcgcgaggaggcgcgctttccgccacccctcgacctcgccgccgccgccgggctggggcgggccgagctggagccggtcctgaaggcgctcggtttccgccgctgcacggaggcgggggagatccgctaccgggcgaagccgcgccgccggagcccgcggcgccgggcggccaccgcccccgcccactcccccttcaccgtgctcgaaaggctcaaggcggcaccttgagcg

SEQ ID NO: 1023 - DNA, 12570 bp, synthetic construct
  misc_feature 1..12570: note = Synthetic
  source 1..12570: mol_type = other DNA
ggccgccgcggggcgtcgggaacggcatgaagcgtgcgcccgaggacgggcgcggtcccagggcatgaagcgtgcgccctgggagcgcggccgaccccggccgccgcggggcgtgcctcacctcttcgccgtggtgccgaacgcctgtcttgcagcgtcatggaaggcggctgcggcgggcctgacggatggaaccgtggcatcgatgaccaaccagtcctcctgcttcgcggcggcctcgacacgggcgagcaggcaggccaaccgccgggcacccatgttgcttgcgcttcccttgaggccgtgagcaaggctggcaagggccctgccgtcgcgggaggcggctgcgacctcgatgcccggggagcgggagtcgaagtccgactcgaacaaggcaaggagatcgtggatcgcgccggggtcgtctgggatggccatggcagcaaggacagatgcgtccatggccggggcatcatcatgggacccggcggttgccggggaaggttccagcaaggatcccgggccatggggcagggggtcggctcgtggcgagggggcccccatggccgcatggcggaaagcgagcgcgcggcgtagggcggcctcaagcgcccccagttccatgggcttggtgaggaagtcgtccatgcccgccgcaaggcagcgttcgcggtcgcccaccatggcgttggcggtgagcgcgatgatgaagtgtgggacgcgacggccaaacgccgcgtccgcctcgtcaaggcgcacgcgatgggtggtctcgtagccgtccagctcgggcatctggcaatccatgaggatcacgtcgaaggcctcgcgcgggagcatggcaaggacttgcttgccgtcggctgcgacggcggcggagaggccgagcttgcggagcatggagagggcgacgcgttggttcacgatgttgtcctcggcgaggaggatggaaagccccgccaaaccttcctgccggggttgcggggcggggccgggggcgggggatcgcgagagggcggcatcctcgccggaggcgatggcgcggagggtttcgaggagccgtgagcgcttgacgggcttcgcaaggtgagcggcgacgccaacggtgcgaaggaggccgacgtcgagtcgttggccaaggggcgccgcaaggacgaggcgcgcacgttccagcccgggagaaaggtggacttcatgggcaagggtgagcgcgtccatgtcgggcagttgcaggtcgaggatggcaaggtcgaagggggttcccgcgttggcggcgtctcgcatgcgcgcaaggccctcggcggcggtcgcggcgaattccggggcgaactcggtgtcggccagctcatgggcgaccacctcgcgggagcgtgggtgatcctcgacgacgaggatgcgtaggggcacctgggcgggcgggccgggcgggccgggcgatgcggggacgccgtcgccaagcgggagcgtgaaccagaaggtggagcccttgccgggctcgctgacgacgcccatctcgccgcccatgccccggacaaggccgcggctgatggaaaggccgaggccggtgccgccgaagcgtcgggtggtggagccgtcggcttggacgaacggctcgaagatccgggccatggcctccggggtgatgccgacgccggtgtccgagacctcgcaacgtgcatgcaggggtccttccatcggctcagcgacctcgacccggagccaaacctcgccgcgctgggtgaacttgatggcgttgttgaggaggttggagaggacctgccggatgcgcccggggtcgccgcggacgattggcgggaggcggtggtcgatccagacggtaaactcgaggtgcttgccgaacgcacgttcggccatgagctcggaggtgtcctcgatgaggtcccgcaggtcgaagggccgggactcgaactgcaccttgccgctctcgatcttcgagaagtcgaggatgtcgttcaggatcgtgagaaggctgtcggcgcaggaccgcagggtgtcgaggtggtcccgttgctcggccgtgaggggggtgtcgagcaggagccgggtcatgccgacgatcccgttcatgggggtgcggatctcgtgggaggtgttggcaaggaactgggccttggcacgcgagctctcgacggcgacgtcgcgtgccatctcgagctcgtgctcggcgcgcttgcgcgcggtgatgtcctcgaccgtcccctcgtagtagaggaggcggccctcggggtcccgcacggcccgggcgttctcggcgatccagatgaccgagcgatccttgcggtacacctggctctcgaagccctcgatgcggtcgtgctcctgcaacagccgctggaactcctcgcgccgacggcgatccacgtacaattgctccccaatgttcgtccgcgcggccatcagttcctcgacggacgcgaagccatagatgcgcgccaaggcgcggttggccgacaggtagtgaccgtcgggcgtcgtctggaagatgccatccaccgcgttctccacgatgtcgcggtacttggcctcggcccgctcgagccgctcctgcgcccgcttgagctcggtgatgtcgcgggagacgccgaatgttccgacgacgttgccccgggcgtcgcgcatggggagcttgctggtgagcacccatgtgacgcggccatccggccaaagctctcgttcggtcttgccgtccatgcccatcccggaaaccatgatctggcgctcgtccgcgagcgcgcggtcggcgtgttccggggcgaagaggtcgtggtcggtcttgcccaggagctgctgggggtcttcgcggccgaccttgcgcgcgaaggcgcggctggcgcggacgatctcgctgcgggtgttcttgaagtaaatggagtcgggcgcgtgctcgaggagcgccttgaggaggtcgcgctcgcgggcgaggtcctcctcggcgcgcttctcggaggtcacgtcccagaagatcccttggatgccgacgcatgcgccgccgcggtccagcagcggcgtcttgacgacatgcacgaactggcgctcgccgtcggccgtgagatgctcctcggtggcctcaaaggtcaggcccgtgtcgaggacgcgccggtcgtcggcttggtacttcaacgcaaggtcgcgccggaacagctcgaagtcggtctgcccaaggatctcgtcgcggggcttgtccaccagacggcagaagcgctggttgacgaatgtgaaccggccgttgaggtccttgcggaagatgtgctgcggcaggctctcgacgagcgcctcgaagaagaactcgctttgccggagcatctgctcggcctcccgatgccgggcgcgggtgtcggccaaggaggtggcgtgctgccggagctcaaggtgcaagacgacctcatgcgcgacggtctggagcgcggcgcgttgccggacggtggggcggcgcgggatgcggtcgaagaccagcaacacgccggcgcgccccccggacgggaggtccacgggggtggagagagcccaccggaaggacgcgccctggagctcgggggtctcgcgcgcctccagcgtcccgccctcgtcgagcgcgcgccgggcgagatcctcgaccatggtggactcctcgtgccgaagcccgctctggccttcgacgcgcagccgggggccgtcgagcaggacgatggccgtggcggccacctgggccacctgggacgccatgttggcaagatcgtccagcggtccgcccatgcctgccgaatgcccgtccgcgctcatgcccgcactgtcccgccccacgttccggggtgtcacgccggatttcagcggcgcgatccgggggcggtcgggtggcaccgtgacggggccattggggtccgtcctcggttctagacacgcccacgcgcgggccccttcacaagggtggacgggtcacgaggtgagggctggatccatggcggtgcagttgccgccggatcagcggttgacgctggcctgccgcagccggatcgacgcggcatgggaggccgagatgggtcgccggatcgcccgatacgatgacggcggagtgaagtcgatcccggccggtgaaacacgagagcggccaaagggatgatggcgtcatgggatccgtggctcgtgtccgacgggccggtgttctcgtgaactgcccatggcgcgcgggaggtgaaggtgcgcgatcgcccgccgccgcgcaggcggggcttcgggcaggatgtgtcgcggtgctttccatgccgccggacctcgcgcccgggcatgccgtggtggaagaccttggagacctcgccgagaggctttggggcttcccgctggtgtagatggcagaggtcgcccggcgagttgcggctgccgcagactcttgtgcgagggccctcgcccttgcgcaggattccgcatgcgccgggtgcgccgaaccttcaccctcattccatatcgttcgattgtccggactccgatgcgccctgcggcgtctgcccggcatggcctgctcccggagctgcgcattcctgacgggatgccggcccgcattcccgcgtgggtcgccggtggtgtgtcgctccgctcctcgacgaccggcaacacgccgggaagcccccgggtcggccgggcttgccgtgtggtagaaacgcagtaattcgtactgcatgaagaccacgcgatacacgatcgacctggacaaaaacttcgacgagaccctgtcggccttggcccagcgcaagagcacaacgaaggcggagatcatcaggcgagccttggccacctacagctacattgctgggcaggctcccgcagcttcagacaggaaggtgtcgatcaccgacagtcaggatagggttctgaaggacatcgtgatcccctagtccagcccatggccgctaccaaggagactgtcggggctgagactgtcctccgggaggtcgggaccacgtcggttcagccaactttcgttcagcgcgcaggcttgtggctggcagcgggggttggggcgctcattgcccttgtcacgctcggcgtcctcgtctttctctgggttcactcccccccgatgccgcaagcggcgtcactcaaggatgcggtcgtcgccaaggagactttggcgaactacaaggagttgagcgggattgccatcaagggcgcacaagatgttttcacgacgatcgttgtgtccgcgttactgccagtcttgactgcaatcctgggctatattttcggcaggggcggtaaggatgacggaggtcagtgaattgttccaacgcgaggtcactgcggcgagcagcctccccgcctcgcggcgcgaacgtcgcgggcttcggccatgccccttggtcttcgagagtcatgggtgttaccactcaaggcgaccttcgccgagcgggagcgatgcaatgggggcggtcgtgcttgctgggtgtggttcgcaatgattgcccttcgttggattcggcttcgtcggggtcgagttctgtcggcggcgaggggcatgggggcgaaaacggttcgatcggcacccaacatccatgccatgggcaggcctacttggcgcgcatgccgtggccttcgagggcgtgttccatgctttcgaccaacgcatgcagcgaggcggcgatgatgttggtgctgacgcccacggtgccccactcgcgcttgccgtcggtggaggtgatgaggacgcgggtgcgggcggcggtcccggcgacgccgtcgaggatgcggaccttgtagtccgtgaggcgaacggtggcgatgcgcgggaaggagcgggaaagcgcggcgcgaagagcgccgtcgagggcgttcacggggccgtcgccatcggcgacggtatggtggacggcgtcgccgacgcggaccttgacggtggcctcgcagacggaatcggaggggttgccgcgcatggagacatggtaggcctcgacggtgaagcggggcttgagccttggctggagcatgcggcggacgaggagggcgagggaggcctcggcggcctcgaactcatggccctcgtgctcgaggtccttcacgcgctggaggatcgccttcacctcgggcttggactcgtcgaggtcgagcccgagggatcgggccttcatgaggatgttggcgcggccggagaggtcgctgacgaggatgtttcgggcgttgccgacgagggccgggtccacgtgctcgtagctggcggagagcttctggacggcgttgacgtgggtgccgcccttgtgcgcgaaggcggcggagcccacccatggctggcgcgggttgtggcggatgttggcgatctcgtccacgaactgggacaggtccttgagcttgcggagcgtggcgggcgtgacgacccgcagccccatcttgagctggaggcacggcagggccgtgacgaggttgcagttgccggtgcgttcgccgtagccattgacggtgccctgcacatggcgggccccagcctccacggccgcgagcgcattcgccacgcccatcccgatgtcgtcgtgggtgtggatgccgacggggcacgccaggcttccgatggcggcgcgcgtgacggaggcgacctcgccgggcaggcagccgccgttggtgtcacagaggacgaccatggccgcgccggccttctcggcggcctgccatgtggcgagggcgtaatcccccgtccagcttgtggccgtcgaacccgtgctcggcgtcgtagatgaccgtcttcccgtgatccttcaggtaccgaaccgtgtccccgatcatgccgaggttttcgtcgggcgagcagcgcaggacctcgcggacatggaggagggaggttttgccgtagagggtgacgacgggcgtgccggcctcgaggaggaggcggacttggtcatcctgttcgacgggaatgcccttgcgccgggtggagccaaaggcggcaaggcgggcgttgcgaaagcggcgtcgggcggcttccttgaaaaactcaatgtccttgggattggagccgggccagccgccttcgatgtagtgcacgccgaactggtcgagccgctccgcgatccggagcttgtccgccaccgagaagttcactccttccccctgcgagccgtcgcgcagggttgtgtcgtagatttccacctggggtttcatggtccgcgttgcgtgagcccggcaaatgcaaaaccccgttccggctcgcggaaacggggtcttgccttcgggggaaaactcgttcagcgacgccctccaaggacgccaatcacccgcgagattcttccggccgacgctctcacgtcattcttgtgccaagccatgggcgggctgggcaagcccggattcggggagatcgaaggaatggaggcggcgattcgcgggccacacgtgaacaggatgagaacgcgctggcccgaccgggcgcatcgaaccgctggcccggcaactctcggcaggcgcatcgaaagacgactgggccgaacttccagcgtggcggtcgaaggcatcatgctggagcaaaaaaaccggcccgggagcgacccgggccggttgaaactgaagagacgctgtttttcctggtgtaggtggctggcacccagggaaccagtctgcgtcactcactttgtcttggtacgagttcttgaatatagacatcggctccggatacaagtgcataattcatgagcgcctcaaccgccccagacatccatctcgccttcgacgtaggccatagctccattggctgggccgtccttcgctccggaccgggtggcagtccggatcgcgcccaccccagcatcctcgggaccggggtggtcacgtttggggcggacgactgcttggccgtgaagcgcaggcagttccgccaaacaaggcggcacgttcgtgccacgcgtcaacgcatcgcgcacatcgcacgcttgctcgcgcaactgggcgtcttgtccgagcaagagttggcatcccgccatcggcaggcgggcggggacagcttcgcatggcgccttgcggccgatgtccttgtcgctgcgcgcacgggttccccgctcccggccatcggctggcccgagctttgggacatcctccgctggtacgcgcacaaccgcggctacttcgccccgccatgggccaatcgttccggagagcgaggcccgggcgatggcgacgccgatgacacggagaaggtggagaatgccaacaccaagatgggggaactccagacgggcacgatggccgagaccatcgcagcctataccgtctggtatgaacgcgaggtcgcgaagtggcaccagcaacaacgcccccagaagccgccccatttcaagggcctcagcatggccttcccgcgtgaacatgtggtgtggccggaggttcgtaagcttcttgaagcccttaggggaaggctgcccctgctcgatgatgccctcatccggacgttgctcggcaacgacgtggacccgctgcaagacccccgtgcgtggcagaccatcccatgccccagcatcaagctccccaaacggtatcacggtggcctgctcttcgggcaaagcatcccccgcttcgacaaccgcatcattggcacctgccccattctcttcgggcgactgcatgcgcggtatctgtccgaaggattggacgaaaaggaggcgagggcccgagccgagaaggaatccaagctcccttccaaggcctcgccggagttccttcgattccggtgggccatgcaactcgccaacgtgtttggctccgccgcccatgaatccgtcactcgtcccctgaccgccggggaaaggaaacaggtgaccgagcaagccgagcagggcggcaagctgaaggcgggtgaattcaagaaggtcgtcctcgcggccacgggctggagccgcagcaatctcgataacctcttgatgcacccggacgccaaggagtcccttgtgctggatcccgtccaggtcgccatctcggaatctccgttgaacgacgccctctccagcctcccggaccgatgctcaaaacgcctgcgtggcaagttgcgtgacggcaagacgctcgccggggccgaggttcggtcttggttggaaaacgaggatttggcccgctttgacagcgccgtggcaaccgtcctcgacaaggccaactcccgactttcaaaggggaagccccctgcaacagcagagggcatccttaggcaatcgctcgctgctccatttcccgccgggcgtgcgccttactcccgctccatccttcgcgaggcttacgacgaagtcatggatggccgggaccctcgcgcggagaaaagcgcaacccagccacgcggatgcctttgcatcactcgcgagctccaggaagcgcagcttcatcgcgccgttgatgctcaaaccaacaaccatctcatccgccaccggctcatgatcctgggccggctccagcgtgatctcatccaatcacccgagttcgccgacggcaacccgcgccggatcgccaccgtcaccatcgaggtcaaccgcgacatccgcgacctgtccggaaagaaccgcaaggagcaggagcaggatctcaacattaggcttaaggacttcaaactcgtggcggcaaaggttgaggaagcctgcaagcggagaggcgtccaggtgacgcccggaatcatccgaaaggctcgaattgcagaggatcttggatggaagtgcccctacacggggcaatgcttcaagatagacgatttggttgaggcggattcaccgatggacaaggaccacatcattccgcatgcccatcggcagagtgactcgctggattccctcgtgatgacatggaggaccgtgaacaagtggaagggcaagcgcaccgctttacagttcgttaaggaggaaggcggcaagcctgttccgggcatgcctcaactcagcatcatgaccgagaagcaattcactgcgcatgtcgattcgctcgatacgaaggggccctctctggacgacaagtcccgaaagagccggcgcaagaagcggctcctgacggagcggcacgaggaaaaagagttcaccccgcgcgacctcacggtcacaagccatctggtacgccttggcgcgcaagtcctcaaacgggcgttcccagacgagtatcgcccccatgttgtgtccctgcctggttccgtaaccggggaagttcgcaaggcgtggcggcttatcgactgcctcggagccgccaaccccgggattttcgagcccaacagcactaacccgagactcaagaacgacattcgcggcatcacccaactccatcacgcgctggatgcctgcgtccttgggcttgcctcgctgtacttcccccgaaacggctcggtctggagcgcgatgacgaaggctggcgcggatcgcgaggcagacgatgaacgccgtctttggctcgccatgacaaggcgcaatccctccgagcaggaggcccaactgctcatggccaccgggctttacaaacctgatgccgaaaggaggctacacatggtcaatatccctgaacgcctcaagcacgaactacggaaaaggttgtctgaaaagcgggtcgtccaacatatccctgcagccatgagtggcattaaggtttccgaaactacgcatggagtcatcggccagaaggacgggcgagtgctactcaggcagcgctctagagaccaaaagaccggattgcgcagcaagtcagagggggacgattcgccaagcaaggttttgggtctaaatcctattggaggtgcgggaaaactctttttgcaaaaaggagttcgattaatcaccagcaactttggccttgcaatcttggattatgccaacgacggaaacgagaagttcgtcgtcatcccttggcatagggtttggcatcgactgaatgacctgaaagcctccaataatggaaggagaccacggattgtgcgcaatggcgcgttaattcggataagtagccttgatggaaagctggcctgcaggaatggagtttggcgcgtttacagcgttatgcagaccctgaaaatcgacctcatctcgcccgacagcgtcacacgagaaagtagtggggatagggtctgggcgaatgtgcgattagcgtcgattggtccggagcgaattacgatcttagaccacggctacgcagggagcccggcgtgacctgaccgggccgtgtcgtatcacatcgtcagcattgattcgccgagctgtgccttgtcgtgtcgggacgggcaactgacgtgccggacggaggagggcgagaggagcctgcccttggaggacgtggcggcgatcatcatcacgagcttcagcgcgtcgatccatagcaagctgttccttgaggcggccaagcagggggtggccttgatcatttgcgaggcgttcaagccggtgagcctggtgctgcccgcgaaccggagcacggacacgttgctgactcgcgccgtgctggagttggaaccccgggtgcgggaggcgttgtggcggcgcacggtggacgccaagtgccagaaccaagcccttctggcggagcatatcctcccgggcgaccccgccttggatgccctgaggcggacggcggcaggacggcttgaggcgaaggaggccacgtgcgccaagttgttttggaatgtctttgggcgcggacttggcgatgccgcgtttcgtcgcgagcactccgccgagcaaggcatcaacgccttgctgaactatggctatgcggtgttgctttcgacgatcctccaaaagttgtttgccgtgggactggaccccacgtggggcttgtcccatgcgccccgggaacgcgccacgccccttgcctatgacctgatggaaccgtttcgcccctgcgtggattggcgcgtgtggcaatggactcgccgaaacccgggccaatgcgactggcaggtggacaaggcattccgggcatgggtcaccggctttgtcctggaacgtgtggaccatctggaattgacccttgaagtccgaggcgtgatcgaaggcgtggtgcggggctttcgcagggccgcgatggaaaatgccgtccgcccgtatcgaccatggacgcccaagcccggccaatggccggtccctgaaactcgtggacccggagcgatacaagatggggtggctgctggtggcgtttgacctgccggttggaagcaaagcccagcgaaagcaggcccatgacttccgggaatacctcaaggacgatggctacctcatggtccagtggagcgtgtatgcccggtcctgcgtgacgtttgcaaggcaggagacccacctgcgacgtctccgggccaaccttccgccggagggctccgtccgcgcatggttcctcaccagtgcccaatggagcgccagcttcgtcattcacggcaaacctgcggaacaggtcccacctgaggatttgcccgagcaaatccagctttggtgacccttccgacaacgacgaaaccgggaggggaaaccatgcaacactctctggatcaaccagatcgagcgttcagttttaccccccccgggatttgtaccaaggcaaagcggacgtcgttcaccatcacgtcggcaagcggttttacccccccccgggatttgtacc

SEQ ID NO: 1024 - DNA, 7827 bp, synthetic construct
  source 1..7827: mol_type = other DNA
  misc_feature 1..7827: note = Synthetic
acatgcgcgagatcgtggatcgcgccatggactggtcggccaccggcccggcgcgacccgaacagacctggctgcccggcgccaaccggcaggtgagagtttaacggaggtatcgcgcgccggttaccccccacaacaccaccgtaaccggcgcgcactgcgaggtcacatccgacccaacaaagaaccgccgggcattgcgtccggcggttttacattttagaaacgctttttaacgcggcgtgttcggctggcgaacagtaaacctgtcaattcaggagtcggtctgcgttatctaactttgtcttgattccgcgagaacgattaactggaatggccgtccgaaccaagcagaaaattatgccagcgaaagccgcgacacctgatttggaactcgccttcgatgtgggccacagcagtatcggctgggccgtgctgcagtcggtggggcgagcgtcctcgcgagccgaatccctcgcccccggaatcctcggctgcggcgtcgtcaccttcggcgcggatgactgcctggccagcaaacgccgccaataccgccagcaacgccgccacgcccgcgccacccgcaaacgcatcgaactgctcgctcgattcctctcccaccatctgcaaggggaatccgacccagcaaccgcgcagcttcttgaatttctcaaaccctatctcgaacagaccgcctccacacgccagttgcagggcgatggcgacagcttcgcctggcaacgcgccgccgaaatcctcgccgccgcccgcaacggcaaaccgttgcccgacctcggctggcccgaactctgggacatcctccgctggtatgcccacaatcgcggttacttcgccccgccgtgggccaatcgtggcgacgaagccaccaccgccgacgcggacgacgaagagtccgacactgaaaaagtcgagcacgccaacgccctgatgcgcgaactcggcacgcgcaccatggccgaaaccatcgccgcctacaccgcgcgctacgatcgcgaagccgccgagtggcagcagggccggcgcaaggaaaagcccaaacacttcaagggcctcaacgccgccttcctccgcgaaaaagtcgtctggccggaagtccacgcgctgctcaccgcgctcaagggcaaactccccaaactcgatgacgctctcattcgcaccctgctgggcaacgacgttgacccactgcgcgaccgcgacgcctggcgcaccatcccctgcccggccatccaactgcccaaacgttaccacggcggcctgctcttcggtcaggtcattccgcgcttcgagaaccgcatcattggcgtgtgcccaattcatttcgccaaacgccaggctgaattgatctccgccggattttccccggccgacgcgcagaaggaggccgccaaacaatccaaactcccgtccaaagccacgcgcgaattcctccgctaccgctgggccatgcaaatcgccaacatcttcggcgcaatacccggcgaacccaatacccgtccgctcaccgccgacgagcgcaaacaactcaccgcactggcggaaaagcagggcgcgttcaccaaaggcgaattcaaggacgccgttcgccagattaccggctggcccgagaaacccccgcgcgacaatctcgacgcgctcctgttgcatcccgacgccgagcgggcgctcgtgctcgaccccgcccgccagcagattcacaaaagcaaactcgccgccgcgctcgacgcactccccgagcgattccgcaaacgcctttacggccaactgtggcgcggcaaaatcgtcaaacaggccaccgtgcgcagttggctcaccggcgcggacgcggacgccttcgacgccgaagtccagcgcgtgctcgaagctgccaacacccgccgttcccggaaacaagccccacccacccgcgaggaattgctcgccgaagaattgcgcgtggactggaagcgcgtcgcctccgggcgcgcgccctacgcccggctcgtcttgcgccaggcctacgacgaagtgatgcagggcttcgatccccgcgccgagaaagacgccacccagccgcgcggctgcctgtgccagaccaacgaactcaaggaagcccagctccagcgccgcctcgaagaacagaccaacaaccacctcatccggcatcgcctgctcattctcgaacggctgctgcgcgacatcattgccgcgcctgaattcgccaacggcgacaaatcccgcatcgccggcatgaccatcgaagtcgcccgcgacctgcgcgacctctccggaaaaacgcgcaaagagcaggagcaggatttgggattgcggcttggtgacttcaagcgtgtcgccgccaaggtcgaggaagcctgccagagccgcggcatccgcgtcaccgccggcatcatacgcaaagcccgcgtcgcggaagacctcggctggcgttgcccttacaccggaaaggattacagcattgacaccttgctcgatggggtgatggaccgggaacacatcatcccgcactccgaccgccagagtgattccctcgattcactcgtcatcacttggcaggaaatcaacaagtggaagggcaagcgcaccgcgatgcagttcatccgcgaggaaggcggcaaaactgttcccggacgccccgaactctccgtcatgtcgctggccgcttttcaaaaacacgttgccagcctcgacactcgcaaaggccacgacgacgaccgcgcccgcaagaagcgccgcatccgccggctgctcaccgagacctacgaggaaaaggaattcaccccgcgcgaccttaccgtcacgagccacctcgttcgcctcggcgcgcagatgttgcagcgcgccttcccgccggagcaacgtccgcccgtgaattccattcccggctcggtcaccggcgaagtccgcaaggcctggaagctcaccggctgcctcgaagccgccaaccccgccgtgatggaggaagtggaagaacgcaatcctgacagcggccagttggaaaaagtccggcgcgtgaaaaagaaggacgacattcgcggcaccacgcacctgcatcacgcgctcgacgcctgtgtgctggggctggccgcgcattacttcccgcgccacggcacggtctggtccgcgatggtcaaagccggcacggagcgcgaggccgacgatgaccgccgcctctggctggccatgaccaaacgccgccccaccccgcaggaggccgcattgctgcgcgccaccggcctctaccaggccgacagtgaaggccggatgcacctgaccgacctgccggaggaattgaaacaacaactccgcgcccgcctcgccgaaaagcgcgtcgtccagcacatcccggcggacatgagcggcgtgaagacggaggaaaacacccgccgcgtgctacgagtgcgcgaagacggccgcgtggacctgcgccagcaagccccgcgcgacgccaagaccggcgtgcgacccaaaccaaagaccacggacgaacccgccggcaaattgctcggcctcaaccccgccaacggcgacggcaaattgaaacgccagaagggcgtgcgcgtgatcaccgacaactacggcgtggccatcctcgaccacgcgccggaggacgaggaaaagttcgtcatcatcccgtggcacaaggttcacacccgcatcttcaagggcctcaacggcgagaaaagcctcgtggaacgcaatgccggcaagatgccgcgcgttttgcgaaatgggcaactcattcgagtcccacgcgggtcacgcgctgggatttggcgtgtcacttcgacgaagaacacggaagcctacggcttggctcttgatctgtcgtcgccagacaatctgaagttggaccgaggcaacgcacccatcgagaagctctgcgaagccggcttggagatcgtggattgcccgctggttggggttgattcaagtcaagtcaaggtagccgaagtcaaaaggcgaccccgcaataaagcagccgatgggatgaccgagaacaacctgaatgcaacggcgtgattgcaggctcggattgcaccgcgccagaacaaacattattgtatgcccaatgaaactccgactggacctgctggagcagatgacggacgaggacatcctggaggaagtcctggcgaacaatcaccgttacaagcccgagccgcttttatcaaaaaccggagttgggagcttgtcgtcggcctcaaccgaggagcgtgcgcaagaggaggcgcgcagcacggccagaattcagagagctatgcagcggttgcagcagagtggcgccgattccagtccgaaatccgatcccttgccgaaaccatagagttcttgcggcaatgtcatcgccgcgcccccttcttattcttcaacggcaacaccttcgccgatgtaggcagaaccatggtggatttcgttttcgccgaactgcccaccggccgtcgccgggaagtcatgtcagcggtagcccattacatcgcgggcgttctgccgtgggatgcgatggcgcaaatcatcgaaagcctctcccaatccgccgacttcaagtccggcgaccgggtgagaaccatgcgcggctcgttgcatggcgtggtggtccgcctgctggaggatggccgcatcgtctggcggcccgacggcacggacagcgaattgaccggcctgccggaaagcctggtcgccgagtagcggggacgcctgcatcgctcccactgctgcagtagcgtcacgcatccttgcctgacgtagagggcgcgcttccagccgcccggaaaggtcgtccgcatggagcgcgactcccaagaagttccaccgccccatctccgcctgttgatgcttgcacaactgggtgcggcgcgcggcgttcacgccgcttcacttcacgtcccacgtcctccgagcagcctcggaaaaccggccagcattggcgtgttgcaccgtgaagcgggctgaagcccgcgctccgttccgccgccgaatcgcgcacccatttcggcaaggatcgggaggttcgttccgccgggctggaggccccggctctacggcagccacggatggccgccgccactattgggctccgcctccgtctcccaagaacgggcatttcggcaaagcatctgctctatggggtgctgcgatgtcctatcacatcgtcagcatagacagcgcgaactgctcgctcagttgccgggacgggcagttgacgtgcaagaccaccgacggcgagcgcaggctgccgctggaggacgtggcgtccatcatcatcaccagtttctccgcccagatgcacagcaacctgttcctggaggcggccaagcacggcgtggcgctgatcatctgcgaggcgttcaaacccaccagcctcgtgctgcccgccaaccgctccactgacaccttgttgacccgcgccgtgctgaacctgccggagaaaacccgccagcaactctggcagaagaccgtggacgccaaatgtgccaatcaggtcgccctggccgagcgcatcgcgccgggtcacccgcgcctggccgaaatgcgcgccaccgccgccggcaggaagccccacaaggaagccatcgtggcgaagacgttctggcaaatcttcggggagagcctgggcgacgacgagttcacccgcaaccgcgccgccgggggcttgaacagcctgctcaactacggctacgcggtcctgctctccactgtgctccagaaactgttcggcgtcgggctggatcccaccttcggcatctcacacgtcgcccgagagcgcagcaccccgctggcgtacgacctgatggagccgttccgcccgtgtgtggactggcgcgtctatcagtgggtgacgaaacagcggaaaatgttttcacccgctgcccacgaacccgaccgcctcctctccccgtccctctcctccattccgaatggaggagagggtggccggaggccgggagaggaggtgctccgtccttctagggttcgaagtgagaacttggtttcgggaaaaactctccctgcttcgccgaaagcgaaggagaaaaacctccacgaagtcaccaaagaattccgtggctgggtcacgggctttccgctggaacgcgtgggctacctggacttcacgctcgagattcagggcgtgatcgagggcgtggtgaggagtttccgccacgcgatcctcagccaccaaccccggctctacaaaccgtggacaccgagaaattcaaaatgggctggctagttgtggcctttgatctgccggtgggcacgaagaagcaacggaaagccgcgacggactttcgcaactacctgctggatgatggctaccagatgatccagtggagcgtctatgcccgggcgtgcgtgtcgttcgcccggcaggaaacgcacatcgagcgcctgaagaaaaatctcccgccggagggcagtgtgcgggccatcttcataacgcgcgtgcagtgggagaaatccttcgtcatccacggcgcaccggcgaccgagacggacgccgaggaaatgccggagcaaatccagctttggtagcggggcggctcgtcaaaccgatgcccaattccgcaccacactacgacccacaacaattccacgcctgcggtattcggggcatcggtttgacgagccgccatcaaccaaacggccgcagactcaggggcttgcgcccagcgagtctgccgccgccgaatttggaatcaaggcaaagccgaagcccggttcgcagcagcgcgtggttcagtctgccgccgccgaatttggaatcaaggcaaagcagagatacccacattcttgcggagcgcctcagtctgccgccgccgaatttggaatcaaggcaaagccggcgtagccggcaacgtgggtgccggggcagtctgccgccgccgaatttggaatcaaggcaaagcctatgacgtacctgatggctgaggtgctgcagtctgccgccgccgaatttggaatcaaggcaaagcaggccgacgacggtcccgttggatgattagagtctgccgccgccgaatttggaatcaaggcaaagcgaagagagctaatttcacaccggaggaagcagtctgccgccgccgaatttggaatcaaggcaaagctccaaaagcgcggagtatggcccagagatcagtctgccgccgccgaatttggaatcaaggcaaagcaaacatatacgcagggctaatcacgagcggagtctgccgccgccgaatttggaatcaaggcaaagcccccaaacctccacccatggatgccgttcgagtctgccgccgccgaatttggaatcaaggcaaagccattgaacgggatgcggtgaaccagaagaagtctgccgccgccgaatttggaatcaaggcaaagcaaaaaggcggcggtcaggccgttgccctttccaaagctggttcgaaaatctgtccgcgcgctgtggggcaacggcctgaccgccgccttactgttccaccccgattcaaaaggcttttgagaaaacctccttgcatcaaacaccagcgtaaccggcgcgcacaaacttccggatcacttccaactcagcctcgcccgcgatggtgtgcggtttcgcaaactcgtgccattcgacttgcaggccggcggacttcaggagtttcacctgctcacgcgtcacggcaaaggggacaagcggatcaagtgtgccgtgcgtcatcagcaggcgttgttgtcgcgccaccggtgagagttcccgaaccagtttctccggttcgctcacccaaccactgatcccgaccagaccggcgaaccgatgcggatagcgtaatccgacttcgatgg

SEQ ID NO: 1025 - DNA, 22250 bp, synthetic construct
  source 1..22250: mol_type = other DNA
  misc_feature 1..22250: note = Synthetic
caggaaggtgaagctttccggcgagatgaagccctgccgggttgcgaagaacgacccggcgaaaccgccgaacatggcgcccagcgcgaaggcggtgagcttcgtgttggtcgtgttgatgcccagcgaccggcaggcgatctcgtcctcgcgcagcgcttcccaggcccgcccgatcggcatcttgcgcatccgcatggtgaccaggttggtgatgatcgcgaggatgaagatgatgtagtagagatagatgaagcgctggatcgggtcgtaggcgatgccgaagaagtcggcgaacccgccggccccgcgcttgaactccaggccgaacaacgtcggcttcggaatgcccgaaatgccgtccgggccaccggtgaactggtaccagttcaaaagcaccacgcggatgatctccccgaaggccagcgtcacgatggccaggtagtcgccgcgcaaccgcagcaccgggaagcccaggatcatgccccagaaggccgccaggatgcccgccagcggcagggccatccagaaaccgaggccgaaatgctcggccagcagcgcgaaggaataggccccgaccgcgtaaaaggcgacgtagccgagatcgagcagacccgccaggccgacgacgatgttcaggccccagccgagcatgatgtaggtcatgatcaggatggcgaggtcgatgaactgccggtcccgctgcgggaaaaaataggtgaagaagaagggcagcacgagcgcgaaggcgaacaggatgcgcttgagccaccatgcaacacgctccagcgagcgcgtgttgtcgctggcagccgcagcaacggtgcgcgtcaccggcttgtgtgtcttgaacacgaagatgttgagcgccagccgaccggcgaaaacgatcaggaccgccgtgatgaacagcccccagcgggtcgtcatcaccaggccgcccggcgcgatgtccgtacgaagcccgaggaagaagaagcccagcacgccggccagcagcgcggccatgaaggcgtccttgagcgactccgccatcgagttgggatccttggcgggcacgatttccggcgcggcggcgcgctcctcgtccagccgctgggcgccttccggcgtcgtggtttcggtaggctggtgcaccatcagaccttctccacttccggtttgccgagcaggcccgagggcaggaagatcaacacgatcgcgaggatcgagaaggctgccacgtccttgtattcaacggtgaaatagcccgaccagaacacctcgatcagcccgatcagcagcccgccgagcatggcgccgggcagcgagccgataccgccgagaacggccgcggtgaacgccttcacgcccgccaggaagccgatgtagaagtcgatcacgccgtagagcagcaggaacatcaggcccgcgacggcagccagcgccgcccccatcacgaaggtcagcgagatcgtgcggtcgacgttcacgccaagcagcgccgccattttctggtcctgctcgcaggaccgctgcgcccgcccgagcgacgtcttgttgatcagcaacgtgaacccgatcatcagcgccgtcgtcagcgcgatgatcagcatctgcatgtaggagagctgcacgacgatcgggccgttctcggtcacgccttccatcagcgtcacgccgccggagatgatcggctggagcggcttgacgcgcgcgccctgcgtcacctgcacgaagttctgcagcacgatcgacatgccgatggcggtgatcagcggcgccaggcggaacgatccgcgcagcggccggtaggccagccgctccactgtccagccccaggccgcggtgaagaccatcgagatgatcagcacgatcagcagggccaggatgatgaagccggtgctggacgccgccgtcaggccgatggcgacgatcagcgccagcgcgatgaacgagccgaccatgaagatgtcgccatgggcgaagttgatcatgccgatgatgccgtacaccatcgtgtagccgatcgcgatcagcccgtagatcgagccgagcgtcagcccgttgatgagctgctgaacgaaatattccatgccgttcccctgtttcccggctgcctctgtcggacagtccggaagcgcccctgggcgccggaccagtttgttattcttaacggctcgccgtcacaacacaaccggctttggccaggccggtcttgtctgcgccgcgcgccgcatgcctccccgccgctgtgtgcggcattttcaaaattcctagcaccggacctccgggaagtccttgcatccttgctgtttagaaggctgaagtttcgcagaattttgcacgatcagaagatctgttgcaatcttcttgcaaatgcagggcaaacggactgccacaggtccttcgctgtcaaacaaccgaaaaccctttcgaaaacggatcgcggtcgtcgatgaagatcgtgttcagccccgtcatgaccgcccagccggcaatcgacggaatgatgccggcccgcccgccgaccgtggcttccccttcgacacggccatggaaaagcgaaccgatgatggattcgtgcacgaacgtgtcgccgggcttcaggtcgccccgcgcggccagttgcgccatgcgcgccgaggttccggtcccacaagggctgcggtcgatcgccttgtcgccgtagaagacggcattgcgtgcatccgcgccctccaccgtcgcctttccggtccacagcacatgggtaacgcggttgatctcgggcctgtccggatgcgccagcgtataggcctcgttgagccgctgccggatgaccggactccaggcgatcaggtcggccgccgaatggtccgccatgtcgcgataattcgcctgcggttcgacgatggcgtagaaatttcccccgtaggcgacatcgacggtcaggcgcccgagcacagggcagtccacctcccagccggtcgcgtgcaggtaggccggcacgttggtcagccgcacctcccgcacgtattcgccttccatggcgtattccgccttcaccggcccggccggcgtgtccagcatcagcacgccgggaatgcgcggacggaccagcccgtgctcgacggccatggtcaccgtgccgatcgtgccgtgcccgcacatcggcaggcagcccgacgtctcgatatagaggacgccgacatcgcagtccggtcgcgtcggcggatagagaatggcacccgacatcatgtcgtgtccgcgcggctcgaacatcagcccggtgcggatccagtcgtgacgggcgaggaaatccatccgccggtccatcatggtggcgccgtcgagcagcggcccgccgcccgccacgagccggaccgggttgccgcaggtatggccgtcgatgcagaaaaaggaatggcgcgccatggctgcggctttcagaaacgcttgggcgaatagggcgaaaggtcgatggcaggagcctgcccgcaaacgaggtcgcgcacaagccgcgccgtggcagcggcctgcgtcaggccgagatggccgtgaccgaaggcatagacgatgcccggcgccttggctgccgcgccgatcaccggcagcgaatcgggcagcgacggccggtatcccatccactcccgtccgccctccgtcttgaggccgggcaggaagcgccttgccttgtccagcatggcgcggctgcgccggtagtctggcgccaggtcgagaccgcccagttccaccgcaccgccgatgcgcaggcccgtctccagcggcgtcgccacgaacccgtggtcgcagaagacgagctgacgcttgagatcgaacgcgcccacgggaagcgtcgtgttgtagccgcgttcggtttcaagcgggaccgggtcgcccagcgccgcggtcagcctgtgcgaccaggccccggcggcgatcaccaggcgatcggcttccagcccgcgcccgtctgcaagcacggcggccggacggccgccggtcaccgcgatctcccgcaccgtttccttcaccaggcgggcgccgtttgatcgcgcgtggtcgaacagtgcctttccgaacagttgcgggtccgacacggtcatccagccgggaacgaacacgcccttggcgaattggtcagacagtccgggctggaattcgccgagttgcgccttcccgacaacctcgaaggccacgccatggcgctcgcgcgctgcgtaccccgcctgtgccgcccggaagcttccctcactgtcataaagctccaggcagccgtcgcgccgcaggaacccttccgtttccgtcagtgccgtcagcgtctcccattcgcggcgcgccaggcccatcaggttggcctgggcactgagcgcggcctcgaaccggcccgggcggccggccgcgagaaagcggaccagccacggcaggatggagagcaggtagcgcggcgggatggacaatgggcccagcggatcgagcagccagccgggcacctgtcgcagcatgcccttctgcgccagcggcaggaggtcggagaatgcaaaggcagcggcattgcccgcgctggtttcctcgcagaccccggaccggtcgacgatcgtcaccgcatggccctcggcggccagcagcgcggcactggcggaaccgacgattccgccgccaacgatcaggatcgagggtttgccgtccgccatcgcattcacctgtcagaaatcgggcagaaccgggcggcgttcgagcgcggcgcggatcaccgcctcgacctgcgcccgccgctcgccggccagcggccgccgcggcccgcgcacgcggtcattcgttccgatggcatgaacctctgccagcttgatgttctgcaccaggtagctggaaacgtcgaggtccagcaatggccggaaccagcggtagatctccagcgcttcggtctggcgcccctgcttcatcagctggtagatcgccaccgtctcgcgcgggaaggccgtgaccagaccggccacccagcccacggcgccaacgcagagcgcctcgaacgccaggttgtcgacgcccgtgaacaggtcataccggtcgcccagccggttgatgatgtcggtcgcccggcgaatgtcgtcggagctctccttgacggcgatgaaacgccagtcctcggccagttcctccatcatgtcgacggtcacatcgacccgataggcgatgcggttggaatagatcatcaccggaaggtcgccggcctcggcaacggcgcgcaggccggccacggcctcgtcgcggtcggcatggtagaccatggacggaaccaccatcaggccgtccgccccggccgccttggcctcgcgggcacgctggcaggcttcgcgggtccccgcctcgttgatcgtcatcagcaccggcttgccgttggcgacgcccttggccgtctggaaaaccgcgagcttttcctccggcgacagcatcggcccctcgcccagcgacccgccaacgatgatgccgtcacagccggcctccatctgcaacccgaagcagcgctccatttccgggtgatcgagctcgtcagattcggtgaacttggtcgtcaccgccgggaaaacaccttgccacatgacttgtctccttgtcgttgacatgtgatatatcagataaaatcgcaagccgtcaacactgatatatcagacgaagaaaagaaaatgacaggaccggattcattgcaggaaaccgcctccacgcagcctgaaagccaggccgacgcggcctaccgcaggctggaggaaagcctggtcacgctggacctcgaaccgggcagccaggcgaccgaaggcgcattgatcgccctcgtcggccttggccgcacgccggtccgtgaagcgatccagcgccttgcctgggaaggcctgctggaaatccgcccgcgtgccggcattcgcgttgccccgctgatcgaaagcgactggatcaaggtccttgaggcccggcgcggtgtcgaagcggtgctcgcccgggccgcggcacggaacctgacgccggcagccgcccaggggttcgcccgcgccgctgcggccatgcagcaggcggtggcggaccgcgacacccgcgccttcctggccgccgacaaggcgttcgatctcgccttggcggaagcggccgacaacgcctatgccgcgcgcctcgcagcgccgctgcaaacccattcacggcgcttctggttcgcttcggcaaggcccgacagcctggccgaagccgccgcccaccacctcgatctcatcaacgccatcctggagcgcgacggcacccttgcccatgacgaggccctgcgcctgatggcgctgctggaggcgatggcgcgcgggcaataacaggcaggcggggcgaaggcgaacggaaccggcgccaacggcagaagggaactgtccgaaacagcctcatgcttccggcgcgccggcttcgaatcgatgcgccgaaagaaatgcgcccggccactttcgtcgccgggcgccaaacgtcttttggtgaagaccggtcagcggctcgtacaggaccaggcgacgagcctgcagccgctggtgtattgcgagcaacggcgcgcggcctttctctcggcctggttccggctgttgccccagtccgcgccccagccgttcgagccggcatagacggcgccgcaggcattgtggaagtgggtgacgaccttgcagccgcggccatgcttccggcaggcagccatcgcgttggagttcgccgcgccctggctgttcgcgtcgtaccagtatccccaggcgccactggaaggcgaataggcgatggcgccgtacttgtcggccgcgaaacccgttccggtcgccgaaagcgagaaaaagatcagaagaagaagcgatttgagccgattggccatggtgacatccccccttggattgtcgtggagccgcaaccggattaatcagtaatatgaaacaaatggcaattcctgttttagcagaaatcctgcaaacgacatcgacgggacaaatgttggccggaatggttaacctgcccgacgggcaggaagcacctcgttggaagccgcccacgaaaaagggcggccccggaaggccgccctgttcaggcaccaggtattgcccggaaaacgatcagtccatcgccttgaagtggaactcgccgccttccttgatgccggagaaccagcgcgccgtcaccgtcttggtcttggtgtagaagcggaaggcatccgggccatactggttcaggtcgccgaaggccgacttcttccagccgccgaaggtgaaataggagagcggcaccgggatcgggaaattgatgccgaccatgccgacgttcacccggttggcgaagtcccgtgccgtgtcgccatcggccgtgaagatcgacgtgccgttgccataggggttgtccatggtcagcttcagggcgtcctcgtaggtcttggcacgcacggtcgacaggaccgggccgaagatttcttccttgtagatgtccatctccggcgtgacgttgtcgaacagcgtcggaccgacgaagaacccgttctcgtagccctgcagcgagaagtcgcggccgtccatcaccgccgtcgcgccctgctcgatgcccgagccgatcaggcccttgacgcggttcattgccgcctcggtgatcagcgggccgtagtcgacatcctcaccggcggtgtaggggccgaccttcagcttctccacgcgcggcacgaggcgctcgatcagcgcgtcggcggtcttgtctcccaccggcaccgcgaccgagatggccatgcagcgttcaccggccgccccgtagccggcacccaccagcgcgtccgccgccttgtccatgtcggcatcgggcatgatgatcatgtggttcttggcgccgccgaagcactgggcgcgctttccgttggccgccgcgcgcgaatagatgtactgcgcgatcggcgtggagccgacgaagccgaccgcctgcaccgtctcgttgtcgagaatggcgtcgacgacttccttgtcgccgttgaccacctgcagcacgccgtccggcaggccggcttccttcagcagttccgccagcatcatcgacgtggtcgggcagcgctccgacggcttgaggatcatggcgttgccggcggccagcgccggacccatcttccacagcgggatcatcgccgggaagttgaacggcgtgatgccggccacgacacccagcggctggcgcatcgagaagagatcgatgcccgggccgccgtcgttcatgtactcgcccttgagcaggtgcggcgcgcccatgcagacctcgatcacctcgagcccgcgctgcacgtctccacgcccgtccggcagcgtcttgccatgctcgcggctgaccgcttcggccagcttgtccatgttctcgttgatcagcgccgcgaatttcatcatcacgcgggcgcggcgctgcgggttggtcgcaccccagcccttctgcgcttccgccgcacgcgccacggcatcgtccagttccgccttcgaggccagggcaaccgtgccctgcacttcgccggtggccgggttgaagatgtctgccttgcggccgctctggccgtccacggtcgcgccgtcgatatagtgtccgatggaatacatggggggtcctcccgttttcatgtccggccgcggccggtcctgtccatggcgccatcatgtccaaggaacacgccatgcgcaacgcgccggagtccaaaaccgttgtgcagaaattgaagaagttgtagctagtctatcaactttaatgcggatcatcggaggcgcccgtgaactgggacgacgttcgcattttcctcgccgtggcgcgcgcgggccagatcctgggcgctgcgcggcggcttggcctgaatcacgccacggtttcgcgccgcatttccgcgctcgagcaggccctcggcgtgaaactggtcgaccggcagaccaccggaacggaactgacacccgagggcgagcgcttcctgcgcacggccgacgagatggaagctggcatgattgccgcccgcgccgacctggcgccggatgccgagggcgtgtcgggcaccgtgcgcatcggcgcgcccgacggcttcggcgtcgcatggctggccccgaggctcggccggctggcccgcgaccatccgggcctcaccatccagctcgttcccgtcccgcgcagcttttccctgtcccgccgcgaggcggatatcgccatcaccatggaacgccccgccgaaggccgcctggtggccggcaagctggtcgactacacgctcagcctctatgccagccgcgactacgccacccagtccggcctccccttcggtcccggcgacattgccggccatcgcctcgtcggctacgtcccggacctggtaatcagccccgccctcgactatgccggcgaaatggcgcccgactggcgctcgagcttcgagatttcctcggcgctcggccagatggaagcggtacgcgccggagccgggctcggcatcctgcacagctatattgccaggcaccacgacgatctcgttgcggtggaaggcttcccgcagatccgccgggcctactggatcgtctaccacgaaaccctgaaaccgctgcggcgcatccaggcggtcgtgaagttcatccaggagcaggtcgagggcgaccggtcctcgttcctgtagcgcgatggtcccgcagttccgcaccgcctcctgccctggctcccgccagccggacgcatcgccgaaaaccgggatacggggccacgacgccggcatcggaccgctggatgctccccaatttcattggatcctttcgttgctctgcccctcctcttcacgtgggtcccgatccgcaacgccccctcgcgctggcaaacccggtccggaccgcatggccgccccgcccgcacacgtcgcgaccggccatgcgggggcagaccggagcccgcccccgggtgacggcgttcgcctggttgccggagggaacgcactttccggagcggtcaggcaagcattcttcctcccgtccaggaatggcgtcttcgcaccatgcgcgaaagcgccattggcgttgccgcggcattgaatgacgatgcccgaagacccggaacagggggaacggacatggttctgcgtttctcgttcgacctcggcacgggctccatcggtcttgccgccggacggacaggcgcggacggtcgactggagcctcttttcgccggcgcgcggatcctgccggcgcagccggcacaggcggtggcgcgccttggcttgcggcgaaagcagggccgttatcgcaagcggcgccgggagcgccgacggcagttcgctgcctgcctgcgcaaggcagggctcctgccccccgtcggcaaggcgtctgcccgcctgttccggctcgatccttacgagttgcggcgtcgcgcgcttgaccgccccgtctcgctccacgcgctgggacggctgctgatgcacctgcacaagcgccgtggccggccgattgccggcacctcgccgccgggcgaaatcgccggacccggcctgcgaacgctgggcgaacatctggccatccgccaccgggggccggtgcgggggcgcagggcggtgcgccaccgtcttggtctcaaagggatcgtcgatccgccccctgaaatccggcggaccgatgtgatcgcagaattccgcgcgatctggacggcgcaacggcaattcagcccaacacggttgagcgacacgctcttcgacaccattcatgccgcctttcaggacgagggccggcgcgtcgaacgcccgccccgggaggaccgtcgcaccgccgtcgtgctcgcacagttgcgccagtgcatgaacgccatggagcgccgcttcggcaccccccggtcggtcgtgctcgagcgcccgctgcccctgccgtccggtgaagggctatcggcgcgccatgccatgccgccgtgggcctgggacctgctgcgccggcgcggcctgcggcccacccgccatcgccgggtggttctcgccctgctcgcccgccaggaggccgcggcaaatggacaggcggtctgcccatacagcggccgcaacctgaaacgggctgatctgttttccggcctgcacgagatcgaccacgtcctgcccgtctcccggggcggagccaccgcggccgccaacctcgtcctgtgccatgccttcgccaaccgccagaaggcgaaccggacgccggaggaggcctttgccgggcaggcccggtggcgccagaacaccaggccgggcgccgtggccgggcgcaacgggccgatggcccatgccatgccggatcgccgggccgcgatgcaacgtctcgctgccgccgccggccggatgatcgctcgccgctggcccggcgcccgcgttcaatgggtccacccgtccggcattgccgcccttcgccggtccatcgctccggaagggcaagcggggccatccgccaaatcccttgccgacaaccgcaaccatgccgtcgatgcactgctggcgcttttcctcgccacgggcaggaaaccggatgccgcccgggtcctggccttccttgagaatgccacggtcacccacgccggcggcaggaagaagacggccaccggggaaacccggtatggcgcaaccctctcccgtgacggcaccgcgcatctgcactgccgtcgcccgttgaccaccctgtccaaggcgcaggccaggcgcatcgtcgatccggctttgcgcgaacggatcctcgaagccctggagcaccgggacacgggcacgagccggatcgaggcgctgcaggacttgtcccggacgaccggaatccggcgtgtgcgcatcgcgcgggctacccgcatggcttggcccgtggcgggcggcatcgcctgggtcatgccggcgggaaatgccttcatggacatcgtggtgcttccttccggcaggtgggtcggcttttgcgccacccgcgcggagaccgcgcgcaaggactggcgcccgatctgggaaaagggacgcatcggcggcaagctggtgatgcgcctgcgcaccggagacctcatcgagctggacggaccggagggcgaaagggtctggcggaccgtgcggcaactgtcggcggcgaaggcccggattcatctcgccgcccccgaggaaggcggaacgctggcacggcgccatgcggatccggacgatcccttccgttgggaactggtcaccgccgaaggcctgcgccgggccggtgcgcgggcgctcgacgtgacgccggccggcctggtccgcccgcgccgcagcaatctttcgcggtagcggcaggaccggcaaactcccgtccgctggccggaccccggcgatcccggaatccggccacgcccggaaagagcgcccaaccggaacagatatttggccgagttggcatcctcaccctatatcgccgcggggtgcattgcagcgcgaaagggatttcatggttagcgcatcgccgccgcaaggggccaggaccctccgccttgttctgggcgaccagttgtccggagatctgtcggcgctcgaggacctctcgaagggcgacatcgtggtcatggccgaggtcaccgccgaggccacctatgtgaagcaccacaagaagaagatcgccttcctgtttgccgcgatgcgccatttcgcccggacacttcaggaaaagggcgtggaggtggactatgccgtctatggcgaccccgccggcacatcgctcgagaccgccctgaaggcggccgtgaagcgccacgggcccacccgggtgatcatgaccgaacccggcgaatggcgcgtcctgcagatgatgcgtgactggagcgagaccctgggaccggatgtcgagatccggcccgacacgcggttcctctgtgaccacgagacgttcctcgcctgggccgacggccgcaaggcgctgcgcatggagtatttctatcgcgagatgcgcaggcgcaccggctacctgatgcgggacgacggtccggaaggcggcgaatggaatttcgacagcgagaaccgcgagcccctgcccaatgacgtcgccgtccccgaacgcccggattacgcggtggatgacaccacccgtgccgtccttgatctggtcggccaggagttcgcggatcatttcggcgatctcgaacccttcaactatccggtcacccgccgccaggcgctgcactacctcgactggttcgtgaagaacgcgctgcccggcttcggtacctggcaggatgccatgaaacagggtgagcccctgctcttccactcccacctgtcggcgctgatcaactgcggcctgctggacccgcgcgaatgctgccggcgggcagaacaggcctggcacgaaggcgaggcgccgctcaacgccgtggaaggctttatccgccagatcatcggctggcgcgagttcatccgaggcatctactggctgaacatgccggactacgcctcttccaacaagctccaggcgcggcgcaagctgccggatttcttctggaccggcgaaacggagatgaattgcctcgcgcaggccatcggcgaaacccgcgccaacgcctacgcccaccacatccagcgcctcatgatcatcggcaacttctgcctgcttgccggcctcgacccccgggaggtgcaggaatggtacctgctggtctactgggatgcctatgaatgggtggaaatgcccaatgtcgtcggcatgatcctctgggcagacggcggcctctttgcgtccaagccctatgccgcgtctggcagctacatcgaccgcatgtcggattattgcggtggatgccgctacgccgtgaagaagaagagcggagaatcggcctgcccgttcaattacctctactgggatttcctcgaccgcaatcgccagcgcctggccggaaatgcccgcatggccatgatgtatcgcacgctcgatcgcatgggcgaggaccggaagaaggcatttcgcgacgatgcccgcaggttcctcgacagcctctgatcattccgctggcgccaatgacaaggatcaaggcgccgtcacggctccgggatagcatgaccctcgtcccttgatttggccggaggcggatgcatgcgttttttcaggatcatggctgcggcagcccttttggccgcggcgcccatggccgcaaccctaccggcacgcggcggcgaaatccgcgacctcgacggcgtccgtttcgaagccccggaccgctgggccgagatggctcggatccagggcaaggaactgggcttcgtccggccggacagccgtggccgcctctccatttactggtggctgccggacgaacccctgctcggcgcgcccgacatcctgtcccacgggcagatcatggttgccgggcatcccgcgctgctcattcactacgatttctacagcgaggaatccctcaaggccgtgttcctggttccgcgtgccgatggccggcagcttgtcgtttcagtggattatcccaagggagagaccgcggacctccaggcgctcctgcagcgggtcctcgacagcatccgctttgacggcgaggcgccgccgccagccgcccaggccggcaacggcaccgaacggctgatcacgataccggacgagggtgtggaggcggcccagccggcgcaggctgcggcacccgctgccgtcgatccgtcctggctgaaggaccggttcggcagcgattgcaccatggtggacctgcagacctggtcccacccggtcggcgatgtgcttgcgagggccggtgccaaccggctgctatggctggcgctctgccaggatcgcacctacccggtcttcggcatggcattcgattacgatccgcgcagcgccacccgggattatttcgttccgctgtggagcgacatgctgaaggccaacggcaactgggccttcaccgtggtcgacgccggcgacgaagtgatgatccatgtttcgcgcgagggacggcgcggcctgacgctggacgaggaggatctgcccgccgggtttgccgccccggcaacggctgtctcgcctcccggatcgcaaggctcgatcttcgacgacggcgcgaatgccccggccgtcaccgcaccgcaaggccaggacggtacggctgcgaacggcaacgcgatcttcggcgacggcgacacagggaacagtgccggcgcatcggcgccatcacctggcgccgcgctgaccggcgacccggaaaacctgccgcccgtctccgccagcccggctccgtcaggcggcgcgccgcgaaacggcatggacgcggtcatccgcgacctgaattcctacctgaaggattgaccagatggcccgtattctccgcgccctgctccttgccctgcttgttccggccctttccgtcaccgtcgcccgtgccgcgcaacaggataacgtcgattacatcgtccggcgcatcgatagcgtgctgaaccagtcgctggaacgaaagagctggaaaaacagctaccagctggtcgagaagaacatcgaagacctgaagaacacgctgcgccagggcggcacgatatcgtccaaccccgtccaggcctatcgcgacaagctcgcccagatgatggaggagagaaagcaggtctggaaggaactcgacagcctgcagcagaaattccagcaggaccgcacgcgctactcgcaacaggccatccgcgacatcgtcggcgagatgatcacccgtctcaagccccgcgccggcgttctcgatcccttcgccatcgccctgtcgaagaacatggaggtcatcaaggatgacttctacaagctgcgcacggcagaccagggcatccgcctcatcgatgactacaagcggtcgatcctgccggcgatccacgacatgcgcgaccgcctgcacgggctggaacccctgctgcaggcctacaaggccgtgtctgaacccgccggcttcgagggcacctattccggccgcctgagcggcggtgcggccggcaccatcgagttccgcattttcggcttccaggtcaccggcacggtgtccggatcctacagcggcgaccccgtcaccggctcgttcaccggccgtgtgtcgcccgacggcgccatttcaaccactttgaacgggctcgtcggcgccggcaaatgggacaagcccatgtcctatgccggcaacatcagcgggcgcatcacgccggccggggccaccggcacctggaaggccggcaacaactgggacatgccctcgggcaactggtcggcgacccggcggtgacgggccccgtatgcgtcagccgcccggccgcaccgccacgatgatgacgatggaggcgatcgcgatcagggccagcttccagaaatccttgcgccgccgcaggcccggcaggccgagcggcttgatcaggtgcaccaccatcatggcaatcaccagtagggaaaggattttcgtcaagcagggctcccggggcagttccagcgaatatggccaccggtatcgctcatggaatggctgcggcgactcaactggtcgttcggcatggacgcgacggcgggtggcggcaacgaacaccctcgcgccggggccgtcaaccccgcggccggcgaatgccgccggttccggccaccacccgaaaccctccccacttgacctttgacaggggctggagcacggtcccggccttccaaggcaagaggaacagacatgaatttgcaaggcaagacagccatcgtcaccggcgcagccacggggatcggccgcgccatcgcggagcgctacgtcgacgagggcatgaaggtcgtcatcgcggacgtcgaccaggagagggccaaggcggcggtcaaggacctgtcccagcgtggcgaggtccgtttcgtgaagaccgacgtggccaagcggctggatgtccacaatctcgttgcgcatgcgctcgaccagttcggcgagatcgacgtgctggtgaacaacgccggcatcattcacggcgccccgttcctcgacctggcggaagaggatttcgaccgcgtcctgtcgatcaacctcaagggcgccttcctcgccggccaggccgtggcccgtcacatggtggaccgggtggaaaagggcggcaagccgggcgccatcgtcaacatgtcgtcggtcaacgccgtgttcgccatcgacaaccaggtgccctactccgtctccaagggcggcatgaaccagctcaccaaggtgatggcgctggcgctggcaccgcatggcatccgcgtcaacgcgatcgggccgggctccatcgccaccgagatgatggcgacggtggcttccgacgaggcggcccgccgcaaggttctctcgcgcacgccgctcggccgcatgggcgacccttccgagatcgccgccattgccgccttcctcgcctccgacgaggccagctacatcaccggccagacgatctacgccgatggcggccgtctgccgctcaactacacggtgccggtcaaggagaagaaggactgaccggacgacagtccgggccgcggggcaaatggcctggtttcacgagaggagtggaagcgaatgcgtcttctttttgcagccatggtatttgccgccaccgcggcccacgccgaccccgtcggcatcaccagggacatgatgagcgtgacggtccagacggcggatggccccgtcgagattgcgcgcatccaggacaacgacgcggtgatcgagggcgacttcgcccgcatcgcgcggccctgcccgaatttctgtatccagccgatgatcccggccgaaggcgtgacaccggtgggcgaactggaaatgctgcagttcctcaacgatccagacgtcgttgtgatcgacggtcgtgtcaggcccgatttcctcggcggcgcgatcccgggcgcgatcaacattccctacaccgaggcggccgaccggctcggcgaactgggctgcgagcccgatttcgacggctggatctgcgacggcgacaacgtcaggtccgccgctctctattgcaacgggccgtggtgcggccagtccccggcagcggcccgtcgcatgatcgaagccgggtttccgccggagaaactctactattaccgtgctggcatgcagggctggcgcatgctcggcctcacggtcgccatgcccgcccggtgatggtcgtggccaggacgacagacgccccggcctcctgacagaatggtgtcaggaggggtgtgcgatggttgccttgttgaaacacaggtctcgaaaggaaaccgtcatgaacgcacctgccaacgccaatgtctgggctgaaatcccggtcaccgatctcgccaaagccaaggatttctatggcgccgtcaccggctacgcgatgatcgatcaggatatgggtcccaaccggaccgccgtgttcgcctacaccggcgacggcggcgtcgccggtcatctctatgaaggcaggcccgcgcccgcgggaaccggtccgacggttcacctcgcggtcagtggcaccaccgaggaggccatgcagcgggtccgggatgccggcggccaggtcgtctcgccggtcatcgagatccctgccgggcgtttcgcctattgcctcgatcccgacggcaattccttcggcgtcttcgcggcctgacgccatgcgccgcgccgatcgcctctttgccatcgtccagcacctgcgtggtggccggctggtcaccgcccgcaagctggccgaatggctggaggtctcggaacgcacgatctaccgtgacatcgccgacctccaggcctccggcgtgcccatcgacggcgaggccggggtcggctacatcctgcgctccggtttcgaccttcctccgctgatgttcacccgcgaggaggttgtcgcgctcgtcgccggcgcccggatgatccgcgcctggggcggcgccgccatggcgagggcagcggaagaggccctggtcaagatcgcttctgtcctgccagacgacggcgcggcgcgcatcgatgcgccacgggtctacgcgccaccgatgaccctctccgacaacgagcgcgggctcatcgaccgcatcgaggctgcctgcgacacgggatcggtgatgggtctgagctatcgtgacgagtccggccgcgccagcgagcgcacgatccggccgctcggcctctggttctggggcaaggtctggaccctcgtggcctggtgcgaactgcgcgaggacttccgcatgttccgtctcgaccggatgctggcgctggcgccgacaggtgaacggttccggcccgaaccgggcaagcgcctggccgatttcttccgctacatggaagcctgcggcgagatcccgcgcgccaggctcccgtcagccggtccctgacagcgaaaaggcccggcatccatccggacaccgggcctttctgtcattggcggcagggacgatcagaacgaatcgtcgtcctcgtcctcgatcttgcccttgagcgaggagagcttggcgaacaccttgtccgcatccagttcctcttcctcttccgccggggccgccgtggaggcggatccgaacaccgacgtgctctcgtcgaggttttccgtcgcgctggccggcagcagggtatcgcccgtttccggcttgggcggcgcgttcttcgaggctttctggacttccaggtcgaggtcgatctgcgagcacaggccgagcgtgaccgggtccatcggctgcaggttggcggagttccagtgcgtccgctcgcggatctgctcgatcgtcgacttggtcgtgccgaccaggcgcgagatctgcgcatccttcagttccggatggttgcggaccagccacaaaatggcgttcgggcgatcctggcgcttcgacagcggcgtgtagcgcggacccttgcgcttcttttccgggatgcgcacccgcgattcctgcagcttgagccggtagtcgccgtcgccttccgcccgcgcgatctcgtcgcgggtcagctggccggtggaaaccgggtcgaggcccttgatgccctgtgccgcctcgccgtcggcgatcgccttgacctcgagcggatgcagtttgcagaaatgggcgatctggtcgaaggaaagcgcggtattgtcgaccagccagacggcggtcgccttgggcatgagcagttgctgggccatgttgacgaatcctctttcttcgcccgcgtctcccgtcgcgggcggtggtcgcagccaccagttataaagggaagtgccacccctatagtcgcatttgccgccaagcgcaatggaaacccgccggaccgcttgacagccaagcgccccgtcgtttatgagccagcatcctttttgagagaggcgcgcccgagctggcgcgcttgtcatgtcaggcccgcccatccatggcagggcccagaagaacgggtcggaacgatgaagatcaagaattcgctcaaggcgctcaagagccgtcaccgcgacaaccgcatggttcgccgcaagggccgcatttacatcatcaacaagcagaacccgcgcttcaaggcgcgccagggctgattgctgacgctgccccgcgccgtggcccggccacggatcgggtcatcacgcgattttcggtttgacgtttcgctgaacgggattacccttccgttcatgcggaacgtttttgcttgcctgtccatcctgctttgcctttccggcccggtgctcgccagcgagcaggcaccgcgcaccgagcggctcgacaaccttttttccgacctcaagcggacggccaatgcatccgcggcccgcaggattgccggccggatttcggcgatcttcgccgaatcggacagcgcgaccgtcgatctgctgatggagcgcgccgccaaggggatcgaggacaagaaatacgatctcgccctcgacatgcttgaccaggtgatcatgctcgacccggcatacgccgagggctggaaccggcgcgcgacggtcaatttcctgatgaagaactacgccaaggcgatggccgacatcgagcgcgtcctcgagcttgagccacgccatttcggcgccatggtcggcctcgccgccatcctgcgcgccgagaacaaggacgaaagcgcactcggcgtctacgagcgggcgctcgaagtctaccccatgatgcgcgaggcgcaggaagcggtcgggaaactggccgacaagctcgccggcgaaccgatctgacttccgcccccaggacgccagcaccgacagggacacccgcgaggcccatgctcaatcttgccgccgccgccctcgctttcctggtcgccctggccgcgatcctcttcgggttgacccgcatcggcgtgttcctgatcgaacggcgccatccacccgtgggaaccttcgcaaccgtcaacggcacgcgcatgcacttcttgcacgtggccgcgccggagggcgcatcgctgccgccggtcgtcttcattcacggcgcgagcggcaacctgaacgatcccatgggaccgctgcgcccgcgcctggaaggcaaggcggaactgctgttcctcgaccgtccgggccacggatggtcgggtcgcggtccgtccgaaaacgccaccccggccggccaggcccgcaccattgcggcgctgatggaccacctcgggatcgccagggccatcatcgtcggccattcgttcggcggcggcatcacggcggccctggcgctggagcgccccgaaaaggtcgccggcctggtcttcgtttcggcggcgagtcatccctggccgggcggcaagacatcctggtactatccgatcgccgcgcgccccgttgtcggccgcctgttctcctacctcgtcgccctgccggccggcagcctgcgcatggcggccgggaccggatgcgtcttctcccccaatcccgcgccgccaggctattccggcacggcggccattccgctggtgctccggccggccaatttccgctacaacgccatcgacgtcgaagcgctttatccccacgtgctgaaggccgcgccgcgctatcccgccattgatgcgccgaccgtcgtcatttccggcgaccacgacaccgtggtctacgaggagatccactcggtcggactggcccgcgacattccgggcgcgaaactcgtctgggtgaagaacctcggtcacaagccggattacattgcgccggaactggttgccgcggccgttggcgccgtggcgggcgcgccgccagcccttctcggcgatgtcgatgcgctcgcccgcgaggccgagcagcgcatcgccgggcagaacttcggcccgtacgagaaatgcaaggacggcccgccgcccgccagcgccgccatgggcagccaggccgaataggcttccgctagcggagc

SEQ ID NO: 1026 - DNA, 14691 bp, synthetic construct
  misc_feature 1..14691: note = Synthetic
  source 1..14691: mol_type = other DNA
cattctttccctgctcgaaagccttagccattcgcttctgcattaagccgagtgctttttcttttgcttctttgtattcaaattgtgtaactttgaaattcgcctgcaattttttaatcagatcgtcagtgttataatttttcagatttccgacaagtctgtgcgtcggcagaacaacaagtccttcgttgtgcatatttacgaacgcaatcataagccattgagcgttcggattttttgtcagattaaaataattcaaagcggtttcataacggtgatggccgtcagcaatcaagccttccttctgcgtcatcatagttacgatttgtttgatttcatcctgcgcatcaatcgcgaaaatctgatgcttcacgccgtcatcatcaacaaattcgatgagagattttcctttggcggcctttgcaataattttgtctgcgacctgctgaacgtcatcgtagagcataaacacgagttcaaattgtgccgctgttgctgttgtaagtttcaacctgtcggccttggggccatcgagagttttttcgtgcggctgaacgccggagccgaactgtgcgagttttgaaagggcgataaatccgctgcgggtattttttttgccgccgatttcaaattcctgaacgtaggcgtaaattgtttctttgtcgtcctgtttaagagccttgttggctatccagtcgttgatatgtttgcctgcgcggacgtacttattgtttttgtcgttatcgccggcctcttctttgccgagaattacacgaacaatgttgtacggattctgtttataaagtttgttttgctgcgctgcgttgataacatcataaggcggcgcgatgcatttgccggcatcgccgacaacttcggagttaaatctgtaggctttaaatcccttaatttccattggttttaaatttccttcattatcactgataaaaatgctgctacgacagccgcgaatcttaccacaaggccttttatatttcaatatataaaaatataattccctaaaaattttatttcataggtatatttcacataatatatttaaatatatgtgaatattatcacaaaatattaaaaatacttacttctttatatccttaattatttacttcattcacctctatcgctaaaattgatgtgaacagtaggggcagacctgcgtgtctgcccaattgggcgaacacataggttcgcccctacagaaaaaacattaataatgtaaggagacttcaaaatgtattgcccgaaatgcggattggagaatcgtgttgatgaaaagctttgtatttcctgcggcacggcgttgccggtaattccggatttgccgccggagatttccaagacaagtaagctggccgtttggtcgtttgttctttcgcttttcggattatttacatttatggtaacggcgctgccggcaattatctgcggaatcgtcggccttgtaaaaatcagcaaaagcaacggccgtcttcgcggcaaaggttttgcaattacaggaattgttgtgccgtttttttatctaatctttatttgtattttaggaattattttggcggtaacgatccggccataagcaaagcaaggtcgaaagcgatgtctgcgatatgtgcaacaaatattagcggccttggaaaagctattatagtatatgctaacgaacataacgatacatatccatctgctgataattggtgtgataaacttatcaaagaatgtgatgtggactggagacaattttgcagtcctgcagatggtatggcagaaggcaaatcgagttatgctattaatatgtatattgcaggcaaaaaggtgtcagaagttccgccggataccgtgatactctttgagacaatccaggcaagtaatcctgtaggcgggcctgaaattataagcacaaaacatcatcatggcagtgggtgctacatatcatttgcagatggacatacaaaatttgtaaatacgcaggatttgcaatcacttcgcgggaagccggagtaaatcataaggcgaccccaaaaaacttgtcctcacgaaagcagggattgctttttcagtagggtgggctttagcccacgcggttttttaaagcatttgtatcgattttgatcgcccacaataatctggcattaagatatttaccttgtaaattgtaaaccatagtttacaaattgcagggtaaaattctcatgattttgcctatattaacaaaaaactgcggctaccaaaaaaacggtgccaggagtcatttttttactatttacccgtctgctgaatttttgcccattcatcgcgaagagttgcggtacgattgaaaatcaatttgctgctttggctgtcagggtcaacgcagaaatatcccattcgttcaaactgccatctgctcaatgcctttgcatctttcaaatatggttcaactttgcaatccacaagcgtcgtcaatgaattcgggttgagataatctgtaaactctttgccttcttcgacgtcatccggattttcttttgtgaacaaatgatcgtacattctcgcctcggcagttatcgcgttctttgcgcagacccagtgcagagtcgatttcacttttctgccgtccggagcgtcgccgccctttgtcgccggatcataagtgcaatgaatttctgtaatatttcctgccgcgtcttttgttacgctcgtgcaggtgataaaatacgcatagcgcagacgcacttcccgtcctggcgttaagcggaagaattttttcggagcgtcttccataaaatcatcgcgctcgatataaatttcgcgcgagaatggaatttttcttgtgccggctgccgggtcttcaggattatttatcgcttcgagatattcaacctgttcggcaggataattatcaatcacaactttcacaggattaagaaccgccattacgcgagcgcttgatttattcaattcctcgcgcaggcagtgctgaagcagcgcgaaatcaactgtgctgttaaatttattaacactgattttttcgcagaagtttctgattgctgccggcgaaaaacctctgcgtctcattccgctgattgtcggcatacgcgggtcgtcccagccggaaactaatttatcctgcacgagcttcagcagtttgcgtttgctcattaccgtataagtcagattcaaacgcgcgaactcgatttgctgcggatgataaatgccgagctgatcaagaaaccaatcatacaacggcctgtgattttcaaattcaagcgtgcaaatcgaatgcgtaattttttctactgaatcttcgagtccgtgcgcccaatcgtacatcggatagatgcaccatttgtcgccagtgcgatggtgtgtcgcgtgaacgatacggtacataataggatcgcgaagattaaagttcggcgatgccatatcgattttcgcgcggagagtttttgcgccatcgggaaattcgcccttgcgcattctctcgaacaggtcgagattttcttccacgcttctgtttctatatggactgtcgttgccggcttgagttggtgtgccgcgagtttgacggatttgttcaccagtcaaatcgcagacataagctttgccttttttgattagctcgactgcccaatcgtacatctgctgaaaataatctgacgcgaagaaaagattatcgccccaatcccagccgagccattgcacgtctgctttgatggagtcaacgtattcctgctcttctttttccgggttggtatcatcgaaacgaagatggcacttgccgctgaattcctttgcgataccgaaattaaggcagatgctttttgcgtgtccgatgtgcagatagccgttcggctccggcgggaaacgagtaacaacccgaccgtcccatttaccgctttggcaatcgtcggccactatttgacgtacgaaatccaatttttgctgattttcatttggcattgacatttttgtaaacctaagtcgttgttttttagagtcttacgaataagaaccgattataatcatcgtaatttagcagtcaagaacattaaaaaaggaaaattgcgtgcaaaattcacagattgttttaaaatgacgcacataattttaaaaggagctgaaaatatggcaaagggactggtagtttattattcaaaaagcggaaacactaaaaagatggcggaaatcatcgccaggtctatgaacgacaacggcttaccaaccgattgcaaatctgtggacaaggcttcggttgcggatatgaccgcggcagacgcgatagttatgggttcgccaacttattacggccagatggcgccgcagctaatgcaacttttgaccgattctgtaagtaaacatgggcaacttgccggcaaagtcggcggggcgttcgcaagttctgccaacatcggcggcggaaacgaaacaacaattctcggcattctcgaagcaatgctcatccacggaatgattatccccggcgaaccactcggcgaccattatggcccggtatcaatcaacagtccagaccagcgcgtggagtcgcaatgtgtcaaagcaggtaaaaaaatcgccggcttgacaatgaagttgtttaagtaaaattttgtaaagctaataataggttttttatactgaaaacgcggtttttggtttgacaaatgctttattagagtataaagtttcgtaaaaataaccatttattagaatggaggctatgactatgcaggaatacgaagaactcaaaagactcgttgaagaagctgacagcgatattaaaaaggccgaaggcggaaacaaagcagccggcacaagagttcgcaaacaaatgcagatgattaaacaggcagctcaaactgtcaggaacaaagttcttgaaatgagagtcgttgagtaataccaaatcaggtatattcaataatcgaatttaattctgcgttgcgcgggaagtattttcacgcatatccttgttttcgccgaggaggacaggggcgttctgacttgttcagcaaggaaaagtttgtccttagtaatttagtgaagtttattaacatattaagaaaggtaaataatgcctccagtacaactttttgatctatccacaatagatttaacaaagagagtctttgaaaaacctgctatcgaagaagtcaatccgcagcgatacgaaatgcagcaccttgacgggattatttggtataacaaggaaaaatttctcgttctcggttataaagacgttacggaaaatgaattttgggttcgcggccacattccgggcagaccgttaatgccgggcgtaattatgattgaagctgcagcacagctttcgagcgtttttgttaagagagtttacgaactcaaaggtttcatcggtttttcaagtatagatttcgcaaacttcagacgaactgttgagccgggtcaaagattatatttgcttggctatatatcagcgttcaagagccgaaaatatactgctgttgtgcagggtgtcgttgacggcaaaatggtcttcgatacgcagatctccggtatgaatgtctaatgaacaacagcctgaaagaaattttgggaaacagttttttgattgaaaataatataaaagacctgcccacatcggcgggtcttgttctttttacagatgcacaggattcgccaatcacgcttttaaccgcggcgaatataaggcggacagttaaaaataaactcgccgagcaaatcgaaaaaaccaaacgcacagatttaaaaagcatcacagcaaaaatttattattcagcaattcaatgtaaatttcgtctggcaatcgaacactacaaagccgtaaaaaaaatctttgcagataagtataaagattatattacgctggtctatccgtggtttcttgttgttaatttaaatgacaggattccgttttttacggtaactcgcaagccggcatttaaagctggtgagaaaattttagggccgttcccaacacaaaaatccgcaaccgcttttcaaacaacgcttgaggatatttttgcgctttgcagaaaacgcgaatttattaacaatccgcaaagctgttcatatttgcaaatggatgtctgctccggcgtgtgcgcagataaaatatctgttgaagaatatcaaaaattaatcaccgatgcttttaccgccggcacagaaccggatgaagcgattggtaaatttgaagagcagatgcagaccgcggccaaagaattaaattttgaaaaggccgctgcgctgaagaaaaaaattgataaactcacatcgttgaaaaaggccgcttacagatggacgagtgatttagaaaaattaaaaatcgttcacattgataaatcttttcaggttaaaccgcagggcgagaaaataaaaaaacaaacttatgccgttttcgcaatagatgcttttaatatcacagacctcggcgattttttaaccgagaacacagataacattacaacccaaacgcacagtttcaacaccatcgacagcgacacactggatagattcgcgatagttgcatattttttataccgcagcaaaccttcgggaatctggaaaatcgtaaaatagttattatgtcgaaatacgagatacgcttcacgagatatattttacagcgtttaccagccggcctgcatttgttcgacgattcgctcggctaatttattggccgcgactcgcgatgcgttttcaaagctttgtccctgaaactgtgaatagccccacgatgatgttacagaacaatcctgcacgatatattggccggtcttgagatttttccaattaaactctgccgtaacttccgcaaggtgttcaagcggtctgccggtatcgcggtcgagcgtaagtgccgagctgcccatactggttatctttccgctcaaaattgtgtcggcggtgtttctgttggacactattttatacggcgtatcaacttcgactctttttgcgattgcatctgtgagcgtgtattcaaggtcgcggtagaaagtcgtattgtcgaacatctcaacgtaaacggttctgatttcgtttgagtacagagactcgtttgaatagcctgcgcagccggagagcgagagcaaaaataaaaatgaaaaaataaaagataaaagagaccggagtccctgtgggacgacatccttaattttgatttttgatttttgatttttaatatttatcaaaggagcagtcctttcagtccgagttttttctttttcggcattttagattcgacgtctaatttttttatagtcggcagttttgtttccgcgatttttgccgcgttgctgcccggccactgggcggaaattttttcgtaataaattccagctgcgccatagctcaatgtccgttcgtaatattgagccaccgcgagttctttttcagccatattattttcaagttcaccgattttctgttccagcgcaagctgctgtgccgattccggatagcgttctatatactgcgtataatagcctttcgaaccttccagcggtttgctctcgaattttggtccgcgataatctttctcaagactccgcgccattccgagcagtgattctctgccgagttctcctgttggccagcgatttgccgccgccgaccaggcctgatacgcttcttcgtaagcgccgcgtttctcgtttgattgtgccagcgtcgtcatcgctcttttcgcgattggagcatcgccttctctgtcggcgatactattcataatctctgtgccttcgtcgtaggctttgactttgaaaattttcagaacagttcgtttttggccgccgagaaaagcagcaccgatttggaactcacgttccagtgccgcatcgcgaagagagctttccggatagttatcgagaaaatctgagtatgattttgccgcgtcagcgaatctgcgttttgcgtagagcagttcagctttgacataggcatcgtaatcttcgccgccgacctgcgggaaatttttcttcatatccgcgtacgcttttttcgctttgccggccttgccggtagcgacatactgtttggcctcagccgcgatattcgcgaacgagctttcgttgctgtctgttgacttctgccattgctgaccgcttccgagccgccaggtttcgccgatacagattaccgacacacacagaactgtcaacgcgattacgattttcctaagcatttgcaatactccattattcgacaagacattatatacaaagattttaaggttgcaaagcgtattttcattaatcgggtgcgcataaaaaaacccgtgattttttttcaaatcacgggcttttatttagcaaaatcgcttattcttgagcgtttggctcgtttttatcggcctgcggccttgttggtgcagccggtttgggcgttggaagctcgaaattatcgtttgggtcggtgaatttaatatcagcttcttttttaatctgctgaatgtagttgaccacaacttcctgtttttgctggttgctcaggtgctgggcaatcttttctttcgcttcgtccagacttaccgtcttggcttctttgcgttcgatcagcttaataatatgatagccgaattccgtttcgacaacatcgctgacctgatttggctcaagcgcgtaagctgccttttcaaacgccggcacgaaactgcctttcggagcatcgcccaggtcgccgccgtttttgccggacggacaagctgaatattcttttgccagctcttcaaagtttccgccgtctttgactttcttcagcacttcttcagcttttgctttggcgtcagctttagcctgatttggatcgttgccgtcagctggtttgatgagaatgtgttttgtgtgaattgattccggctctttaaactggtcgatgttttcatcgtagaacgctttaacagccgcatcgttggcttctttaattttgtttttgaattcgccttccatcagcttttcgaacatcagcttctttttcatattggattcgaactcggcgaaattcgtgccgtagttctttagaagtgctttaaactcatccaaattgaggttttgctgcttcatttgttcctgaacctgttcgttgacgtccgcctggctgacggtgatattctgtgccttttccttttgttcgagaatctcttcgataaccatttgttcgagcagacgttttctcatttgctgacgatactggtctttcatattcggcgggattctgcttgccagttgttcgagccttgcatcgagagttttatcgatttgaccggctgttatttttgttccattgactgttacgacaactgcatctgggtccattttcggctcgttaaattcaatgaccggcgctgtgggtgctgtgtgggttgctggtgctgcctgtataacaacatcagaatcaccagatgttttttctttggtatttgcgtcatatttggcggtcgcttttgtttcagcttccggcgttttttcttctttagcttttttctttgcgcacgcgaggttagccatcaacataactaccacaagcgagagcaatactttcttcaaaccgttcattatatttcctttcgtagaatctttttttatagtttacgcaagcgaacaagtatatctgcccgcccgaaaattaaaagataaatatggatattgagtgaaaattgtggagtaaaacaattatgaattatcgtttagcccccggaccggtgccgggggaataaaaaaaataaaattccacatcgtgtttagccgtcgtcgatacgacgacgcatcaggatccggaacgtcgaacgcgcataaaaaaggcgaggcctcttacgattcctcgccaggatgctccgtagagcggcctcactttcgcgagactgcctgcaacttttcttttgttatgaaaagcaacaggtcgggattagttacacgcccaccaacataaccattttttctggacaagtcaagtgtttatttgtataatccggctttcagagagacttttttaggaggtagtgatgcgatatgtattaggcctggacttagggccgtcgtcaattgggtgggcagcagtaaaattagataatgagggaaattacataggtttagcagatattcctaacggcaatgatttaacacctgcaataggtgtaagaatttttccagcaggcatcgaaaatataaatcaagggcaacgagaagaacccaaaaataaaaaacgaagggaagcgcggtctgtacgcaggatgttgagacgaagaagggcgagacgcttgaaactccttgttgccttgacagcaaataatttaatgccatcagatattaaaaaaaaggaggagattttaagtcaagacccgtataaacttcgcgataaggcagttagtgaaaaaataaatttgtttgatataggcagaattttcctacatattgccaaaagacgagggtttctgtcaaatcggaaacaaaccgaaaaagataaggatgccggattggtaaaagaagctatcgaacgacttgctaatgaatctggcaataaaacccttgggcaattttggtcagagaaactacgagaaaatcctttcgaggcaattcgcaacagacggagtaattaccattggatagcacagcgaatgcagtatgaatacgagttgaataaaatatgggacgttcaagcaaagttttatcctgacatattaaaagacaattttaaaaaacttttgtttgatattcttttcaaacaaatagattttgaattaagcaatttgaagaagcgcaaggtggtcggtacttgtactttaattgcaggtaaaccgcggttgtccatggcaagccgtaaagcacaagaattcagattgctacaaaaaataaacgatatgaaagtgtatcgcaaaggtaaggaaatacctttcgacaaagaaaaactatatcaggagttaatggtctcaagcaacagagattttaaacagattagaaagttgttagggcttgaagaagatgaccgtataaatcaggaacacagcaaaagtaataaattgattggcaatcagatagatgcgattttgtcaggcaataaattttttggcaaaaaggaatggttaaaactggatgaaacacaaaaagaaaatatttggaaagaaatacagcgttatataaacaacagtcgtattacgtctgaacaactgctgaaaaatataaaagagaaatatgaacttgagataaaagataaaaccgctattgagaagctttcagaaccccaaggcaatttaagttattgcgaacaggcaattgataaaattttaccatttatgagacagggaaagggtttgtatgagtccatagaagcggcaaaatttgtaaaaggttggacacaacaaaaaatgctgccccttccatcaagagaaaacggaataaatatccccaatccgatagtaacgacagttatgttccagttgcggaagattgtcaatgctttaattcgtgagataggcaagccggaaaaaattgtcattgaatttgcaagagatttaaaagcaagcaaagatttgcggaaagaaattattgaagaacaaaatgaaaatcaaaaggataaagaggattgtatcaaaagaatcagagaatatcacaagtgggatgaggatgtcaaagtttcaccagtggacgtattaaaatatcggttatggcagcaacaaaaggaagtttgcccatattctttgcggaaaatcggcatagaaaaacttttaagcacggaaacagaagtcgatcatattttgccatattcaatgagtcttgataattcaatgcacaacaagattgtatgctattccggcgaaaaccagaccaaaggtcaaaatacaccgatagactggcttggcgaaacaagtgaaaagtttaaaaaacttgccgatgcaatagataagggggagttcaattttgacaaggccaaaagagaaagattttttgtacacaatgaagaaattgccgaaagatatacacctgataggcttttgcaggacacatcatatatagcaagagaagtacgaagttatttgaagcgtttatattctgcaagtgattcagaaaaatgcgttaagacgaccaaaggtggtattacggctgaactccgaaatttatgggggttaaatgctattttaagagatggcgaacttgggccgaaaaatcgcgatgatttgagacaccatgccgtagatgcagcgatcatagctgttaccgaacctgggataattaaaaagataacagaaaaattgaaagacaactggccaaaacgtccaagccgagcaagagttgatgaaccttggaatggtttcggagttgaactggccaaagcgattgagaaaatcaatatttcacacaaggtacttcgcaaagtaaatggagcgttgcataaagagacaaattattggaaagaattaaatgaatgtcagcaaaaaggcaaatttattacacgaaaagaattaaacggcaactttacaaatagttgggcagagcaaatttgtgataatgtaataaagcaacttgtaaagaatagacttttagaatttggaaatgatcctaaaaaagcatttgcggaagataacccactgtaccttgagaatgaaaatggcaagccagttccaataagaaaagtaagagtgtggcaaacatcaagtaatatgatacaaattaggcctaatatttgggtggaaccaggttcgaaccatcatattgaaatatttgaaactaaagataaaaaaggaaatacgaaatacgaaggcgaattggttactacttttgaggcatataagcgaaaaatatcaggtgaaccaataattcaaatggaacatgaacctgataagaaatttattatgtcactttcacaaaacgagatgtttatattaaagcttgaggatggtttagaagttttacatagagtccaaaagatgagccaatccaagggcagtataagtttgattttcagacctcacacttatggcggggcgatgagcgactatgataaaccgcctttaatacaacgcaaatcaccaagtacattgtttggacgaaaggtaaccgttgacccattaggcagaatccgctgggcgaatgattaaaaaaataattgagatatcgcagcaacggactgctttatccattcggtatgggcaactcatattaaaaagagaagatggcgaaaactctataccctgcgaagacattggcattcttttagtcgataatccggcaactgtttatacccacagcgtttttacagaattattaaaagcaggtaccgccgttgtcctttgcggtaatgaccatctgccgatagggtgtttgcttcccatcgaaagcaatgttattcaaacgcagcgatgtttgcagcaaatcaaagcaaaagagccattgcgaaaaagtttgtggcagcagattatccgcgcgaaaataaaacatcaggcgaaaatcgtaaaagataacacaacaattcataaagcattgatggaattgataagtcaggttcgcagtggcgatgtttcaaatgtcgaggcacgagcaagcaaagtattttggggcgcatatttgcagggcttggaattcaggcgcgacgccgaaggtaagccgccgaacaatttgttgaactatggctatatggtagtgcgcgcggccgttgcgcgtgcgatttgcagcgcaggacttttgccatcggttggtcttcatcacaaaaataaatataatccgttttgtcttgcggatgatttagttgagccgttcagaggatatgttgaaataaaagtcagggaagttgtcgcagccggcgattgggaagaactaacgcagccgattaaagcgaaactgttggaggtattgtatgaagaagttgaaattgccgattataaaggcccgctgatggtcggcctgcacaggacagccgcgtcattagtccgatgttttaacggagaacaaaaagaaattgagttgccggtactttagccacaaaggcgctaagacactaaatatgtcattcccgcgaaagcgggaatccagttatatatatttaactttgtgccttcgtggcttggtggctatgaaaaatttatgataattagcggatatagagcggtgtggatatttgcaatgtttgatttgccgacggatacggaaaaggcacgaaaagattatacgcattttcgtaaaaatcttttgaaagatggctttgcaatgatacaatactcagtgtatgcaaggcactgtgcaagtgaggaaaacgcagatgttcattaccgcagaatacagaactttttaccgccggatggcgaagtccggcttattacgctcactgataaacagtttgaaagaatgcgcattttctggggaaaaatgcgaaaaccagcccctcctgcgccaaaacaactcgaattattttagagtcattttgacgcaagtcctttttcaacagcaggtaacggaaaatgtagtgtaactaatcccgacctgatgtcaatccacaacgactttaacatctattatacgtttgaatatagtgtaactaatcccgacctgatgtcaatccacaacaagctaaccccctttgatttgaatattaaaagtgtaactaatcccgacctgatgtcaatccacaacaacaccccaattatggttgccttttggtatagtgtaactaatccaaaaggcaaccataattggggtgttgttg

SEQ ID NO: 1027 - DNA, 13552 bp, synthetic construct
  source 1..13552: mol_type = other DNA
  misc_feature 1..13552: note = Synthetic
ttcggattagttcgttgttcatagttcatagttggtcggtcgaaggtttttgccgctcgtggctggtgactcgtgtgtcgtgagggattggattagacgaagagtttgctttgggcctgggcgattaggcggtcacggagagcaagttttgttttgacgggaattgcagttttggatattgtggagggcataaaaaagagacgcgccctcccgaaggattgcgcgtcaggttgctccgtagagcacgttcctgctttttcaagcggaactgccttcgacttttctcttgttatgacaagtctcaggcgcggatcagttataattacctaaaattaaacagatttcccttgaaatgtcaagctttttttggcaaaataaataaaaatatcggaggcagttaaagacacatacgaacagaaagggtttaatatgcgctacgtattgggtcttgatttggggccttcgtctatcggctgggcagccgtaaaagcagacgaaaaaggggatttttgtggtctggcaacaataaaggacggcaataacaacatccctgcaatcggtgtaagaatctttccggcgggcgttgataacataaatcagggacaacgcgaggaatccaaaaacaaaaaacgaagagaggcacggtctgtaagacggatgctccggcgaaggcgggcaagaagatcacaacttatttcagtccttataacaaacggccttatgcccacaaacgatgcggagagggaacaagagcaagacaaagacccttatgaattaagagccaaagccattagtaaaaaattatcgttatatgagtttggcagaatatttcttcacatcgcaaaaaggcgagggtttcaatctaaccgacgacaagcggaaaaagatacagaggctggacttgtgaaagaagcaattgaacgtcttacacagcaaattggcaacaaaacactcgggcaattttgggcagacaaactgagagaaaatccactacaggctatccgcaacaggagaggcgattatcactggatagcacaaagacaacaatatcaaaatgaattaaacgcaatttggcaagcacagtctaagttttatccgaacgttcttacgtcctctctaaaagagaaaatatttgaaatcattttcaaacaaataaattttgaactgagcaatacgaaaaagagaaaggtaatcggcacctgcactttgattgccggaaagccaaggctatctatgtcaagccgaaaggcccaagagtatcggttactacaaaaagttaacgatttgaaaatttatcgaaaaggtacagaagtcgaatttgaccgaaagaaattgtatgaagaactaatgatatcaagagaacgaaacttcaaacaaatcagaaaactgctcgatctgaacgatgatgacagaataaacctcgaatacaaaaaaagtaaaaagctaataggaaaccagatagatggtctgttggccagcaataaatttttcggcaaaaaagtatggattgttttaagtgaacagaaaaaagaggtagtctgggatgagattcagcaatatctgcgaaatagcaatataacgggtgaacagattgcaggaaaaattaaaaatgaatatggacttaaaattggggatataaacgccttagaaaagctgacagagcctaagggcaacataaatttctgtgaggaagccgttgacaagatactaccttatatgagggagggaagagacttatacgaagcgattgaaaaggcaaattttgcaaaaggatggacacaacagaaatttctgccgcttccctccagagataatggcatcaatataccgaatccgatagtaacaacagttttatttcagcttcgaaaaatcttaaatgctttgattagggaacttagcaggccggaaaaaatcatagtggaattcgcacgagaattaaaagcaagcaaagacttccgcgaagaaattgttgaggagcaggcggaaaatcaaagtaagcgggaagaatgtataaaacgtatcaaagagtaccatcgttgggacgaagatgtggaagtttcagcaacagacatactgaaatatcggctgtgggagcagcagaaggaatattgcgcatattcctacccatacaggaacatttccattgggcagcttttgagtacagatacagaggttgaccatattctgccgtattcgatgagtctcgacaattcaatgaacaataaagttgtgtgttttgcaaatgaaaaccaagcaaaaggtcaaaattcacctattgactggcttggcgaaacaagcgaacgcttcaaaaaaattgccgaggcaatagaaaaagggatgttcgattttgacaaggcaaaaaaagaaagattttttgttcataatgaagaaatagcagaaaaatatacgcctgatagactcttgcaggatacatcatatatagcaagagaagtaagaagctacttgaaacgcttgtatcccgcaagcgaagcggaaaaatgtgtcaagacaacaaagggcgggataacggctgaactcagaaatatatggggcctaaatgcgattttgcgtgaaggtgaagtaggaccaaagaaacgcgacgatttgcgtcatcatgcaatagatgcagcggtaatcgctattactgagccgggaataattaaaaagattacagacaagctacaaaaaaactggccgcgaagaccgagtcggacagttgttgatgagccgtggaacgatttcggaccggaattggcaaaggcaaccgagaaggtcaatatttcgcacagggtgcttcgtaaggtaaaaggagcacttcataaggagacaaattactggaaggaaactaatggtccgcaggccggaaaatttataactcgcaaggcactggatggtaaatttacagacgattgggcagaacaaatctgcgacgaaacaatcaaaaaccttgtaaaggaaagacttgtacagaacgaaaatgacccaaagaaggcatttaaggttaaggaacctttgtatctgccgaacaaaaaaggcaaccctataccaatcaaaaaagtaagagtctggcaaacttcaaatacaatggttcagttaagaccttatatttggactgaaccgggttccaatcatcacgtcgaaatattcagggtaaaagatgagggtaaatacaaaaataaacttgttaagaaaatctggactacatgggaaacatcacaacgaatcaagaaatactgtctgaggaacaatgataacaaaataccgaatcttatcattacgcaggaaaatccttatccagaacagtttaaaaacgtggaatttataatgtctctatcagcaggagaaactgtaaaaatgatagacagacaaggaaaagaagtcctgtcaagggtcataaaaatgtctggagacaaggattctacaacaagtattgatattctattttggaaagtacaagctgcaaaagtcgagggcaagataaaccagcaaacaccaaatgtttataggataactacactccaagatttcgataaattgaaaatgcaaaaagttacagtagaccccttaggcagaatacgatgggcgaatgattaagcgtattgtcgaaatttcatcggcaaggacgcaactttcaattcgatacagtcaattgataatcagggaggaagggcgggaggtaggaagtatcccttgcgaagatataggggtcttgcttattgaccatcagggaactacttacacacattcggtctttacagagttacttcggtgcggggcggcggtagttctatgcggagggaatcatcagccgacagggatgctgctgccaatcgagagcaacagtatgcagacggagagatttcggcagcagatagaagcaaaagagccggtaaaaaagagattgtggaggcagattgtccgggcaaagataaaacatcaggccaaattggtcggcaaggacagcgatgtttatccggttttaatggctttgcgggagagggtacgaagcggtgaccctgagaatatagaagcgcaggcgagcaagaaattctggcctgtgtatgtgcaggatattatttctgagtttcacagggacatcgagggcaggccgccgaataatatgctcaactacggctatatggtgatgcgggcggcggttgcacgggcgctatgttcggcggggctgcttccctgtcttgggattcatcatcgcaaccgctacaatgcgttttgtcttgcagatgatatgttagagccatttcggggatttgtggagcataaggtgcgagatgtatgcaagacaaatggtgtgccggatgagcttacacagccggttaaggcccggcttttagcggtgctatatgagccggtaacaatcacgggtttcgaggggcctttaatggtcggcctgcatcggacaatggcgtcgctgcaaagatgttttgcgggagagcagaaggagctggatttgcctaagatatgattttgagcagttacagagcgatgtggattttcgcgatgtttgatttgccgacagacacaaaaaaggcgaggaaagactatacctattttcgcaaaaatttgttgaaagatggctttagcatgctacaatattcggtgtatgtcaggcactgtgcgagcgaggaaaatgcagatgtacactatggaagggtcaagaattttttgcctcctgatggggaggttcggcttgttggtatcaccgataagcaattcgggcggatggagactttctggggaaaattgcggaaaccgcctgctgttcagccgagacagctcgaattattttgaaaaatttagccgcaaacccttaacagcgaagggtttgcggcccacctattataactgatccgcgtccgagtgcaagccacaaccttagcgatattgtatccgcgggagagacattataactgatccgcgtccgagtgcaagccacaacctaccgcggtaatagccgcgatgcgtgccaattataactgatccgcgtccgagtgcaagccacaacgtcagcaggtcatagagaatcttcaaggatattataactgatccgcgtccgagtgcaagccacaacgccccggcgttgtcgtcaacgccgccgagcattataactgatccgcgtccgagtgcaagccacaaccgaagacccagccgcgaacagtaagctggtattataactgatccgcgtccgagtgcaagccacaaccgagaacgtgggcacttatgccggcaccgtattataactgatccgcgtccgagtgcaagccacaacacataccatccgtgtaagaaaagggttcacattataactgatccgcgtccgagtgcaagccacaaccgagctcggtgatggccataccttccgggaattataactgatccgcgtccgagtgcaagccacaacgcagcagtgacggccgtaccgttgtgcgtaattataactgatccgcgtccgagtgcaagccacaactcgagaatatcgtgggcgaactgcttgtcgattataactgatccgcgtccgagtgcaagccacaacaaaagctcgattatataaatcagggggcacattataactgatccgcgtccgagtgcaagccacaacacataagcccaagctccctgtaagacggctattataactgatccgcgtccgagtgcaagccacaacgtaggtctagtgcggccggcggcttggaggattataactgatccgcgtccgagtgcaagccacaacaaattccatattctctcgacccataaatcaattataactgatccgcgtccgagtgcaagccacaacaggcattgtggaagggtgaaattgcattgaattataactgatccgcgtccgagtgcaagccacaacgcgtcgtgtgcccgaccgatgccgaccaaattataactgatccgcgtccgagtgcaagccacaactaagtaatgccgaatcacgacttacgaactattataactgatccgcgtccgagtgcaagccacaacagccctcgcagtctgtcggcaccttcgatcattataactgatccgcgtccgagtgcaagccacaacccgttgacagcggccacgcccgaacgcagattataactgatccgcgtccgagtgcaagccacaacgcccgctgttgtgatagactcaatagggatattataactgatccgcgtccgagtgcaagccacaactggccattgactgtgttgcacaaaaaacatattataactgatccgagtccgagtgcaagccacaacgatagagtccttgtctatcgtgccagtgctccaacagccgctttgttatgccggttacacccgggtagttattctctcgccacgtttttactcgcgggcggatttgattaacaagtgggagcggcacaaaaatcccagggtcatcaaaagatttagactcaggcgtagcagttacgtaaccggcagggcgtcggccctgtcttttttcaaagcttctggtttggcggtcgtagtgccagtggagttttggctcctcaaatggcgaattgattatcaaatggtcgattttttcctggctcatctgccttctttcaacagttttctatcctgcggggtctggaggtaattttgctttgagacgatacgtttgcctgttttcgattcgaggtcttttctggcctttcctgcgactccgccaccttcgtgagctgcgccttttgcctcgaggaatccttgagcattttttgtgcgtgtgatttcggttgtggctgcctcgcctaacattgagaaaatcaactcaaggtcgttgaaatggtcgcggaggttctcgcgtttgaggcctttcaggcgtttatactgggatggtgtcaggccgaatgtggcctttgagatttcagcggtaaggattgcatattcggcgtcctctttgacgcggcgttttttccattcatcggtaagctcttctctgatagctatacctctcatacgcttttcaatccagttgtcggagtagcccttggccttatacagtgcacgggttctttttgtagcgagttcggggtcttctatttcctggatgcgctcatagccgacccttgccagccagcgtttgaagggttcagctttgggagaaggtatggtttgaataatgcgaaagacggtttcggtatccgcacaatcggtcaggcgcaacttgccgtcaggcgcctgcaatttcaactgtccgattttttcggacacttcatcataaccttcttttatgagctttttcttcaaatcactccaatacttgcggggtctttcgtttcctgtcagggcttcgataatatcaattatcgagaaccaccactggttgttatgaatggtctttcgaacttccttgcccctaaatactgctatttttgttgtttccatagtgtgattactccaggtcgaggatgcggagggactcaatgcctctgtcgtcaatgattttgacggcgatgcgcttgttatcgcctgcggcaaagggaagcgagacagttccgcgatatgcttcgataaggtcagggtcgatttcggctttgagatttctggctaatcttgcccagccctggtcttcatctgccattgggaaaaagacctgtcggggatagacgcttctgccgtcataatcggtatcgagcatccacattgcgattttttctgtgccgccggattcgatattgccggtccgcgtgttgtagtaatcaaagcccagcacctcgactttgtatttaccggcaccttcgccttctttgattttttcgagctttatgtctggctggccgatgagccagaaggactcgttgctggagcgtttctttttgaggtcgtcggtgaggaggtcggcgttcatctgcgcctttagcagcgttacacccggccaatcggtttcgtcaatgtctttggcggcctcggggtcgaactgaaacgcggcaaagacaagtaacttgggcttcggcacgagtgtataggcttcctgaatggcgaactgtacttggtttttctccataggtgcatgttctgggccgaaagataggaccaccctttggggtttatcttcttttgtttcagcatctgcgtgaagccagcgggttccgcctacgggttcgacacgggagaattcgattttttggccgcctttgccgcgtatgccggttttgagaagttcgtcacgccattcggcctggcgtaatgtttcgccgctgcgcacaatagaggcgtcgggggcaagcggagtctggattcccgcctgcgcgggaatgacaggaggcgttgcgggtggagagtcgaggaggggtttgacgacttgtgcggggacggcctcaactgtgaacgggcctgtgacgcgggccttggaattatctatgtatggctggttatagagagtttcttcgccgggcggttcgttgttggcgatggacttcagcgtaacgtgggggacggttttgtatttgaagccgctggcgacgccttcgctttcgtgggcaagctcgtagtaatcaaaaagaggcgtcataagccgctgctttgcaagggtgagcgccacacgggacgtatcgcaggtgagccagcgtctgccccactgctcagcgacgtaagccgtcgtcccgctgccgcaggtcgggtcaaaaactaaatcgccggggtcggtgcaaagaagcatgcagcgttgaattactttttcggctgtttgtacaacaaaaaccttttctgttctcattaacaaatcgagccagatatcagtaataggaatcaaagggaaatcatcaagatatagtacataagcaagatttttcccggtagtcatgagcctattcttttgaataagtcgattcataccttcaggatgtgatgcccaagctctgcctggaggtggataataagttttcccttcaaattctaatgcatcacctgtacgatctgttgcagacattgagcatggattactcattttaaaaggacgccacccggcaggaataagattaggatttttcttttcatctgtagaaagaggtcttctcgtttttccatctggcgattcaatttggtcatatcgcattccagtggtttctcctacaccgctctctttttcttcaaataatttacggaacttatggcattctatattttttgcgtaccaaagaattgcatcatatgagtgttccatcttgctgactgtgagaccgcttttctttttgaatacaatttgatttataaaattttcggatttgaaaatttcatctatcaattctcgcacaaggtggacgttttcgtctgagatttggacgaagcaggagccggattctgtcagaagttcttttgccaaaagcaggcggtcgcgcagataagtcagatatgaatgaatccccaattcccatgtatctcggaatgccttaatcatttcgggctcggcgatcaggtcttcgtctttgccgtctttgacatcacgtttatttatgaagggctgaaagttagagccgtatttgatgccgtaaggcgggtcgatgtaaatcatctggacctgtccggccagaccttctttttctaaaagtgagttcattactaaaagcgaatcgcctgcgatgaggcgattagaccagttgtgggcgtgcttgtagaattgtatcgcatcccgcaaggggggattttcttcaagagaatcgaaaagccccggctgatagagcgggccatttctctttcttaccgcctcgatgattgtctttgggtctattcgctcgtggacgtggagggaaacggtggggacttcaaaggaggtgtgctctgcttttcctgcccagactaactgtgggtcaagatgttcgtcatactgatattttgtcttcttgccagattccgggtcggtctgcggcgtaaccaatcccaccggagggttattgaggcgttttttgtccttatggtcgtattgttcgatgggttttttgcgctgctctttgtatttggccataactatccctcaggaaaataaaggatattataaaggaattctggggcgagggcaagaagatttcggattgcggattgcagatttgtcgattgatggagattgccacggcctgcttcgcaggcctctgcgctcgggacaggctcttcaattgattatttagagattgccgcgctgcgctcggaatgacattctaatttacaatttgcgatttacgatttacgattgacatattcgtattgcggggtgcgtattgcgttgtcgtgccgacaacggctaaactggattcccgcccattcgactacgctcagggtaaactatcgggcctcgcaatgataaggatggggaataatgaatgtagaatgtagaattgagaagacaggagacagcagtcaggaggcacagaggaaataacgaatatcgaattttgaataacgaataacgaaggaaaaagagcaggcacagagggtcaaaggcacaaaggcacagaggcagaagacagaaggacataagactcaagacataagactcaagacggaaggcgaaatggcgggaagggtttatataggaatagcggggtggtcgtatccggattggaaagggattgtatatgccgggtcgaaaatcgaccagcttaaatatgtaagcagatttgtagattgtgtggaaatcaacaatactttttaccggccaccttctgagaaggtcacgaagctatggctggaaagtatctccggaaggccggggtttttctttacggcaaaactgcatcgggatttcagccatgaaggcaagattgatgctgaaatggtaaaggagtttcatcagggatttgggccgatgttagaggcggataagttaaaacatttattagctcaattcagatatgactttgctgacagcacggacaaccgggagcatctggccagaatagcagagtgtttttgcggtgcgtttggtctggcggtggaggtaaggcataaatcgtggcaagaagagagtgccttgaggttcttagaggagcttggcgtttcggtctgcaatcttgattatccaacgacctggaattcatttgatatgcagtactgcacggtgggcaggaatgggtatttcaggatgcacggcagaaatcaggaaaaatggttcagcaaggcaggcagaaatgaaatctacgattactattacaatagtgcggagcttgccggtataaaggaaagaattgatagattggcaagggccttcgagacacttacggtcattgccaataatcactttcgaggcgctgaacttgccaatgctatcgaattgaaggcattacttagcggtgagaaacagcttgttcctgaaggtcttttgagcgtttatccgaatctggcggcaattgcctgcggagcaggatgaggataatatctaacactacaacgccattcactacgaaaacaaagacggttcaaaatccgaagcacgaaatcctaaattcgaaacaaatccaaaattcgaaattcaaatgaccaaaacatcggcaggcctatgtatggttttgttttggaccttcgcactccggccattcaaggttgtcttgaatttcgaccttcagattttgagttttactccttgtataacagcgagctgtaaccttttgcaaatcgcaaactgttgcaatagtactaagagcttttcaaaaagcccttccttataaggcgctgctcggcgaaaaagagggttgaatcctccggtattttattgagtcccaggacctctcgcagttcgggggaatcttcgagaaggccgataataccgcggaaatcagtcttgagagaccggcgtaaggtcaggattgcaaacaactgatgctgtgtaaaatccctgctggcgaagggatgagcatacagggggatagattcctttgctatgcgaagggcctggcgggcgagagccaccggcgatttggtcatttttacttctgcaggcatacgatataaatcggctaaagcggggtgaaaaatcaaatgttattagaagcgacccgccgtgaaacggcgggctaaatacaacttaatcagttcttgctttgcgggggaagggggaggtttagttcggcgaggacttttttcatatcttcccagacatagcggcggttctcatcggagtagtttcgcaatagatatgcgggatggaaggttgccataagcttaagaggcggtcggccaatgccggcatagtattcgtggaactggccacgcaattggccgatggacctggtggtatttaacagcattctggctgcgtgagcaccgagtgctacaataacatcgggattgattgcctcaatctgcctttgaagatacggcagacagcttatcatttcatccggacgagggtcgcgattttcgggcggtcggcatttgaggatattgcatataaagatatcgctgcgttttaagccacaggcggcgattatcttatcgagcaatcggccggctcttccgacgaagggacggccctgggcatcttcatcggcaccgggtgcttcgccgacaaacattatgcgggcttttggactgccttcgccgggaacggcgttggttcgagttgacccaaggtcgcatttgcggcattggcgaacttcatcggcgattttttcaagctcctctgccgaggcggtgacatcgggagcatcgctctggcgctttggttcgaggactctctgttcacccttaacagcaaagccagcgaagaactgctccatttcgagatgctgtcgaacgactttgttgatgtccacatccttttccatcgggataaattgtaattctatttttgaggtaaggcaataaaaagggcgcttctcagaaaaggaagcgcccttctgggatttgaggatagtcgcttttagacaaggccctgggcgagcatcgcgttggcgactttgatgaagccggcgatgtttgcgccagtgacgaagttgccggggcagccatattcttcggctgcctggctggcacttttgtagattgttgtcataatgattttcaattcggcatctgctttctcgaaagtccaggggatgcgctgactattttgtgccatttcgaggcccgaaacggcgactccgccggcgtttgaagctttgccaggcagaaacagaaccttgttggcgtggaacacatcgacagcttccggagtgcagggcatattggcaccttcagcaacggcaatacagccgtttttgacgagagcttttgcagcggcttcgtcaagctcattctgtgtcgcacagggaagggcgatgtcacacttgacattccaaacgccactgcaaccctcggtgtatttagcctttttatggattgcaacatactcttttatgcgttttcgttctacttctttgatttgcttgacggtatcgagcttaacgccatcggggtcgtaaatgaaaccgttggagtcgctcattgtaacgacctttccgccgagctgctggactttttgggcggcataaatggcgacattacctgcacctgatatggcaacggtcataccatcaaagcttttgcctttggcctttaac

SEQ ID NO: 1028 - DNA, 8418 bp, synthetic construct
  misc_feature 1..8418: note = Synthetic
  source 1..8418: mol_type = other DNA
ggtctgtcaaatacaagctgccttttttaatccgctcatatttggcatgggtggattcttcttcggcttgtttggccttctgagcttcttcctcagccgtagctgtggtggcatcggacttttgctgttctggtacattccctcgacttcgctcgggatggtgagcctgtcgaaccattacattggaattcgcttgttcgtcggcagcttgttcttcaacgacagcctttttctttgtgcttttatattttcttgttgtttttgcagaggctttagccatgattactccttttttttcatttgccaaacatctatgatttacttaggtaaccttcccataggaattcaacaggacttgaattttgaacacttgtccgccatagccttggcgacggcggagtagaaataaaacttatatatcaaaacgggcattactaacgcaagcactctatgataaaccccgcttacccatatataccagagaagatatcagtgacttgcccggccaatgccgagaagccagaattgttatcgatgatattatcggcgatgcttttcttgttgtccagagaaatctgaaaattttctctaatttttagctgatttttgctgaaaatgcccattttttttattctttcgacccttaattgctgtttgcactcgacaaaaatgagtttgtcgcaccgtttggcccagccgacttccaccaaaaggggcatatccagcacgattgccttgacctgattttggcgatttccttgctttataagctcctcagcccgtttgagtacaagaggatggattatcttgttaagtgctgaaagcttgtcagcatcagcaaaaacaatatttgccaattttttgtggtcaattttccctgcggaatctaatataaccttgccaaatgatgcaaccattttgttttttacgaggggcttatcgagcagttcgtgggcaattttgtcggcgtcgattacctcacagcctaatttggcaaactcggctgcaacggtgcttttgcccgagccgaccccgcctaaaatccctattattggctttttcttggatttgttcacggttccgtagcttaaacgctattcgaaaatatgtcaagtaattcgtcactagtctctcgtcgctcgtcactcgttgttggtaaaataagtaagatgggtaatttgggatagcaccaaacgcgcaagttcgtgtttgaaaacggttaaaaagtgagaaaatttgcgaaaaattgcgaaaaatgtatagaaaagtgagaaaaatgtatagaaacggttgaaaatattcgaaagttttgcaccccccctgcgcatttgattgaaattcctgtgaaccacggattgcacggattacactgatttttttgacgcagattgcgcgggaaattttgccgttgtaaaaatggcgatttcgtcgggggaagaatttcagtatgtggcaatgccatatagcgcagaaaagtatattagtatatgcgtatatgcgtacatactaatgtagtgatttaagaatcggtgatttttaagtgagggatttgagaagttggttttttttagacaagatgaaagagatccctcggctgcgcttccgccttcgccaaggcttccgacttcgtcccgatataagacattgggactacggacggacaggcaaaggaaaattggacgcagatttcgcagattgcgcggtgctggcgaggccgaccgccgaaggcggagaggataaaaaaccgaaagtatattagtatatgcgtatatactaatataccgctttaggagtcatggttttttaagtgagggattttaaaaggggattttttagacgcagattaacgctgattactcagggaggttttgtagaagtatattagtatatgcatatatactaatgtaatgctttaagaagtgtggatttttgaatgagggatttgagaatggggttttttggacgatagcagtttagtcgctggtcgttagtcgatagttggaggaatccggcaaagccggtttgccgagacaagtcggcgagacaggcgaagaaaaattagacacgaattcacacgaatggacacaaattttttagacgctgattacgcagaaagttcagccaaaggttgcctaaattaacagggggtttttgggtacgaatcagttcaaaagggaataaaaaaggcgaggcctctttcgattcctcgccaggatgctccgtagagctgccccgccttttgggcgggactgcctgcaacttttcttttgttatgaaaagttcaggtcgggattagttacactatcggtactataaacttttttgtggacaagtcaagtattttttgtataattttgtgctaaatgacaaaggaaaaacaatctattttgaggtgaggaattttgccatgtcatcatgtcattatgtactcggccttgatttggggccaagctctatcggctgggcggttgtaaaaacagatgaaaagggggatttttgcggtttggccgccataaaagacagcaacaacaatattcctgctattggggcaaggatttttcccgcagggattgataacataaaccaagggcaacgcgaggaaccaaaaaacaaaaaaagacgggaagcaaggtccgttaggcgtatgctccggcgaaggcgagcaaggaaactaaaactcctttcagttcttactgcaaacaaacttatgccggtgggtgataaagaaagagaatatgaactaaacaaaaatccttacgagttaagagcaaaagcactctgtgaaaaaacgtcattgtttgaagtgggcagagtatttcttcacattgcgaaaagacgtggtttccaatcaaatcgacgacaagcagaaaaagatgcagaagcaggtttggtaaaagaagccattgaacgtcttgcacaagaaatcggcgataaaactctggggcaattctgggcggcaaaacacccaaaacccggagaaattccgttggaggctatccgcaacagaagaagcaactatcactggatagcacaaaggcaacaataccgagatgaattaaacagaatttggcaaaagcaatctgagttttatccgaaaattctcacaaacaagttaaaagaacaaatttctgaaattattttcagacaaatagattttgaactgagcaatatgaaaaagaggaaggtgataggcacctgtactttgattgcaggaaagccgagactttctatgtcgaatcggaaagcacaggaatttcgactgctgcaaaaagtcaatgatatgaaagtttttcgtaagggcagagaaatccgattcgaccggcaaaaattatatgaagagttaatgatatcaaaagatcgcgatttcaagcaaatcaggaaattacttggtctaaatgaagatgacaggataaatctcgagtacaaaaagagcaaaaaattaattggcaatcagatagatggaatgttgaccggcaataagtttttcggcaaaaaaacgtgggtgcccttaaatgaacagcaaaaggaagcggtctggaacgaacttcaacaatatctacggaacagcaatatatcggctgaacagattgcggaaaaactcaaaaatgaatacggtcttaaagtcggggatatggccgcattagaaaagctctcagagccaaaaggcaatttaaatttttgtgaggaagctgttaacaaattgctgccgtatatgagggaaggaaaagacttatacgaagcgattgaaaaagcaaattttgtaaaaggttggacacagcagaattttttgccgcttccttcaaaagacaatggtatcaacatatcgaatccgatagtaacgacagttatgtttcaactccgaaaaattgtcaatgctctggttaaagaacttggcaaaccgggaaaaatcgtaatagaatttgcacgcgaattaaaagcaagcaaagaccttcgcaaagaaatcgtcgaggagcaggcgataaatcaagatgagcgagaacgatgtacacaacgaatcagagaatatcatcgctgggacgaagatgtgcaggtgccagcgacagacatactgaaatatcgcctgtgggaacgacaaaaggaattttgtccgtattctttgataaaaatcggggtagaaaagcttttgagtacagaaacagaagttgaccatattctgccatactcgatgagccttgacaattcgatgaataataaagtcgtatgctttgcccgcgaaaatcaggcaaaaggtcaaaacacgcctattgattggcttggcgaaacgagcgaacgctttataaagattaccgatgcaatggaaaaaggaatgttcgatttcgacaaggcaaaaagggaaagattttttgttcacaacgaagaaatagcggaaaaatatacgcctgacagacttttacaagatacgtcatatatagcaagagaagtaagaagttatctgaagcgtttgtatccggcaagcgaagcggaaaaatgtgttaagacaacaaagggcggaataacggctgaattaagaaatatatggggattaaacgccattttacgagacggtgaattgggaccgaagaaacgcgacgatttgcgtcatcatgcgatagatgcagcagtaattgccattactgaaccgggaatgattaaaaagataacagataggctgcaaaataactggccgcgaagaccaagccgaacagctgtcgatgagccgtggaatggctttgggctggaacttgcaagagcagccgagaagataaatgtttcgcacaaggttcttcgtaaaattaaaggggcattgcacaaagaaacaaattactggaaagaaatcaacggaaaacatgcgggcaaatatataacacgaaaagaattaaacggcaattttacaaataattgggcagagcaaatctgcgatgaagaaattaaaagacttgtgaaggataggcttgctgagtatgaaaatgacgcaaagaaagcatttgccgaacctttatatctgccaaatgacaaagacaaacaaataccaataagaaaagtaagggtctggcaaacatcaagcaatatgatgcagctaaggcctaatatctgggtagagcccggatcgaaccatcacgttgaagtgtttgaaacgaaagacaaaaaaggcgaactcaaatatgaaggcaaactgattagtatgtatgaagctgctcaaagtattaaaaacaaacaaccaataattcaaacaaatctgggatcagataagaaattttttatgtctctttcacagaatgaaatgattttactaaaacttgaagatggttctgaagtattgcatcgtacgcaaaaaatgagtcaatccaaagagagtatcagcatcattttcagacctcatacttatggcggcaagctcagcgactatgacaaaccaccgcttattcaacgcaggtcgccaagcactcttattggacgaaaagttgtagttgacccgttaggcagaatacgttgggcgaatgattaaaaagatagtggagatatcgcgggaaaggacatctctatcaataaaatatgggcaactgctcgtaaagcaagacggtcaacaggcaaattctatcccctgtgaagacatcggcgttcttttggttgataatcaggcgacaaattacactcattcagtttttacggaactccttaaatatggcgcagccgttgttttatgcgatggcagtcatctaccaacagggatgcttttgccgatagaaagcaattcaatccagactgagagatacgcacaacagattacagtaaaagagccgattaaaaagaaattctggcagcagatagtccgtgcgaaaatcagacatcaggcaaaacttgtcaaagacgatgctgaaacatataaaattctgaccgcgatgattagcaaagttcgcagcggagacccggataatatcgaggcacaggcaagcagaagattctggcaagcttatatacaaggaattggttcgacaagcttaacattagcggattttcggcgcgacgcggagggaaagccaccgaataatcttttgaattatggctatatggtagtgcgtgcggcggtagcaagggcaatatgctcggcagggcttttgccttctgtcggacttcatcatcgaaacagatataacgcattttgtcttgcagatgatttagtcgaaccgttcagaggatttgtcgaggcaaaggtaaaagagattgtccaaagcggagaagattacgaggaattaacgcaggcgataaaagcgagattgcttgaagtgctttatgaagaagtagaaattgccggttttaagggaccgctaatggtcgggctgcacaggacggcagcatcgcttatgaggtgttttgcaggtgagcagaaagaaattgatttaccaaagatatgttaataagcgggtacagggttgtgtggattgtagcaatgtttgatttaccgacggatacggaaaaggcgagaaaagattatacgcattttcgaaaaaatcttttaaaagacggctttgctatgatacaatactcggtatatgcaaggcactgtgcaagtgaggaaaacgccgatgttcattaccgcaggatacagatttttttgccgccggatggcgaggttcgactggttacaatcacggacaaacagtttgaaaagatgcagattttctgggggaaaatgcgaaaaccaacaccgccagcgcccaaacagctcgaattattttgagcttgttttgctgcaaatcctttcaagacaacaggttatggaacaggcagtgtaactaatcccgacctgatgtcaatccacaacgcttcgcgaccacaatgggacgggggggcgcaacaataagatatttttgacaacacaatatttcctcgtggtaggatagtacacaacacatcccgtaggacaggcagggcaggcgggtttcaatttactattggggattttcgtttggggttatgcttttgcgccccttcgacgcgctacgcttgctcaggactgaccgcaggcggccagattgtgagatttggacagtaccttttgcaagctgggcaggaggtaattcttcaccacttcgtcccagctcatatttttggccagcgagtagccggtcttaatcatatcttcggtttcagattcgctttttgccaggcgagaacatatctgcattgcgaccttttcactgacgctgtgctcgatttgtttgcgcaccgaatcgtccattttcagcaggtcttcaatgttggcagaaccgtgactgtttagtctggtatagtcggcgatgacgagatttttggcgccttcggcgccggctgtatccagcacaaagcccgcacatccgcaaacactgctgacgacgcagattccgccgaaagtcaatggctcgagctgggcgataccaaacggttcataaatactctggccgaattcgacatcacttcccctgcggatgtccataaattccatatccttcggcattctttggccgcaatcggcatggttgaatccaaactggtttatgaagatgatttttatatttttgcttttggcgttgaactcctgcacagccgtgtagaaagccgcttctccatcggaaaggtcgggcgcaccttcgcgatgagccacaggccagttatacaccgattccatcttataaatatcgctgctgcgtcgctgtgttacttcggtagacagcaggaacagcaccccggttttgccctgcgttctaaactccttttctattgtgtagagcactcgcaaatcgcgccacagccccttgctttgtaccagtcttgtaacatgtgtgaagatgaagtccggcttatagtccagcagagtttcgcaataccgctgcagtttttcttttgattgcagcttgtcggcaaggctgatttgatatgccggtatgccgttatagactatgtcaatatcggcggtttcaaattccggtgccagaaaccgcagctcgctaaccacgtaatcgccaaccgcgcatatagcgtcacaatattttgaagcttccacgaggacatgcttgaaaaaagagctctggtctccgaacacttcgttgacacaaagtctgttttcgtgagccagtttcatagcattatagaacattgtatcgtggccgggatgattttctacgatgcggcgtattgtggctacttcgtgggcatagaagatggttttgaaatcacacattggttcgagaatggccgccaatgccgttggcatccccataaactcgtgcgaaataatggttgtcgaatttttagctgcgccgattgcttttatcgcggcgattgccggcggtgccagccgaacatactgctcgtattcccacaaattttcatacagatggctgcgaataccgaattgttcaaataaacgttttttgaact

SEQ ID NO: 1029 - DNA, 23954 bp, synthetic construct
  misc_feature 1..23954: note = Synthetic
  source 1..23954: mol_type = other DNA
ttggttaatgatgctttttaattcgggaagataacgaacaatacctgttttttctgtaataaatttcaggttttttatagctggagggatactttcaataaaatgttttttcccttcttgtaaacctcttcgtccataagctcccagtgtttgtaatatacgtaaaaaggcaaatccgtaaaaaaattcaataaattcatctgtttttattgcaacttgtttatttacctcattcatatagtagttaagtaaaatcattcttgaagtttccgggatatttgctttagcctggtaaagcaatgatgctaaatcgtattgcaaagctccttttcgccctccttggtaatcaataaaatagggttcgttattttttatgaggatattacgggcctgaaaatccctatacatgaaaaaatcagaatctgtttttaataaatacccggctaaatgttcaaaatctgattccagtttatttagattgaatttcaggttaaaggattcaataaaatttactttaaaatagtttaaatcaaataaaatagcttctttgtcaaacgatttaaaaggatagcaatacgagtaatcaagatttttcccggctgtaatttgaaaattgatgagattctgtaatacttttttgtacatctctaatacaatatcgggaaaatcattagtttccctgttattatttaaccagttcaaaagctgaatatcaccaagatcttcaattaaataaatattattctgtagttcgtgtaaataaattcttggaacaggaacattgaacttgataaaatgttcggtaaattttataaatgcaagattttcaaaggcgttttcattatatacacccagtgcgtttctgtttttttcatatagccgaaagtaaacccttgatgatcctgagttaggcagttgtataatattctcaggattacgccccgaccaatttaaaaatagccggcttaaattaccaattactggtttataaatattttccattttcaggtaaaaaagtatgctaacacaacaattacaacaagtgctggtaaaagattgattattttaagctgttttatttcaagtatatttattccaagtccgataagcataatcccgccaaccgatgtaagttcgttgattattgtttcagaaaaataatcgccaaaatacatagctaataaagtaagccctccctggtaaataagcaaagggataatagaaaaagcaacaccaaacccaaaagcagcagccagggcaattgatgaaacaccatcgagaacagatttggctaaaagaagatttggtttgcctcccagtccttcttcaattgcgccgagtattgtaaccgagcccatgcaaaacaaaagaaatgaagtaatcaaaccttcagaaaatttcgaattacctgattttaatttggacttaaaataatcacccatcctgtttatgttttgatcgagataaataaactcgccaaaaataccgccaacaaccaggctgatgattattaaaaaaaaattacttgttttcaaccccatgtaaaaacccaggaataatgtaaaaaggccaatactctgaaatactattttagagtatcgttcaggcagcttcgaatgtatcgatatccctataatactgccaaccagtattgctcccgcattaattaatgttcctgtcatcacgaaaatttttataaatataaagaaatcttattacagattataaactttgtatatacaggtttttgaaatgaattctaaaatcttttatgtttttatttgttgttttgctatataattaataattttaaacttatgtttttaaaaaatacttcatatactatactatgagaattgaaatatttgattctgaatatttaaatattgtcgaactaaacacaacaggggatgatgaaaattatgttaaaggcgactcggaatcaaagtttatagaaagtgaagtttttaatatttttaccaattgctttgagaatgccaacaaactctatgagtattttggtgcaacaaagtacaattcaagaaaaatagttcccctgagaaatgaattgaaaaagaaactcgaagaattcgaaacgatagatacaattcaggcttttcatgcacacattgaacaaatatttttaggaggagattttattgatgagctttctttagaagatcctgattgggagacaaaatggaaatattatcttgataagctgataattgtttgcaaaggtcttattgagctggcagataagtgcatagaggaacaacgaatactttgggttattggatactaatttttttattaacagatgcaataatggtaagcaggaatcgtttaaaataattatatatttgcagcttcttaaaaatggctattatactacttcatatataatagtaaggttaataaattagagtgttagcatcccggggagccgggatgcttttttttgaaacctgtttgattaaaatttaaaacaggaaatattttggatttgtaccattgcgcgtcaagaaaaccttgtaccagagaactatatagtactgatgcaccgatataaacaagatattttttctataaagattatgctcccaccaaaggcaggccagtatctggagcgtaaacattaaaatatattagaaataaatcagggttatatcgaactcacgttatttattatggtgggttttaatttttttcttcttcagcttcttctttatgatactcagctacttcaactgcaatgcctttttctgtacaaaaacaattaatcttgtttttaatttctttaactttagtatatggcagccatccaatttccataacttttcttttacctgttcttttataaaatgttatacaggtaaagcctaatttaactttagtaatggtttcccagattattttatcgggaactttactaaaaaaaccaaattggtattccaatgcgtactcatcgctgtttatgaacatctttgaattgtatccgacaaacccgaaatagatatatagaaggaaatagatgcccaaacccaaaaaaaaccaaatgtttgtattgtcatacctggataagagccaaaatgttaaaacggaaactgctaaaaaaaataatgtaagaattataagcaatcgtttatatcgagtacccttattggtcatctcgtgtaagttaattgagaagggttccataagtattttttttaagtttaatactcaaaggtaacttttttagacatccgatgtaagatgttaactaaaaaataaaaattctgattgtaaaatcaggtttttagtgcccggaacaagactcgaacttgcacatccttacgaatacatgaccctgaatcatgcgcgtctaccaattccgccacccgggctttagaataacaaaaataatataatttgaataaaataaccgaaatgttgatttatttaatcttaaaaattaaacctgcgtggattcattttgtcaaataattttgtattttaagctgtttgaaaaaatgttatactcacaaaaaaccaatactcatgaaaaaatttctagtatttactttattaacacttattatggtaagttggaatattgataacgggatcgatatccctgaaaatccattattggtaaaatatgatactccctttgaagttcccccgttcgatttaattcagccggagcattttgtacctgcttttaaagcgggtattgaacaacaaaaagccgagattaatgcaattataacgaaccctgctgtgccggattttgaaaacacaattgttcctcttgatcaatctggcgagatactcaggaatgcaagcgttttttatagtttaaattctgcaaacacgaatccaacgttgcagaaaattgcccgtgaattaactcctatgatgtcggctcatagaaacgaaataggattaaaccaggatttgtttaacaggataaaagcagtttatgacaaacgtgaaagcttaggattagatgcagaacaaatgcgtgtagttgaatcaacctaccgcgattttgaaaggaacggggctgcattgccagaagaaaaacggaatgagctgaaaaagataaatgaacaacttgccatgttgacattaaaatatggcgaaaacctgttggccgagaacaatgggttcagattgattattgataataaagaagacctcgccggattaccggaagatattattggtgcagcagccgatcaggcaaaaaatgacaacatggaaggtaaatgggtatttactttacaaaagcccagctggattccttttttaacttactcacccaagagagagcttcgtgaaaaaatttataaagcgtatctaagcatggggaataataacaatgattacgataataaaacccttattacccaactggtaaaacttcgcgatcaaagagctaaattacttggttacactaattttgccgagttttctattgatgataacatggcaaaaactccacaaaatgtttatgattttttgaataaaatatgggagccttctttaatgatggctaaaaacgaagttgtggaaatgcagaaaattattgataaagaaggcggtaattttaaactcgaatcgtgggattggtggtattatgcagagaaagtgcgaaaagcgaaatacgatttagatgccgaagcgttaaaaccttactttaagctcgatgatgtcagagatggaattttttatgttgcaaataaattgtatgggttgaaatttatccagaataaaaacattcctgtatatcatgaagaggttcaggcatttgaagttcaggaatcagacggaacgcatttggcagtgttgtacatcgatagccatccacgcccgggtaaacgatcgggtgcatggtgtggtgctgttcgcagtggtgcatacgaaaatggcaaaaaaattacacctgttgtttatattgttactaatttcacccgtccaacaggcgatacccctgcattgttaagctgggatgagacaacaacctacttccatgaatttgggcatgcattgcacaatttctttgccgatggccattatcgcagaacatcgcgcgatgtgccacgtgattatgttgagttgccatcacaaattatggaaaactgggctggcgaacctgaagttttaaaaatgtatgctaagcattacaaaactggcgaagtaattcctgatgaattgattcagaaaattcaaaacagcgggcagtttaaccagggattcgaaactgttgaatatgttgctgcatcgttactcgatttagattatcatacaactgcaaatgttgagaatcttgatgtgttggctttcgaaaaagcatcgatggataaaattggcttaatccctgagattttgccacgctacagaagtacttattttcagcatatcttttcgggtggttattcagccggatactatgtttatttatgggctgccgttcttgattcagatgcatttaacgcgtttaaagaaagtggcgatatatttaatcccgaactggctgctaaattcagaaaatattgtttagctgaaaatgcaatgggcgaggggatggatcaatatcgtaagttcaggggacaggaaccttctattgaaccattattgaaaaagcgtggattaaaataatattggaatttgataagtttaaagcgcaatcgaaggattgcgcttttttaattcttttttttgagataaaatgaagatcatgcattacggaattaaatcacagtaccagaaccctatattttcgtcaggattttctttgccgtgcgattgatattccatgtaaacaatttctccctttttaaactcaaccgggtttttaaatattggcccatcgaaaacgaagctgtgaaattcaccattctcgccacagggatccacattttcgggtaaatcgcccaagaaggattcatcaaaaattctccctgcaaacgatttgccgagaaatcttgaatcaacagaaacgataatcgccttaaatcctttatttataaattccagggctaattctttcgtgtttcttttccacaatgggaattcagctttaaatcctttaatcgcgagctgtttttcccggtattcgcgtaaatcttccagaaaaatatcaccaaaaactgaaatagtaatatttttagctttctgttgacctagaaattcagatataattgtttcatattcctgtattgatggaaactcaggcaaaaatattttctttaaaggaataccaatagattttgcctgcatatcgagaaggttttctgataccccgtgcatggaaactcttttgtttacaccgtttaaagtggtaagcagaaaacgaatatcccattttttatccaggaatacctgatggaggcaaagcgctgaatctttgcctccactccagttaaatagcgctttgttgttataaatcactataatttattttttgctaaaacctgcaccattagggccaacgcctgcttcgtagcttcctaaaagagtcccattagcctcatatctccataaagtaccgttaactgtataacttggagcttctaaagcaaaaataattcctgtttcaggatcgatattaaacccataaaatgatttatcaattacaggccttgcaggaactatgttttcgttaattcccattttataaataccttgtacggcatatcctcccccataaaaaattgaagaaccatcgctgcttatttcaatatttgacggatgaaatgtttcgccaatggtaattgtttcagcaacttcattcgtggttgtatttacgcggattagctttgaaggtgtttccgacatatcggaataatcaatatacccggcacagataacccataaatcagtattcgtatcaacaacaaaatccctggggctgtccccgtctaaagaaatggttttaattacctcatcagtttctgtatcaataacgctgattgtattatcatttccccaaccaccactgtttgcaacataaacaagattatttaaaagaatcattctttcaggcccggtaccaaccgtgattgtttttattactgataacgttgaataatcgattacttttacatttgttccaaacccggttccccattctgatacataccctttttcctggttaattccgatataatacctgggtaacgcgacatcggtaattacaccaacttcggtaaatttttcggcatttacaacttcaattttgtttgaaccattaactacaataaatgcaagttcgttatgaatggagatagactgaacaacatctccaagtaccctgccgttaactgttttaaaaacatcattgtaaagtttatctttttcaaaactgtaaaaactaaccgatccgttaccggcaccgtatgcgccttcgttggttataaatgctccccctgtaaaatcttttggaaaggaatctgtattgctttcttcttcgcaagaattaaggagaattagaaatgataaaagaattatcatccattgtttagaaattattttgttcatttttttaaagttaagtttaattaaaaggtttgttaaaattatacgataagcttattgaataatatcttaatggcatggcgtaaaatgccattacctggtatgtcgcattccaaatattgttaattttaaaattgagatgtatttcagaatttttaagttttacattgcttccaagagataaatcagcaatccagaatggagcaatcgactgagagttatcttttgtaataaagcgctcacccgtgtaattctggtaatattttaagtttatccatttataagtaagtgatagaattccatttcctttatgatagggaatatataacaattgtttccccacgctaacggattccgtattttctgattcttcgtaagtagattttatataagaatactttaaatcaattccaatatatagtttatttaatttatagttatagtttatttgtgattctatacctctcgaccaaagcttttcaacattctcggcagtccagtatgtacttgtagttggaagccatacaaccatattctcaagattactgttaaaaacagtgattccaagaagtaactgccgggaattattctttaaaagaatcccgaagcccaaatcttcgctccatccattttcatttttcaggccaggattgccgcccggattccagtacaaatcgttaaaggctggatagttgtatgtttttgatacagttgaattgatgtttacatattttgttataaaatatttggaatttaacgatagggttaagggagtaaatgccttgttaacaagttcttctctaaagctcagtacagatgtaaaagtatttgaattattaatgtatttaattgatgtgaataaagcggttctgttcctgctgttggttttagaataattctgtgtttcaacttgctcgaaattataatttaacccggtattgaaaatgaaattattggaaatagtgaatttgttttctatttcactgacaaacgaagaattatccatctcggaaataagcccgataagcggatctttataaattaatgattcgtaattaaggtaaactctcgcgaaccaggaattaaattcggtatttctgttccatagtgttgaaaacctgaataattcggagtactcattagccaggctgtttgtatttgtcatcatggcaggtacttcgcgatacaggctctgtgcccagatgttggttattattttctggttttcgtttatcctgaataagttagattgcaggattccatattgtaaagcagaagagttttgttgttttacctttggtttaccaaattcctgtgtattcacgaactcgaaatcgttctcccccgatttatgatatattcgtgttgatgaagcagttttatcattactgatattgaattttaaaccttcgaaaaaattgctaaaactaccataactttgattgtacctgatatcaatcccttcgttaagtttcaggctgctgattaaatgaattactcctccaacagcaccactgccaaataatgcacctgaacctccgtattgaatatcaatttcatcgataaggaaagaagggatacaattcatatcgtggccgccattcatgctattttgcaggttaaacccgttccacaaaacggcggtgtgttttgaagtcattccccgtagcgaaatattacttaatcccgatattccataagatttaactgaaacagtagttacctgcgaaaataattcggataagttagacgaattgtacgggattatttctgattggtaaattttctggatttttgccccgttggtaaaattcacaagcctgtttgcagtaatctctatttcatcaattgcaatggtatcgacaggttcgtcgggaacatcaactgcaccaaaggcattgcttattccaaaaaggctgattcctactattgtttttaaaaaattcattagtacaaatgatataaatccgtaattgattcaatcatttataactaacaggatataaagggaaaatagaggtgtggattaaacaccatcgctttttatccgaaagctacaaatgcaattggttagtggcaggtcttctgacttactccctttttgccggccttcccgtgcgccagttggcgaatagtggcttttcatggacaaaaagtttggtttggagattacagcagcggtaactgttcgggattttcacccaattccctcttagcttttcagactaagaaccataaccatgatgcaaaggtatatgtaagatttttatttgcaaacttatttgcaaaaaacttgatcaaagtttttaaccagggattgttaaaaaaaactcccaccgaagcgggagtataggatttacatccttcggcatatagccttattgtgataagatgtaatgatcaaatgtacaattttgtttgaataaatcaaattattaataaattttttgtagcttaatgttttatttcaatgatgataaaattaaacaacatgaaaaaaatattgggccttgacctcggaaccaacagcattggttgggctgtggtagaaacagaagacaataaaaagtttgaattacttgataaaggagttcgtatctttcaggaaggagtaaaaattgaaaagggtattgaaagttcaaaggctgctgaaagaacaggatatcgcagtgccagaaggattaaatttagaaggagactgagaaaaattgaaaccttgaaagtattaattgaaaataatatgtgcccactttcaatggatgagttaattgtatggaaagagaataaaaataattaccccaaaaacaaaatattctataactggctaaaaacaaaggaccccaaagaagggactaatggaacttatattaatccttattattttagaacagaagcaataaaaaggaaattagaaaatactaatgatgttggcagagcattgtatcatttagcacaaagacgcggatttaaaagtaatcgacttgagtcaactgatgaaaaatcaagaggaattgtaaaaacagagattaataaattaagctccgagcttaatggcagatatttgggtgaatatttctatgaattatatttaaaaggggaaaaaattagaaaaaggcatatatcccgtgaagaacattatttaaacgagtttaaaaaaatttgcgaagttcagaattttaataaagaattggccgaaaaacttgaacgggcaatcttttatcaaagaccattgaagtctcaaaaaggacttgttggtaaatgtacattgcagaataataaacacagatgtcccatatcaaggccagagtttgaagaattcaggatgtggcagtttatcaatagtattaaatataaaaacagtgatgggaaatttgactttttaaataaggaacaaagagaaaatattattcctgcatttgtttcaaataaaaacgccacattcgaattttcaaaaatcgaaaaaattctcaataaaggcgtacacatatatcaatttaattataaaagcaatcataccataggaagtaatcagacaatgataaattttatggacgtttttgatattgatagaaaattaactaatgcatggttgctatgtgtaaataagatatatgaattatatactgcaaagactaaaaaggatggttcattaaaaagtaaaagtgaagtaattactgatgtatggcatgtactttttacatttgataatgaagaaaatctaaaagagtttgcaagaaacaagcttcttttagatgagagttcagcacaaaaatttagtaaaataaacttaaagcaagattattctcaattaagtttaaaagcaattaataagattcttccgtacttacaagaaggattgatatatagttatgctgtttttattgcaaatattgaaaatgttattggcaaaagtatatggaatattaaggaaaatcagcaaataattagaacaagtataaaaaaaattattgataatcataaaacagaattagatattaatacaattactaatagtctaatcaatgattttaaggttaactataacaatgcccataaagaatacaaggttgatgatattgatttaaaaaatatcagagaaaagattattaaatattatggaaacaaaacgtggaattgtttgcccgaagatgagaaactctatgttaaggaaaaggttgaaaaattatatgaaaaacaattaaaaagcggtaaacggggaatttttatagaaaaaataagacttgatgacagaattgaaaactttttaaaagataattttgattcttcagaactaaatctaaaaaagttatatcacccatctgatgtgagtgtatataaatcagtaaaaattaccgatttaggattacgattgttaggtagtccaatgattccaagtataaaaaacccgatggctatgagagctatgcatcagttacgcaagcttataaaccacttgattattgaaggagtaattgatgatagcacaattataaatgtagagatgtcaagggaattaaatgatgcaaatatgcgtaaagctattgagcgttatcaaagacaaagagcaactgaaaacgaagaatttaaaacaaaaataaaagagctttataaaaaagaatgtggaaccgattttgaacctaacaatgatgatattatgaaatatcgtttgtgggaagaacaaaatcataagtgcttatatacaggcaaaagtattggtatatgtgattttattggctcaaacccggcttttgaaattgaacatacaattcccagaagcttgtcgtatgataattctctcgaaaataaaactttatgcgaaaaagaatttaaccaacaagttaagaaaaacagaattccatttgaactttcgaattataaagaaattatttcaagaataaataactgggaaataaaagcagaagaattatttaaacagattcaaaaagtaaaaatccaaagcagaatggctgctacaaaagaaattaaggataatgcaattcagagaaaacatttgttgcaaatggaatttaactattggaatggaaagttatcccgttttacacgcgaagatgtaccagaaggttttaaaaatagtcaattagtagatattggaattattacaaaatatgccagggcttatcttaaaacggttttcaataatgtaaatactgttaaaggttctactgttgccgagtttcgtaatatttggggcttgcaggaatactttgaaaagaaagatcgttctaatcatatacaccattgtattgatgctattacaatagcttgtctaacaaaagataagtacgattttcttgctcatctttaccatcttgatgaacaaaataaccgggatgcagttcaccgggcaatgattaaatctaaaccgtgggaaaattttgtacaagatgttaaagaaattgaaaatcaaattcttgtttctcattacaccccagataatttgccaaagcaaagtaaaaagatacttagaaaaagaggtaaaatacaaaaaaatgaaaatggagatttaatatatgaaaagggagatgcagttagaggaagtttgcacaaagaatcgttttatggtgcaataaaaagggaaataataaataaaaaaggtgaaacagaagaaaaagtgctttatgtgaaaagaaaacctttagagttttcagatttaggatttaaaactattagcgaattggaaaatatagtagatgatgctgttcgagataaagtgttaaatgctgtaaaagataaaggcctaaagcaagctttaaatgaaccaatctggatgaacgaagaaaagcaaattcctataaaaaaagttcgttgttatactccttctgtaacaaatccaataaatttgaaaaaacatcgtgataaatctaaacacgagtataaacaaagttaccatgttactaatgatggtaattatttaatggttatttacgaaggaaaagattcacaagaaaaagttaaaagagattatgaaattgtaagtaatttacaagcaggtgagtattttaaacaatcggtacatggtgttttaaaagcccagggaataaataatcttgaaggattaattccaaaatttaaagaaagcgggaaaaatattttgccactaaaatacattttaaaaacaggtacaatggttatattttgggaaaattatcctgaggaaatatgggatatagataaaaatcaattatacaaaagattatttaaagttactcagtttgaatcagatggaaggattcaagcaaggtttcatcagatagcgaaaccagataatgaacttactaaagtttctgaactcgattttagtaatatagcagaaaagattagacttagtaaaggaaatctaaatatgctagtaaatgggtatgattttaaaataaatgtacttggacatatagaaaaactatcttagatgttaaaacgaaccctgtattttaccaagcccagccatctgtcggttaaaaacaaacaactggttgttgaattaaaagatgaaaatcaaaccaagactgttccggttgaagatattggttttattgtaattgaaaatatgcagataagcctgagcacaccactaattgaagagttgatgaattacaacgtggctgtaattttttgcgacagcaaacatcacccgcaatccatgcttattaatttcgaaggcaaccatcagcaaaccgaagtttacaggcagcaggttgcggcatcggaaccattaaagaaaaatctttggaaacaaactgtagaagcaaagattgagaaccaggctaaagcattaataaaattgggtatcaatgccgatcccctgccgcatttggcaagccaggttaaaagcggcgacagcgataaccgcgaaggaatggcagcccggttgtactggaaaaagttatttggcgatgagtttaaccgtgagcgttttggcgactggccgaatgcccttttaaattacgggtatattgttttgcgggcagcaactgcaagggcattaacgggttcgggtttattgccttcgtttggcatttttcacagcaaccggttcaatgctttttgccttgccgacgatgtaatggagccataccgcccttttatcgatttgctggtatatgatttgcatgttaagtaccccggtatgcaggaattacaaaaagaaataaaagcagaaatattaaacgtgttgtcggccgatgtaaaaatgaaagacagtacccggccattgatgattgccctcacgcatacatcggcatcgctggtggcatgttacaagggcgaacgaaaaaatattgaatttgcaacagttcagttatgattgaatttaaccgtttaaatgcatatcatatcatgtggttatttgtatttttcgatttacccacaaataccaagaaagaacggaaggcagcagcccatttccgtaaagatttaattcaggatggttttaccatgatgcaatactcggtttatgtccgtcattgcgcgagtaaagaaagcggcgatgtgcattgcaaaaggataaaaaattgtgttcccgaaaaagggcaggtgagtattttagcaataaccgacaagcaatatggaatgataacaaatttctggggcgctaaagaaaaaccattggccgaaggccccaaacaattggaaatgttttaactatttatataaaaaaacaacaggttctttgatattctggctcttaaaaaccaattaaagtttaaaatacgttgcagatttttgatttagaatcgtaaatttgaacaacagaaaaccacttcttgcgggaaatgcccgggaatttaattcaataaattaccccaaaggcaggcaaaataaggcctaaaaacacccaggttgtggtttgatgtaatttcaagatgataaaaaacaattgcaaaatgcgggtttaatccatcgaggttgtggtttgatgtaatttcaagatgataaaaaacacaccatatgcagctatactctcacccatggttgtggtttgatgtaatttcaagatgataaaaaaccatagcataagtacctataattgtattagagttgtggtttgatgtaatttcaagatgataaaaaacttgacccagatgattttgaaacagccgatggttgtggtttgatgtaatttcaagatgataaaaaacccgctgcaagtacggaagaaacctcaactggttgtggtttgatgtaatttcaagatgataaaaaacatatttcaaaatattttgaatacataatagttgtggtttgatgtaatttcaagatgataaaaaacgatgataattctttttgtaaccacatttggttgtggtttgatgtaatttcaagatgataaaaaactagttaaacgtaaatcgcgtaaagtaatagttgtggtttgatgtaatttcaagatgataaaaaactttggtattttataaaaacttacctacctagttgtggtttgatgtaatttcaagatgataaaaaacaaatatttggttattcactgcagcgatacagttgtggtttgatgtaatttcaagatgataaaaaacacactatgtggtgactaacccttttgttaagttgtggtttgatgtaatttcaagatgataaaaaacatttctttctcctgaataagccttgcctgagttgtggtttgatgtaatttcaagatgataaaaaactaaactttgttgtattaataatctttaaccgttgtggtttgatgtaatttcaagatgataaaaaacttttcattagtaattatatcgccttgtttagttgtggtttgatgtaatttcaagatgataaaaaacaatattttaaattcaattttaaaatatctggttgtggtttgatgtaatttcaagatgataaaaaacctcgcgcatggagtctcaatcacttcagtgttgtggtttgatgtaatttcaagatgataaaaaacaatacttgatttgtttacaaatcaatacgcgttgtggtttgatgtaatttcaagatgataaaaaacaatggcagtttttaaaaataattccattgagttgtggtttgatgtaatttcaagatgataaaaaacgcattgtcggtaaactccttgagggtgagggttgtggtttgatgtaatttcaagatgataaaaaactagaatgcagtatatctcaaataaccactagttgtggtttgatgtaatttcaagatgataaaaaactacaggttgtataataatcggttaaatttggttgtggtttgatgtaatttcaagatgataaaaaacttatactctttgggcttgtacatcgaaacgttgtggtttgatgtaatttcaagatgataaaaaacgtacgaattaattatgatttcagaaataaagttgtggtttgatgtaatttcaagatgataaaaaaccatcatttaataatggtgcttatatccatagttgtggtttgatgtaatttcaagatgataaaaaacattaccggtcagttattgacagcatcagcagttgtggtttgatgtaatttcaagatgataaaaaactaaaagtgttatcgtagtattcgactaaaggttgtggtttgatgtaatttcaagatgataaaaaacaggtcgttatgaaatagaatttacattgatgttgtggtttgatgtaatttcaagatgataaaaaacatacggagcaagattttacagacgaaacgtgttgtggtttgatgtaatttcaagatgataaaaaacattatggaaaatcaattaataattcccgggttgtggtttgatgtaatttcaagatgataaaaaacgaatttcttatttagtaaatgctgcaaaaagttgtggtttgatgtaatttcaagatgataaaaaacacttagataataatggatatttgcaagatagttgtggtttgatgtaatttcaagatgataaaaaactcgagaaattacgctaaaaaggcaattttagttgtggtttgatgtaatttcaagatgataaaaaacttttcattttaaatcagtatttcaatgatggttgtggtttgatgtaatttcaagatgataaaaaacttttttagttgatgttgaatattcaggaacgttgtggtttgatgtaatttcaagatgataaaaaacatgtatgcgtagctggggcaatcgaagctagttgtggtttgatgtaatttcaagatgataaaaaacattatgttttcttttgcctccatctctcgagttgtggtttgatgtaatttcaagatgataaaaaacacctacaattgaaaaaccatcaactattgagttgtggtttgatgtaatttcaagatgataaaaaacttgtgatttagttgctcctcttacgttgtagttgtggtttgatgtaatttcaagatgataaaaaacatctaaatttgtcgcatatattaatggattgttgtggtttgatgtaatttcaagatgataaaaaacattggtagtagtggtatttattacagttggttgtggtttgatgtaatttcaagatgataaaaaacgttttcaacttcttttgcttgattttcgtcgttgtggtttgatgtaatttcaagatgataaaaaacaatcaaaattttttcgtcattttctaaatagttgtggtttgatgtaatttcaagatgataaaaaacaccaccacaacgattagccggatgtaatggttgtggtttgatgtaatttcaagatgataaaaaacaagaagcaggagcacgatattttaggcaacgttgtggtttgatgtaatttcaagatgataaaaaccagtaaagatgcataattatgcatctttactggtttttctttgtagttacaagagtgttttaagattctgttgccggttttcggcaggcgagggcttaaaaccgctcttttttattttaatgtttaagctcctgccaaaggccggttaacccatggagcttcttttaaaacaaactaacagattatcaatgttttttggatagttttagaattataatttttaattcttatatctaactcacgttattttatggttgtttttcaaaccccaaatcaccaactttgcgccacaatatttgtaaaccgaggcaaagcctgtgttcaatattttcgaaatcggttttttcatcagaaataacggtcatctctattaaaaacgactgggttttatcgacagtaaaaccaacagattcaatgtaatcatcaataatattgtcgtataaaacttcattgttttcaatattttttataatataatgcacggggtatttattatctttcgtgcaaaatattagcttgtaatcttttcccccgtaaaacacgattcttgcataagaaggaatatttacgatcatcagggcgctcctggattttccatattcattgtacgttttatcgtcatatggtttgcagtattctgcatggaaaccattacagttctggctcattgctgaaaaaacaaaagagctcagaattaaaaaaaggaatatggctgttttatatctcggcatttttattttttgtttttaaatgtactatttatcctaaatatttcataatcatgttgattaatttagcttcgtttataggtttcgagatataatcgtcgcatcctgattttattgctttatctttatctccctgttgcgcgtaggccgtttgagcgataattattatttcgggatttaactccttaatttttgcagaagcttcgtaaccatttagccttggcatttttaaatccattaaaattaatgaaatttccggatgttttttaaccatttcaatggcttctattccattggaggctttaaaattctttattcccaagttatcaataatttcttttaaatacaaaaagtttatttcttcatcgtcaacgattaaaatgggtgtaaacgtatttaatttgggtttactaatcagtttggttatttcgggtgataatttttgaacttcttcggttttaccaaccggtattgtaaaataaaatacagatcctttgtttaagccggattcaacccatatttccccgccaagtttttctaccagggctttggatatggataaacccaaaccggttcccccgtagtttcgtgacgaaccttcatcgacctggcggaacctgtcgaaaataattgactggtgctccggggcaataccaattccgctatctttaacataaaactcaacttcgtcttcatcttgttttaccgaatatccaaattgaatacccccatcgagtgtaaatttgagtgcgttgtttaacaggtttgtaataatttgctgtaagcgcactttatcgctttcgataaaaaaagaatgtttttttgaaccttgtataagttcaaaatcaagatttaagctgtcaagtttgggtttatacaaggtaaaagtataatccattatttcgttgagatcaaaaatacctttttcaatacgaatctgcccggtttcaattttcgagatatcaataatatcatcaataattgataaaagctgggttccgctttttcggattatgtctaaaaagagttctcgttttgtatcatcgatactatcacgtaccaacatgtctgaaaatcctaaaatgccattcatcggggtacgaatttcgtgggagatgttggcaaggaatgctgtttttaacctgtcgctttcttcggctttttctttggcttcgattaattcattcaacattcttttcttttcggtaatatcatcaataatagctacaaaatgggttattacattcttttcgtcaataattggtgaaatgattacattttcccaataaatatttccgtctttctttttatttacaagttcaccctgccaatttttccctgataaaattgttttccacaaatagtcgtaaaattctttggattgaatgcctgactttgagatgttgggattttgcccgattgcttcatcgtagctgtaacctgtaatttcagtgaacctgggatttacatactcgaaaaatccttccgggtttacaattgcaatactaacagggctttgttctattgatttattaagtaacttaactttctcttcggctttttttctttctgaaatatcgtgaacgatcgagtaaagcaggtttttccctaatgattttattaacccggaatatacttcaacagtacgtttttctccatttgccaggtaatgatcgattacaaataaattcttttcactatttattgcaagcgaatatatttttttaagctctgtctctgaaagcctgtttatatctttcatagtcatgcttattaattcattgtatggccagccgtaaaattcgcaagctgccggattggcatcgactatttgcctggtttccggatcaataattagtattactgccttgttgttatggaataatgatttatagcgttcttcactttctttcaagttgttttctataacctgtttttctaatttaatcttattttgtttaacagcttccatcactgcaaaaggcaaacgggtaatgttgtcttttaaaatataatctgtagcacctgctttcatgcattgtacagcagtttcctcgttaattgatcctgttaatacaataaatggtaaatccggggaaatttcttttgatatttttaatgcctgcatgccattaaataaaggcattgaataatctgagataataaggtcgggattataatcttttaactctcttataaaatcattttctgtttcgattcttgtataatcaaattcgatgttgtatttttttagtgccctgacagccatttcggtgtcaaccggttgatcttctacaaataaaaatttatacttatccatgattgtgatttttaaattataggactttggttaaggagcaaccagtataaaccgaaatttttaatggcttcaacaaattggtcgaaatcaacaggtttggttatataactgttaacacctagtttgtaactttcaataatatctctttcttctttggatgaagtaagcattataactggaattacttttgttttatcgtttgattttaattcttttaatacttccaaaccatcaactttagggagttttaagtcgagcaggattattttgggcaagctgtgtgaaacattgttttttaaacaattatgaattaaacttaacgcttcttcgccatcagtaacatgaattatgttatttgccaggttgtttttctttaatgcccttattgttagttctgcatcgtttggattgtcttctacaagcaaaatctctatttcattaagatgttccatattttattgtttgttaagtaaatatatgctttttgtatggcagattcaagttttttatcgtgtatgagtgtttgttttacctttttgcaatacaaaatttattgatatttaaatatggctgttagtattcttcattttattcagatttaggtatttccattattacaaataatttaacaattcatttattctttatctttatcaggaaaactgagatagaaggttgatcctgctcctaattcactttcggcccatactttaccaccgtgccggtttattattcgtttaacaatagctaaacccacacctgttccttcgaattcactgtctttatgtaaacgttgaaaaacgccaaataatttagattcgtaccttgtatcaaacccaacgccggaatcttttatataataaacaaccgatttattttcgaaataagccccaacttcaatcgtgcacttatcgctatttctcgtaaatttaatcgcgttactgattaaattaatccaaacctgtttaagaagtacaatatcaccataaacttcgggtaagttatctgctgtaaatttgaatttttgtatagtttctggagtgctgatttcgttatatatttgatgaacaaactggttcatgtttattttgtttaaatgcatatcgttacggctaatcttcgataattgcaataaatccatgatgagctggtccatttttttcgtgttatcgcggattacattcaggagccttaatccttcagcatcaagtttatcgccataatcttcaatgaggaatcttgaaaatccatcgatagccctgagcggggcttttagatcgtgtgatacggtatatgtaaatgcttcgagttctttatttgcttctttcagtttttcgttaaccttttgtatttcgtctctcgattcatttatatcttcaagtaaaaaaagtaaggcatcctgcgattctttcagttttaaagtttgttcattcaacatggttgttctttcctgtacaattttttccaggttttcgtgatgttgccggagttcgaactgaacagatttaagttcgtcgatatcggtatgagtgcctaacatcctggtcgggttaccatctatatcccgttcaacaattttacctgttgataaaatccatttccatttgccttgtttcgttttctggcggaattcaattttgtaatccgaaataattccggcaacataatctttaaaagcttgtgcagttagttcaaggtcgtcggggtgaagcctttcaatccatgcctgatttgtttcatggagctctgacggattgtaccctaacataattgcatattcatcattaattatggtttcaccggttagtaaatttaaatcatatatgccctgttttgaagaactaatagttaatcttaacctttcttcgctatcgcgtaatgctttttctgctttttttcgttcagtaacatccataattattgttaaataagcaggtgtttctccataatcaaccttttgtaagtaaacttcaaccgggtattctgtattattttttcgacgatgaatggtttcgaaatatattttgggttttaaatctttttcaacggattcaattaaatctttgaattgatttaatgtatataagggtttaatattcaggggagtcatttcttttaactcgtctaagctatacccgatattttttattgctccttcgttaacatcaatgaacttgaaattttttcgcgagaaaatatatatttcgttcaaagattcctggatgatcttatttaaatttgctgatttttcttctgattttaacctgtctgtaatatcatgaataatagaaaataaaactgttttattttctatcgtggttgaaccactataaacctctacatttcttatgcttccgtctgacttgcggtgtttgaaaataaaataccctcttttattttcaagtgccaggttcatttctttttgaatttcgacacttgaaagtgtattgatgtcggttatatataattcatttttaaattgttgataagtatatccgtaaaatgaagttgcagcgggatttgcatccaatattttatttgtaccggggtctataataagcattatggcatggctgctcataaacaggtttc

SEQ ID NO: 1030 - DNA, 24539 bp, synthetic construct
  source 1..24539: mol_type = other DNA
  variation 15533..17971: note = n is a, c, g, or t
  misc_feature 1..24539: note = Synthetic
ataattatccagaaaatccggaagattatgatgtgctatggatggaaacgtttaaacgccatgcccaaaaattaaaagccaaagtactttatgccggggttggtattgccaatgctgccgattttgaaaaaccactattgaaaaatgaagattacatcatcaactacaatggaattaaagaaattagttagtctatttttactagtattatgctttgccgcatgccaaaaggaagagaaaaatcaaattataatcatccaaggagaagctcaaggaagtacgtatgctgtgaagtatatcagttcttcggaattggtatccaaaaaagcaattgattcgttgcttttagcttttgatgaatcactttcaacctatagacccgattccaaaatatccaaaattaatgatggggattctacaattgtagttgatgatttttttgtaaaaacagttgaagtttcttccagaatttataaagaaactgatgggctttttgaccccacaataggggttttggtaaacgcctatggttttggtcctaaaaagcagaagatcgatttaaattctgcaaaaatagacagtttattgcagtatgtgggttttgataaagttcgattgaatgaaaacagaacgatttcaaaaaaatttccacaaacttattttgatttcaatgccatagcccaaggctattcggtagatgtggtggtagattttttaaaatcaaaaggtattgaaaacggtatagtagaaattggtggagaaattgtagcttttggtaaaaatacgattgaaaataaaaattgggttattggaattgatgatcctacacaatcaccggaagaacgtactttgattgctaaaatcaagttagaaaaccttggaatggctacatccggaaattatcgaaaagtaaaaaccgattcgcttaccggtgaaaaatttgttcacattatcaatcccaaaaccggactttcacagcaaagtaaggtgttaagtgcgaccgttttatcaaaaaaatgtattgatgcagatggatatgcaaccgcttttatggttatggatttgcaacaaacccaagatttcctgaaagacagaaatgatttgtatgtgttattgatttacaccgatgagcaaaatacaattctacaattcaaaacacctaattttgagaaattagttgtcgattaaattttgttgaactacggttgaaactgttggctattttttttatttaaaacaaaccggaataatttccccatttgctaaacaatattttttcactaattctggtgaaatttttgccgtataatcttcttcaacaactgtgaaaccaatgcttctcagtttgtcaaaataatctcttccatatacgcgaacatgatcatattgaccaaaaattttggcacgttctttttcatccgtaatcgaatcatccgaaaaagtagtggctcttaacaaatcttgcggaatctgaaaaattcccataccacctggttttaaaacgcgatacaattcttgcattgctttggtatcatctggaatgtgctccaaaacatgattacataaaattacatcatacgaattatcgtcaaacggaagattgcaaatatccgctttcacatctgccaaaggcgaaaataaatcggttgtggtgtaatctaaattcttttgatttctaaaccttttataaaacgcttgttcaggagcaaaatgtaaaaccttttttggagcagtaaaaaagtctgtttgttcattcaaatacaaccacagcaaccgatgtctttccaaagaaagtgtacttggggacaatacattattgcgttgttttccatatccatagggcaaaaacattctaaaacttttaccgtctattgggtcagtgaaccgatttcctttaagtaaaaatgccaaaattggtcttgccacataactcaaccgaatcaacagtgggcgtggaattgtgtttaatataaatttgaatacttttttcattatgagcaaacgattgattaaacaaccaaaggtgttctcctaaactccttctcctcatcactttcaattcccaacgcatcatacacatattgaaacgtagaaagcaactccggtttcccatcaatcaacgccacattgtgctcaaaatgtgcacttggcttcatatcagctgttaaaatagtccaaccgtctttcaactgtttgatgttttttgtacccatgttgatcatcggttcaatggcaacaaccatgccttctacaaacaattttcctctgccttttttgccatagttaggcatctccggatcctcgtgcatttttcttcctaaaccgtgtccaactaattctctaactactccataaccatgcgattcacaataggtttgaatggcattccccacatcttcaacacggttaccagctttaaattgtctaatgcctacatataatgattctttggttaccttcaataactttttagtttcaggagctacttcaccaatctcaaatgagtacgcatggtcaccataaaattcattcatcaataccccacaatccaccgaaattacatcgccgctttccaacggtttattgtttggaatgccatgaaccacttgagcatttggactcatacacaacgaatttggaaaaccatataaccccaaaaaagcaggaactccgccatggtcacgaatgaattcttcagctaatttatctaaatacaaggtcgtaacaccgggcttaatttcctttgcaatcataccaagcgttttagaaaccaatagcgaactcgctcgcattaactcaatctcttctcgggttttagggataatcatattcaaaatttaaagtgacaaaggtacacttttttatctttttttatcagaagcaatttcccgtcatccgctacaagcttttttgtcttgcggcgtttttctaagggcaaaaaagagctccctgccgtcgcttttttttaccaagaaaaactgcctcaatccttcaaaaggctttacgctgctaccggggctaaaatcagcaaaaactatgagaaatatcagtttttaaacgaaaaatcacgcttatctttgtttaaaatttaggaattatgagcaaatatgttaccgcagatgaagctgtaaaagttgtaaaatccggtgatagggtttatctacatgcagccgctgctacaccaaccgtattaacaaaagcactcactaaaagagcagctgaactaaagaatgttgaaatttgtcacttacacaccgaaggagaagcaccctacgccaacccggacttagcgtcaagttttcatgtcaattctttttttatcggagccaatgttcgccatacgcttaaagccggaaatggctcttatacgccggtttttttgagtgaattacccaacttgtttcgtaaaaatgtattgccgttagatgtagtatttattcatgtatcaccaccggatagacatggttattgttcgttgggggtttcggtagaagcaactattgcagcgattgaaaaagcgaaaatagtcattgcacaagtgaatccgcaaatgccaagaacgtttggtgatgggattttacacgaatcagagatagattatttagtggaagtaaatgaacctatttttacgcatggaattgaaacatttacacccgaagaagaaataattggagggtatatcgcctctttagtcgaagataaaagtaccttgcaaatgggaattggttccattccaaatgctgcattaagcaaacttaccaaccacaaagatttaggtttgcataccgaaatgttttcagacggcgtaatcgatttaatcgaaagtgatgtcatcaattgcaattataaaggcacaactcgtggtcgggttttagctacttttttgatgggttcaaaacgattatatgattttgttgatgataattcttttgttgaattgaaagaatcatcagccgttaatgatactgccagaattcgtaaaaacccaaaaatggtagctattaattcagccattgaagttgatttaaccggacaagtttgtgccgattccatcggtggaaaaatgtactccggtgttggaggacaaatggattttatccgtggagcttctttgagtgtgggtggaaaagcgattattgctcttccttcacaaaccaaaagaggagaaagccgcattgtgccgtttttaaaacaaggtgccggtgtggtaactactcgttcgcatgttcaatatattattacggaatacggaatagctaatttatacggtaaaactttgaaacaacgcgtggctgaaatggttaaaattgcccatcccaaccaccgtgaatggattgaaaaagcatattatgagatgatggaaatcaaaaagatgggttgttgatttaatttaggtttaagagtttaaaggtttaaaagtttatgagggatggcgttgatggattacgattaatgactaaattctcttttaaacttttaaactcataaacttttaaacaaaaaaatctaaccaattaatcattaaactgcggattcgcgattaatttaaacaaatcagcgtgggaagtgcaaaattttaattccgtatcaatcagttgtaaattgctgctgagcaaactgttttcacgtgagttgatgataaaaagtgaactttctccaaacaaaaacatgcgttcttcagcttctaacattttttcaaaattggttaccaattcatcagttaatgataattgatttttcaatgaattgatttcctccaattgataattgattttgttgaccaacacttggttttccaattttaagtctaattctgcatcttgcaatttgaatttggccattttataatttcctcgttcttttctcaaaaaaagtgggaagctgaaatttaatccatatttataatttacggtattaaaatcaccaataaaatcaggttcagataggtaattataattcaaattcaaagtaggttttaataaatcaccttttaattttttatctacttctaaaatagaaactttattctgtaaagccagaatttttgggtgattttgaatgtcgatattggataacatcaacccatttgttttcaatgtattttccacttttttattcaaatcgctttccggaataatgttgtcttgcaactctaatggaatagaattatccaaccataaaaaatttgacaattctaatttagattttatccatttcaaacgggattgttctaaacttaattttctttgtttcactaaaattccggcttcaatgctatcaattgccggacggtcacctgctaaaatcaattctttgatgccgtttaatcgaaattcagcattcttaagaaacgtttcataaagtttatattcattataattccgataccagttaaaataactacttgcggcggaatgaagcacattggctacttctaaatctctttccgcttttgataaattgttgaaaatctttgctttgcgtaaatcagccattcggttgtttatgaataagccttgtccaattgggatagaaattcctgcggctactaaacctggggttggcgtggtattttgcggattcaagtaaaatccatccatttggtcaaaactcgctttgatttcaataccataccaagttggaattttaaaagtggcatttaacaaatcaaaatactctgtagatttgaattgttttttctcataatctacttcaattttaggatcaaacccaccacgagcggcaatgataccggcctgagcttgactaacttccaaattggcttgtttcaccaaaggatgaaattgttttacataccctaaataggcatccaacgtcagcaaatctgggttagcctgattttgcgaccaagaaaggcttgtaagaagtaaaaaaagaagatatacttttttcattttggttactttttggattcgttggattgttttggcgtataaaaatcaggtgggaaaccattcaaatttcgccatatttcataccatatcggaacattgttcaacaaagcaaacgtttgtgctcctgaaccaatattgagttcttttggccaaggtttgtcttttgggtcttgagcaattagaaccctgtattttccattggtactgataaaattttcaatggcaacaatttcacctccaaaagttccatacgaagtgttcggccatccactaaaaacgatggttggccatccgtcaaaccaaattctaactttttcacctttgtgaatcaatggcatatcgattggttcgataaatgtttctactgcaatggcatatttagatggcattatgctgacaatcggagttccctcttttatcgtttcaccaatacccgattgtaatgcacggttgacaaaaccactttgcggagctttaatgtaatacaattcatttcgcattttgtagtttgttacttgattttgaagcttattcacttgtgcttctgtatcaaattggctactcaaagccgtaaatcgatcgctttctgcttttgaaactttatcagcatattctgctgttattcgattaatttcaacccttgcattgattaaatcatttttcgaacttaatagtttattttgttgtgtgatgatttttgcctccgcatcttgcaattttaaacgtttgtcttccacatctgtcatcggttttaacccttctttgtttaaatcttgtgaacgtttaaattgcgtttgagcaattttgagttgagttttcaccgcttctaaatccatactatcgctttttactttgtaaagcgattgttcgattttgtttctggcttgttcgagttttaatgttttttctcgttcaatggcaacaatttgagtggctaaagattttgctttgctttcatacgatgtttctgaaagttgttttgctttcatttgactttcggtattggccactaaattggggtcaaagtaatcttcttttatctccgaaataaataaaatggtgtcgcctttgtttacaaattgaccttctgaaacataccatttttcaattcttccggcaattgcggtatgaatcgtttgtggtcggtgttcgggagcaattgtggttacaaaaccatttcctctaatattttgtgtccatggcaaaagcacaaataataaggtaaagattgaagcaccaattaaaaattgattgaatcgtttggcgtatttacgttcatgaagaaactgaaccgttttaaatcgattcaaatttattttatcattcagactatttttagtgatatttaacatggcttattgatctgaaattaattttcctttttctagagtaagtatgcgagagcatttttgtttccaataatcattttttgaaatgacaattacggtccaattgttttcttttgataaaataaagtcgataatttcattcgctttatctgtatccattttatcaaaaggatcttctaaaaacagcacattgggtttattaacaatggctctggctaataatattttttgcatggaagaggctgagagctgcttgccgtcagtataaataatttcatctaaaccgtttggcatttttttgatttcttcttgcagttttactttttcaataacccatttcaaattttcattcgtaacgtttgggttattaaatgtgatgttttctaaaatggttccttcaaaagtggtttgcccggctgtgattaatccgatttgtgagcggaattgattgatgtttaattttttataattttcatcattcaaataaatattgcctgatttcacttctatgagtccggctaaaatacgtaagaaggttgattttcctgagccattattgccttctaagaagattttatcaccttgttgaatttttaacgagatgttatttaacgtctttttattctcccccggatacgtatggctcaaattttcaatgtcaaaattgattttgttgtagcaataggtgaggggcaactctgcaacttcttcaatttccatgtcaaccacttgccctattttttcaacagaagttaagcaatcataaaaggtttcaataccaataatgattttttcaactgaattaatgactaataagataatgatttctgccgcaacgaactgaccgatgtttaattcttgtttgatgactaaaaatcctccaataaataataatccggcagagatgagtactttaaaaccaatcaattgcatgaattgttttttgattactgcaaaatggctttctctgtaatttaaatactcattgactaatttgtcatttttgtacaaggcaaattcagcctcatgtttgcttttaaatccaaaataatttcttgcaatttcttgaatccaatgggcaactttgtatttgtattttgactcttttaagcttgtttttaatcctatttcaaatgaaaatttaaaaattaaatacaaaacaataaaaaggagtaacccgaaaagaatgaatagcggatgataaatggaaagcaacaacaaaccaaaaataatttgcagcaacgattctgaataatccaaaactaattttgctacacttttctgtaccgttaacgtatcaaaaaagcgattggctagttctggcggatattgattgttgaattcagtatatttaatttttggaaaacgataggtgaattcaaatgacgaacggataaaaattttctgttgaatggtttctgtaatacgaagttgcattaactttaaaataccattaaacgtaatgccgataattaccacgaatactaagattatccaagatacacttaccaatccaccttgaattaagttgataatagcttgaattcctaaaggcaaagacaaactaacaactcctgaaaaaatggaataaaacaacacttgataaatatcttttttatccagctttaaaaggttgatgaatcgttttaaaggcgattcgctattattgtttttcatgacgtttgtagttgttttagcattaaatcagtaaaaaaatcagtaggagttacgttttcagaacaattagtaatggttttgaaatggtttttcaaaaaatgttgatgcaaagaaccttctaccaccaatgatactaaacttttcataaatggatagtttgggtttacttcctcagccatacctattattgagttgatgactcttttgtagatgagaaaatacccatttttattttcatgatcgacttcttttgtcaaatatgattttgaaaattcacacacaacaatttgatgcaattttatttcattaatgtgtggatgattattatcaatgttaatttcttctgttacaatttcgatggcttttgttaatttttctaccggattttgcatgttgttggtggacaaaatcaatttgaattctatccagccccaataccatgaagatagataaagtagcaatttatgtttgttttcaaaatagcgataaatagaactttcattggagccaatgcgttcgccaagttttttaaaagtaaaattatcaaaaccaatttcatcaatcaaatcaatgctgtgttcgatgatttttttgcctaaatcggaagtttccgggtctttgacataaatcatcggactcacatttacctttaaaccggatataatattttgcatagcttaacaatttaccacgcaaatgtagtagtattactattaagcataaaagtaattaacttatttttaggaaaagtaaatgaaaagaaagagataaaaatgttttcgagctatgcaaattaagagttgaaaggtttataaaatgaaaagtcccaccgaagcagaaattaaagtttactttctattataaagagtaaatcccacggagtacgcgggattatagatttctctacggcatatagccttattgtgataagattaaagatttgaaatattaatctgagacaaatataagaaaaaactttttttgttggattacggatttcagtaaaaaaagtaaaattctttttattaattttataaattgatttaaaagcagatagttatggcaaaaattttaggattggatttaggaacgaactcgattgggtgggcgattgtggaatattataaagaaaataatattcaatttaaacttcaagataaaggagttttagtttttgatgctggtgttttgaaagatgataaaggaaaatataaatcaaaaacttctgaaagaactaattttagaggaataagaaaattgaaactaagattaaaagtaaggaaatatgaaaccttaaaagttttaattgaaaatgaaatgtgtccactcgaaatgcaacaattagatgtttggaaaaaatcaaattttaccatatatccttgttcagagacatttttagattggttaaaaacggatgataaatcacataaaaatccatattatttaagaaataaagcaactaaagaaaaactttcaaactatgatttaggtagagtattttatcatttagctcaaagaagaggttttcttagcaatagattagataagacggatgatagtaaaattgataatctaaaagaaaaattaaaaatttatgttgaagaaagtgatttaacaactttaaaattagaatttgaaaatcaatttatagattttgaactggaaggaagaaaagatttagatcctacagaaacaaagattaaaaatatcaaatcaaaaatttacaaaattataaataacaaagatataaagtatagtgagattgatactgtaaaaaaagaaatcaatgattatctaaataaacctgaaacttctggtcccgtaaaaaaaggaattaaagaattagatacacttcttgaagaaaataaatttgatactattggtcagtatttttattcaatttataataaagaatttaatatagtaaaagaaggtgaaaaagaactaatagtaaaaaatgcaaaaattagaaatcattatactggtcgaaaagaacattatttaaaagagtttaatattatctgtcaaaagcaagaaatagataaaaaaataaaagatgcattaataaaagctattttttttcaaaagcctttaaaatctcagaaagggatggtgggttattgtaattttcaaataaataaaagaagatgtagcttgtcaaggcctgaatttgaagaatttagaatgttacaattcgtcaataatattaaaattaagactcctgttgatgaaaaactccgaaaattaactgatgaagaaatcataaaagtaaaaaaacaattttacagaaaaacaaaaccaacttttgattttaaagatttggttgatgaactaattccaaaagataaaacagcaatatattttaaaaataaagaagcaaaaacagcagagtatcttgtaaactacaaactaaatgcaacagtgtcaggttgtccaacaatatctaatttaatttcaatatttggacaagaatggaaatcatttgaggtagttacagataaattgaattctaaaggtaaatatataaaatataattatattgatgtttggcatgcttggcagacttttacagatgcgaaaaaattagaaagctttgcttctgaaaaattaaaacttgataatgtaaaagcagctaaattttcaagtgtttcattaaaaacaggttattctgatttgagtttaagtgctatcgaaaaaataaataaatatttggcaaaaggtttactatactcacatgctgtttttatggcaaatattgaaaatgttataaaggatgaattttggaatgacttaaataaaagaaaagaaatcgaatttgaaattggaagtataattgatacttattctcttgaaaaaaaatatagtaatgctgtaaatgatttactgtctaaatattatgaagataaggaaaatcgagtttattattctaaagaagcaaagcaaatatttagaaaagatttgtggtcaaaatttgaagatgtttttggaagaaaagcatggaataataatgatgataaagacgaatattttgagtattattttaatctgatgcttaaaaatctagaattaagaaaaagaattaaaattgaaacattagaagaaaaagtaaaaaactatttgttaagttttgaatactgtgatgaaaatgatttgaaaaaattatatcacccatctgcaatcgaaaagtttaaagctaaactcttaaaagattatgatggtaaagcttataaagatgaaaatggaaatgaccttttgggtcttggaagtccattgaacacatctataaaaaatcctatggctatgaaatcagttcatcaattacgtaaattgattaataccttacttatagaagggaaaatagataaaagtacaattattcatgttgaaactgctagagaattaaatgacaataacaaaagaaaagcaattgaagaatatcagaaagaaagggaaaatttgagagctatctataaacaaaaaatagaagaattatattttaaagaaactgggagtacaatcaatcctaatgatgatgacattcttaagtttcaatttgctctggagcaaagagaggataaaaaaatagtaacaaaagaagaaatcttaaaatatgaactttggaaagaacaaaaccatatttgtctttatacaggaaaaactattagattgtcagactttttaggggaaaacccgaagtatgatatagaacacactttgccaagaagtttgtctcaagacaatagtatggaaaataaaactctggcagacgctaaatttaatagagataaaaagaaacaattattaccatgtgaactcgataatagtgaagatgttttgcttcgtattggacattggaaaaatagatatatctcattagataaagaaattgaaatactaaagaaaaaaggaagcagaattacggataaagataaaaaagataaaaatattcaagaaaggcataagttaaaaatggaatataattattggtatggaaagtataatagatttgttatgcaagacattaccgatggatttaaaaatagtcaaaaagttgatgtaggtttaattactcgatttgctcaaaactatttaaaatcatgttttgaaaaagtgtattcggtaaaaggaactatgacagatgagttcagaaaattatgggcaaaagatgttttttataaagaagaaaatgggaagttagaaaaaaacagagataaccatacgcatcattgtaaagatgcagttgttattgcttgtattacaaaagataaatatgatttattagccaaatattgggagaaggaagacgagaataaaaaagaagaggcaaaagaaattataagaaatacaattccttggaaaggtttcgcacatgatttaaaagaaattgaagaaacagttttggtaaaacatatcaaaaaagatgtgatgaaagtaaccacctataaaaaattaagaaagaaaggaaagttacttcatataccagaatatgtaaaagatgaaaatggagaaataaaattagatgcaaataacaagaaaataaaagtcacctataagcatcccgaaacgggcaaagaaattatagtttatcaaaaagataatgaaggtaagccattgccaattattcaaaaaagtgattctgctagaggttcacttcataaacaaagttttattggagctgttgctaaaaggatgcttgatgaaaatggaaaacctttacaaataaatggtaaatatattcttcaaaaagactcaaaaggtaatgtcgagaagttatacgtaatgcgaaaagaaataacaaaattaaatgctagtgatattgaaaaaatagttgacagtaatattaaaatgattattcaaaaagcagttgataataaaattttaaaatttaaaaaagaaggagctacaattgaaaaagattgtattatatggcaaaatgaggaaaagaaaataccaattcataaagtacgtctttttgttaaagatactccaatagaaataaaacaacaaccaaagcaaaatcttcaaacgaataaagcaaataggaaaatacataagcatttaatttatgcacaaaatgatgataattatatgatagctttatataaggatgataaacataaagattttgaaatagtaaataatttagattatataaatttaaagaaagaaaatcaaggtttctaccctacatctaaaattaaaaaagtaagaggaaaggaggtaataattccaattatcaatagaaataaaaaagatttaattttaaaaaagggacaaattgttatttttcttgaaaagggagaggtaattaatgatttaaatactataagtttacttgaacaaagaatttataaaattgaaggtatttctagacagtatgataagaaaaatgataatgaatatggtgtattaaattttaaaaaatatgatgaagcaagaaaatcagacactgcaaaaaaagatgattacagcgaagatggagaatttaagttaaatgaaaataagccaacaagaaaaatgagtcataatcaatttaatgcttttgttgaaggtatagattttatgattacaccaattggaaaaattcaaaagttgtaaaacaattatatttggtgtatatttacaccacaaaataataaaatcatggcacgacaaagcatcacattagccaatcaaaacgatgaatggttaaaagaacaagtagcgaaggaagaatttacgagcaaaagtgaagcggtaaattatttgattaaacaagctcgtgaacgcgatgcgtatcatgagtatgtgcaaatgaaaattgatagaggtttaaaaagcggttatagcacaaaaacaaaagaggaactttttgaagaaataaaaaaacgcttcaatgtatcattataaattgtctattgaagcggaaggcgatattattagaatatttgaatatgggcttgggcaatttggggttttgcaagcggcaaaatattatgatatgttgtttgaatgtttccataaaatagcaagtaatccttttatgtttcctgttaatacgaagtatagaaagattgatagattttgtgtatgtggtgttgatacgatttattacaatattaaaggaaatcaaatagatattgtcaccatcataggaagacaagatttttaaaagttcattgacataaaattttcaatgtcttaaacaacttaaaccacaacggagtttcggcgatagctcactccgttgtggtttgattaaagatttgaaaacacgatattaatgaaaggtttattgcttaacgaaaatatgttgtggtttgattaaagatttgaaaacacgatatttacatctgcagtagcccattgcacccgctcgttgtggtttgattaaagatttgaaaacacgatattttgtacacggttgggatagtgaatcgactcgttgtggtttgattaaagatttgaaaacacgatattttgattgaagaaattgagaccatgaccaatgttgtggttagattaaagatttgaaaacacgatattagaactcaaaaaacaaaaacaggataataagttgtggtttgattaaagatttgaaaacacgatattnnnnnnnnnnnnnnnnnnnnnnnnnnnnnnnnnnnnnnnnnnnnnnnnnnnnnnnnnnnnnnnnnnnnnnnnnnnnnnnnnnnnnnnnnnnnnnnnnnnnnnnnnnnnnnnnnnnnnnnnnnnnnnnnnnnnnnnnnnnnnnnnnnnnnnnnnnnnnnnnnnnnnnnnnnnnnnnnnnnnnnnnnnnnnnnnnnnnnnnnnnnnnnnnnnnnnnnnnnnnnnnnnnnnnnnnnnnnnnnnnnnnnnnnnnnnnnnnnnnnnnnnnnnnnnnnnnnnnnnnnnnnnnnnnnnnnnnnnnnnnnnnnnnnnnnnnnnnnnnnnnnnnnnnnnnnnnnnnnnnnnnnnnnnnnnnnnnnnnnnnnnnnnnnnnnnnnnnnnnnnnnnnnnnnnnnnnnnnnnnnnnnnnnnnnnnnnnnnnnnnnnnnnnnnnnnnnnnnnnnnnnnnnnnnnnnnnnnnnnnnnnnnnnnnnnnnnnnnnnnnnnnnnnnnnnnnnnnnnnnnnnnnnnnnnnnnnnnnnnnnnnnnnnnnnnnnnnnnnnnnnnnnnnnnnnnnnnnnnnnnnnnnnnnnnnnnnnnnnnnnnnnnnnnnnnnnnnnnnnnnnnnnnnnnnnnnnnnnnnnnnnnnnnnnnnnnnnnnnnnnnnnnnnnnnnnnnnnnnnnnnnnnnnnnnnnnnnnnnnnnnnnnnnnnnnnnnnnnnnnnnnnnnnnnnnnnnnnnnnnnnnnnnnnnnnnnnnnnnnnnnnnnnnnnnnnnnnnnnnnnnnnnnnnnnnnnnnnnnnnnnnnnnnnnnnnnnnnnnnnnnnnnnnnnnnnnnnnnnnnnnnnnnnnnnnnnnnnnnnnnnnnnnnnnnnnnnnnnnnnnnnnnnnnnnnnnnnnnnnnnnnnnnnnnnnnnnnnnnnnnnnnnnnnnnnnnnnnnnnnnnnnnnnnnnnnnnnnnnnnnnnnnnnnnnnnnnnnnnnnnnnnnnnnnnnnnnnnnnnnnnnnnnnnnnnnnnnnnnnnnnnnnnnnnnnnnnnnnnnnnnnnnnnnnnnnnnnnnnnnnnnnnnnnnnnnnnnnnnnnnnnnnnnnnnnnnnnnnnnnnnnnnnnnnnnnnnnnnnnnnnnnnnnnnnnnnnnnnnnnnnnnnnnnnnnnnnnnnnnnnnnnnnnnnnnnnnnnnnnnnnnnnnnnnnnnnnnnnnnnnnnnnnnnnnnnnnnnnnnnnnnnnnnnnnnnnnnnnnnnnnnnnnnnnnnnnnnnnnnnnnnnnnnnnnnnnnnnnnnnnnnnnnnnnnnnnnnnnnnnnnnnnnnnnnnnnnnnnnnnnnnnnnnnnnnnnnnnnnnnnnnnnnnnnnnnnnnnnnnnnnnnnnnnnnnnnnnnnnnnnnnnnnnnnnnnnnnnnnnnnnnnnnnnnnnnnnnnnnnnnnnnnnnnnnnnnnnnnnnnnnnnnnnnnnnnnnnnnnnnnnnnnnnnnnnnnnnnnnnnnnnnnnnnnnnnnnnnnnnnnnnnnnnnnnnnnnnnnnnnnnnnnnnnnnnnnnnnnnnnnnnnnnnnnnnnnnnnnnnnnnnnnnnnnnnnnnnnnnnnnnnnnnnnnnnnnnnnnnnnnnnnnnnnnnnnnnnnnnnnnnnnnnnnnnnnnnnnnnnnnnnnnnnnnnnnnnnnnnnnnnnnnnnnnnnnnnnnnnnnnnnnnnnnnnnnnnnnnnnnnnnnnnnnnnnnnnnnnnnnnnnnnnnnnnnnnnnnnnnnnnnnnnnnnnnnnnnnnnnnnnnnnnnnnnnnnnnnnnnnnnnnnnnnnnnnnnnnnnnnnnnnnnnnnnnnnnnnnnnnnnnnnnnnnnnnnnnnnnnnnnnnnnnnnnnnnnnnnnnnnnnnnnnnnnnnnnnnnnnnnnnnnnnnnnnnnnnnnnnnnnnnnnnnnnnnnnnnnnnnnnnnnnnnnnnnnnnnnnnnnnnnnnnnnnnnnnnnnnnnnnnnnnnnnnnnnnnnnnnnnnnnnnnnnnnnnnnnnnnnnnnnnnnnnnnnnnnnnnnnnnnnnnnnnnnnnnnnnnnnnnnnnnnnnnnnnnnnnnnnnnnnnnnnnnnnnnnnnnnnnnnnnnnnnnnnnnnnnnnnnnnnnnnnnnnnnnnnnnnnnnnnnnnnnnnnnnnnnnnnnnnnnnnnnnnnnnnnnnnnnnnnnnnnnnnnnnnnnnnnnnnnnnnnnnnnnnnnnnnnnnnnnnnnnnnnnnnnnnnnnnnnnnnnnnnnnnnnnnnnnnnnnnnnnnnnnnnnnnnnnnnnnnnnnnnnnnnnnnnnnnnnnnnnnnnnnnnnnnnnnnnnnnnnnnnnnnnnnnnnnnnnnnnnnnnnnnnnnnnnnnnnnnnnnnnnnnnnnnnnnnnnnnnnnnnnnnnnnnnnnnnnnnnnnnnnnnnnnnnnnnnnnnnnnnnnnnnnnnnnnnnnnnnnnnnnnnnnnnnnnnnnnnnnnnnnnnnnnnncaaaatccccaaaatcaaaatccccaaaatcaaaatttagattatcaaattttcgattataatcattccaacaatcttctttttcaaaaaaattcagaaatcaaatatgttgtagaattaaatcaatatggattaattgttgataaaaagataaaatggttgatggatcaatatccttacgtggatattcataattatatagttatgccaaatcattttcatcttattttagaaattgatagaaataaaactgctcaaaattctacaaaaataaaatcactttcaagtttgataggagcattaaaatctacttcatcaactgaaattcataatgcagggttgataaaatttgcctggcatcgttcatttcatgatcatattataagagatgaaaatgcttataataaaatttttgattacatcagtaataatcctaaaaattggttcaaagataagttttatgcaatttaaaacaactccaattgcgttggttgaggtgctttaggtacttcggctttgccccaaaaattgagaatattgccaaattgtttatccgtaattcgcaaaacactcacttttcccaaaggtggcaaaagcttgtgaatacgtttttcatgtacatccgcactttcgctactcgcacaatgacgtacataaaccgaaaattgcatcatgctaaagccatcttttagcaaattgtttcgaaatccggaagcatttcttcggtctttcttggtttcggttggtaagtcaaaaaatacaaatagccacataattcggtatccgtttagttccataatgttggatatttgattttttttcgttcgccactatagcattgttgtaatgaactggctgttttttgcaaagcaaccatcaacggacttttctcttctttaaaataaaccgttcgggttaaaatttgtaacagttctgctttaattttggtgttcaattcttgttcatcaaattgctgcattaattcatacactttttcatccaccaacggacgaaagggttccatgatgtcatccgccaaagcaaaagcattgtatttacttttatgatgaatgccaagcgtattcaataaaccactggccgacaaagctcgtgcagttgcagctctcagaatggcatagccataatttagaaaattattaggataatgcccaaatcgttcccgtttaaaatcagtatccaaaatcggttccgcttcattggattgaaaaaaggttttccaataaaaattggccgctacaccttccatgtttccggtatcaccactcaacactttggaagctaaaaagtcaaagttgtttttcttttgtgtaatttttgctaataaaatcccttgattggtgattttttcaacaatcgtttgttgccataattgtttttttaatggggcagatgcatcaatttgatttttgaaaatttcttgttgaatatgatgactgtttagattcatgaaaaggccatttggtaaatgatttttaccacaaataatgactgaggcgttgttttccaccaataaattcatcgccggaaggctcaaataaatttcagcatgatcaagcagaataaatcctatatcttcaataggaatggaactttctcttgtttcggttttaattaccaattgaagatttttacaagtaaccgatgccttgttttctaaaagtattgatttttttaacataaaaaggacaattaagaatagtcaagtttatgaaaatcaatcacatagacaaattttaataaaaaaacccgatatactacgcatatatcgggttaaaattgaattatcttcgagttaaatcaatgattttccggtcattatcgcgggtttttcaatgcccattaacgttaaaatagagggagcaatatcacccaaaactccattttgaatggaagtcaattctttatcaaccaaaatcaccggcactgggttagttgtatgagcggtatttggtgttccgtctgggttaatcatcgtttcacagttaccgtggtccgctattactattgtggtataatgatgagctaaagcggtttcaatcacttctttcacacaaacatcaacggcttcgcaggcttttatggcggcttccatcacgccggtatgtccaaccatgtcgccattggcaaaatttaagcacacaaaatcaacttcttctttttgtaattcaggcactaaagcatctttcaattcaaaagcactcatttcaggctgcaaatcataagtggctacttttggcgaattgcgtaaaattctggtttcgccttcaaaaggttcttctcgtccaccggaaaagaaaaaggtaacatgcgggtatttctctgtttctgcaattctgatttgttttttgtggtttttttccaatacttcaccaagcgtttcggtaatattgtctttgttgtaaatgacttttacattctgataggtttcatcataattcgtcatggtcacataatacaaatccaatttatgcatgttttgttcatgaaaatcccgttgtgataaggcttcggttaattgtcttccacgatctgttctaaaattaaagaaaataaccacatcgccattttgaattgttgcaagtggtttaccattattatccgtcatgataataggtttaatgaattcgtctgttacgttagcatcataacttttttgaatggtatctagtgcattggtagaaggcgttccaattccattcactagcaaatcataagctttttttacgcgttcccatcttttgtcacgatccatagcataatatctcccacaaacagaagcgagttttgccttggtatgttgaagatatttttccaaagattcgatataacctttaccagatttaggatctacatcacggccatcggtaaaggcgtgcacaaaaacatattctaaaccaaaatcttctgcggcatccaataatcctctcaagtgagatgtatgcgagtgaacgccaccatcagaaaccaaacctaagaagtgtacatttttatgattgtttttcgcataggaaaaagcattttgtaccactttttcttcattcaatgttttatgttgaacagccaaattaattcgggttaactcttgatagatgattcttccggctcctaaattcatgtgacctacttcagaattacccatttgaccctcaggcaaaccaacatttaaaccatctgttcgcaattcagcgtttggatatttttgatagagtgcatcaataaaaggggtgttagcgtgatcaatggcagaaacttttgggtcaggagaatgtccccaaccgtctaaaatcattaaaattactttcttattcatgttcggtttatttcgaacaaagataagtaaagcgagtttttttcaagcgaaagattatgattttttaacccagttttttgctttgttgtaatctataaaataacgtaaactcactgaaaaaacatgatttagattgtcttcaaatgttttagaaatatttgagccataatttttgtcaatatcacttctgaaatcttgagcattatttctgtataaagccgtaagctgacttcccggagcaaaccaccatgaatacgacaaatcaaaattccacaaattgaaattagcatttttattggaagaataggttccgttttctgtaaaagttccgtcttctaataaggtgtgatatttgatgttttcagcaaatgaccaataatgacgagttgataaattaaaggtcattttttcatttatggcaaattttccggaaatggaattgctaacggttgttctatttcgttcggctaaaattatattgtcatcttcgaaatcaacccatccaatatcactgttttgacggttaaaactcgttcgatagactaaggtcaatttatctgaaaatcggtatcgtggactcacaaatagtccgtaaccccatctattttcttgttccgttgtaaaaatagaaggttcaaaatcaattgcaaattttcgattataattggaagagaaatacgcccaaaaattagcatttacaggaatttgaaccactctacccggtattctggcttcataaaaatcatacatctttgcggggctaaaaccaattccgtaaccaataaaatcattcttaagtgtgctcgaatttacattgacattaatatagtgttccattgattttccggtggtgttttcaaattgattataataattgaaattgattcggaaggaattaaaaacctttgttgggtttaaaattcggtaatttacattggtatatatattatgataattcgtgataaagttgattcctaaatcattattgtcaaattctttagacatatatttcgaagcaatcgaataccgtaatttgccatatgtttttgctaaattcaagtaggcagtatacccattgtaatttctttcatcatacacactactcatcttcaaatcgccggaaacattatatttattgccttttgaatttaaatcatataccaaagcggtaacatttgcatctctgaaatcgccaaaacgggtaacatttgtattcacaaacgatacagatgaattttggttaaatcgttgatcaaaaaccaaaacgttataattggttaaaggttcaactaacacactacgtgtttcatcggtttcggtatttttgaccttcacaaatgttctttcggtaattgcatttagtagtccaattcctaaaccatcttttgtacgccccgaaatttttaatgcattaatcaaatttaccgcttgcgggaaatcctgaacagtttcgttttcattcaattcaggataagtacttggcggaccaccaattcgtctggaataaaccaaatcgccttttgaaaacaaatcagttccttccgtaaaaaaaggtcgattttcattaaactgttgttcaaaaggacctaaatttaagactacattatcaaaggccgcttgaccaaaatcaggtactaaaatagcatcaagcgtaaacgattcattgatgccgtatttgatgtccattcctattttaccggtgctttttgttccattattatttgattcaacatagccggaagtgtagggaataaaaaataaacgagtgggtggagtaatgttttttatcccttttagttcgccggcttgattgataaatgatcctattgctctatcaattgggttccaagtgaatttttgacgtaatcgtcgcaattctctaaaaaaattaattccccatgtttgatttgcctctgatgaaaaacgcaaagctgcgtaaggaatttccatttcaacttgccaaccttcttcggtaatttgcacagcactgttccaaatggcatcccaagaataatcttcgccattttcggtggctaaacaatccatttgaactccagatgccgagacaaaaaagcgaaaatcttgttgaccatcattgaaaccattcacaaaaatgccaaataagtcagccgttccaaagttatcacgttgtgtgatttctttgttgatcaaatgcacctcggagtcgaaaagagttgccgcaatataaagagcattattgtcataaatcactctaacttcagaacgaaattcttttttttcaggtgttccattgtccggttcaaacataaaaaaatctttcgcaattggcgttttcatccaaatactttcattgaattttccatcaatggttatggattcttctgagcgaatggcttctgtttcttttttctgtccaaaggaaagactagaacaacaaattaaggtacaaaaagtgagttgatggatgattttcatgttgattgatgatgattcatttgcttgaaaaaaaccttttttaaagcaaacatttctaaatagacgtagtttttgttttgttgttacagttgaatactaattttcttttttcttcgttaatcctacatcataacttaatttatagtgaaatatttgatttttagtgaaataaatttgcttttaaaattttaatttatatttttggcgtcccaagtctaatttttaacctatagaataccaatgaattacaagcttttaccggtgctgttatttggaatgttttcttttaccacaccgaccaaaaataccacagacccaaaatacattgctgcttcaactaaaactgctttcgaatcgaaggtgttttcattgtacaataatttgaacagcaataactttaaacttcctcaattagaaagtttttctaaagcgttagaagggttttatcaattaaaacaaaaaggaatcattcaaaacgatattttaacgttagttgatttcagtttatctgccaattcaaaacgattgtgggtaattgatatgaccactaacaccattttataccatactttagtggctcatggtagaaattccggtgaggaatttgccgctactttttcaaacaaatcagaatcttttcaaagtagtttagggttttatcttacaggtgaaacgtacattgggaaacacggattatcaatgcgtttagatggtttagaaaaaggaattaatgacaatgctcgcgacagagcggtggtaattcacggagctgattatgtt

SEQ ID NO: 1031 - DNA, 23585 bp, synthetic construct
  misc_feature 1..23585: note = Synthetic
  source 1..23585: mol_type = other DNA
atcttttttattccaagaatacagcgacgggaaagcctgcttaaataacttgacgccattccggtaaaaataattcaaatcgccgtccggcagataaaacttgccgatggtaatgcccatattcttcgacatagtgacgacatccgccagcgtctgctgcccgccatccggcgcaacgaacaacgcgtaaacatcgccggaactacgaaataaaatcgcatacgagccatcgccagtctctatatcatcaaataaaatttcgtcaatcggcaaattgacccgaaacacccgcggaatcaactcattgcactgatcgcgccgcaacttatcgtactgaacatcattggctgtcatacatttgactatactattttagagacaaaaagtcaatattatgccaaagctttttcctccgcactaccgcgaattgccggataaatctcccgtaaacccataaaaaccaatcaaaaaagcaccaggtaagggtgggcatcacctggtgctttgtcgcccttcaacccacccgagctctcgtttcagcgaagcgtcgcggctaaaactccaaaagcccgcgcctgattatcatcaacaccatccagtgctcgccttaactgagtcgccttaaaaaagggcagttaaaggggttagtatgcgcgtaacgttgaatcgcaaaaagtggagggtaagaatacttaatgccattgcgcgcaacctaacatattagttagaatagggggtataaggtgcttttgattagcgctttaagctaaccaatcgctcctgattatagcaagcatttgacaacatgtcaatactttttatcacaaaagtcatggaaatcaatagaatctgtccagatgagcatatttttacccagaggttagcaagtattgctaatccaccgaaaagcttgtgttttatgggaaatttgccagatagcggcgcaccggtcgtggcaatcgtcggttcgcgcaagccctcggcgtacggccgagaagtgaccgagcagttggcgagcgacctggcaaaagccggctgcaccatcgtcagcggcttggcactcggtatcgacggcattgcccaaagggccgccctggaagctggcggcacagtcatcggcgtcattcccaatgaactgcccgacatctcgccgcaaaccaattacaaactagccatgaacatcataaaaaacggcggcgctattctgtccgagtggaaaaaaggcgacggtaaagtcgtcaatcgctggagctttttagagcgcaaccgcttggtctctggtctgactgacgccgtcatcatcaccgaggccgccgagcgtagcggcacgctgaataccgctgcccacgccttatcccaaggccgcgacgtctttgctgtaccgggcaacatcaccagcccgctgtctgctggctgcaacgcgctgctcaaacaaggcgcctatcccgccaccgaggccaaagacatcctgcaaataatcgcgccggaacaattgaaaaaaccagaccaaaaccaattaccgctcggcagttcgccggaagaaacgatcatcattaatctgatagccggcggcattcgcagcggtgaccaattacagcaacaatcaggactgtcggcgtcaaacttttcaacggcgctaactatgctagaaatcaacggcgtaatcaagccgcttggggcgaataattggatgcttaaataatgccggtggcgccaggcgtcaaaaaaccagtcagcggttcgacctggtgattatacccgatcaaaccgtccatgcttgctactgcatgctttttagtactatccttttgctatggaacaaataccgaaaaaaccagaaaatttgccaaatgacggagcaggcagcgacgaaaaaccgttttttaaccgcaaaggtattccgccgacaatggtcagtattgccggcactatcgggtcaatcgtcggcataagaaatattgataaacactggggtcctattatgctggccgccagttcgtttggcgaccttttggacggaaaaatggcacgcggcgaaattgatattgaaaaaattatcaggaaatttacaggaaagaatgaagactcttcagataacccagactcagaaaacaaagaaaccggcgaaaccaggctcggcacgcttgctgatcatatcggcgacaaaattaagatagctgccattctatacgagctgcaccgaagaggcgctgcgccaaatcttgtactgggcggtattgccgtgtctaacgcgtttaatgcggggatgaccgccattaatacggtccgccatcctggagaatctcgcccagtaaaggctggcaaaataggcatggcatgccaagtcgtgtcagtcgtgtcttacgccataggagactttttagaagcccgcggaaaaaacactgccggagaaattctgcgcaaacttggcactgccgcgttcaccgccggcgtaccgtttatgataaaagccggcatagaatacgccgaagaagctttcaaagagtaatctcgctaatcgtttgactttctgtccactaattgatatatatatatatcagattttcaaaaagcgaaggtctgatgttatcaaatagttacgcgaaaatttggcgaaagggaataatattatgggaagaaaagaagatttaagacgcaaacaccaagaagaatgggagcagcaacaagaaaaatggaaacgcgcacaacgttggcaagttcagtttagaagcttggggatgttcccagaattctttgtacaaggtcctccagagcaaagaatgacagagctatcgtttgatactagcgagctcgagaccggaagaaccgaaccgcccgatgatcaaataagaatccgcgacggcttcctagttgaaggtcgtgtcggtgaaattgatagcagcgagaaagaacgcttaagaagtatcggtaggatagttgcgaaatctcttagggtcgccggatatgattctgaaacagacggttttatgtttcttgcacaacaaggggaacttcttgatgatctgtcagttgtatacagggaagttaaagaaatcttaagccataatcatgattcttccgatgacgaacaatcacaaatgcaataactcctgcgccgccaaacctctttggcggttgtggttacacggcgatttggtataatatagagttatgaaaaatctcgttatcgtcgagtcgccagccaaagctaaaaccattgagaagtatttgggcaaggattttcatgtcttatcaagcgtgggacacatccgctcaatcgtcaaaaaaaccaaggacggcacgccgccaattgatgtggcgaatgacttttttgctgtctacgaagttgaccctgagaaaaagaaagtcatcagcgagctaaagaaaaacgtcaaggccgtcggcaaagacaatgtctggctggccaccgatgaagaccgcgaaggggaggcgattgcctggcatctctgtaaagtgctggatctaccgattgagacgaccaagcgcatcgtcttccacgaaatcaccaaagacgccatcaccaatgccatcaaaaacccgcgcactgttgatatgaatctggtgcaggcgcagcaagcccggcaaatccttgaccggttggttggttttgagctcagcccggtagtctggcaaaaagtaccgggcggcaagtcagccggccgcgtccaaagcccggcagtgcggctactggtagaacgcgaacgagaaattatgaaatttgcaggcagctcgcagttcaaagtcactgccatattcatccacgacggtcaagaattcaaagccgagctcaaccaaaaatttgattcggaaacagccgctcatgaattcttaactagcctcaaaccggccacgttcaccgtcagcgacatctcgaagacgcctggcacccgcaacccagccgcgccgttcacgacctcgaccttgcagcaggaagccaacgccaagcttggcttcagctccaaagccaccatggcctcagcccagcggctctaccaagacggtaagatcacctacatgcgtaccgactcggtcaatttgagcgggcaggccatcgccagtgcgactgaatttatcaagcggctgtacggcccggattattccaccgtccgcaaattcaaaaccaaatccgcctcagcccaagaagcccacgaagccatccgcccgaccgacatcacccgcgaaaccgtcacctcaaatgaatacgaccaaaaactctacgacctcatccgccgccgcactctggcatcgcaaatgtcggcagcgaaattggagaagaccacggtggtaatttctatcgagaaagcgctcgtttcaccatcctcctccagagtacactcttcactcgcatctccaccggagatggctcgtgagcgttcggctgaaacgtccgctcctcgcgaacgtttcacagcctctgtcgaaggagatgaaacgagcggcaccgactcgaccgatcagctgaagcctcgagcgacatctcagaaaaaatctgggctggctttagcgggtcccggattattttatgacgatgtccgagaggcgaccgcaacagacctacactttgagtccaaaggcgaagtcatcacctttgacggcttcttgcgcgtctacggcggcggcaaagacgaactcttaccaaaactccacaccggcgacgcactcgaaacccacgacatcaccgcccgccaaaccttcgcccggccgccgagcagatacaccgaaggttcactggttaagaagctcgaagacctcggcattggccggccaagcacctacgccaccatcatcgacaccgtccaaacccgcggctacgtcgaaaaaggcgatggcgaaggccaaccgcgcgacgtcatcgtcctcagctataacggcgaagaaatcagtcgcgacgtcgtccaggaaaaaaccggttccacccgcggcaaactgatcccaacgccgagcggggaattgatcgctgactttctgaccgaccatttcacgcaaatcgttgattatgatttcactgctaatgtcgaaaccgaatttgataaaattgccgccgccgacctagccaaaagcgccatgctccacggattttacacgccgtttcacaaattaatcgaacagtcaggcggcatcgaccgcagcaaagtcggcgccaatcgcgaagtcggcatcgatccaaaatctggcaaaccaatcctagcgcgcttcggtcgctttggcccaatgctgcagctgggcgccactgacgacgaggacaaaccgcgctttgcgccgctaccgaagggtgcgaaaattgagaccgtcaccctagaacaagcactagaaatgttcaaactaccgcgcgtcgtcggtcaaaccgaagacgggcaaggcatcaaagccaacatcggccgctttggcccgtatatccaagttggcaagctcttcgtctccatcaagcccgaagacccacacaccatcaccctagaaaaggcccgcgaactctacgccgccaaactccaggccgaagccgagaagaatatcgctgacttcggcgatggcgtcaaagtcctcaacggccgctttggcccgtacatcaccgacggcacgaaaaatgccaagatccccaaagacaccgaccctaaaaccatcactcatgagcaagccctagagatcctaaaagccgcaccggcaaagaacacacggcgtccaggacgccgcagcagtacgtctgctcggcgtaaaaaatagcctaaaagagcagctttaatcgccgcgccacatttcgcttatactgtatatagataattccataatcagaaaaaataaaaagtctcatatcatccattgcaaaaaacgtaaaatacatgctataatttgaccagacaattatagcaattagtccttgacattgattaattgtcattgtataatcaaaaacataattcaatcaacaataacctgtggtgaggcagagaggacgtttctatagtatgagcgaaacaacaaaaaccgaacaagaatctgtactaagttctgtcatcaaagatattctttccaatgtaagccaagagcgtgaaaaagaaattatttcgcggcgcttcggtttgtacgaccgcaaggagacgctggaacagattggcgatatgctgggaattacccgcgagcgcgtccgccagctagagaaggcgattctggtgcgcctgcgcctgagcatcaccgacggcaatataccgtcggtcgttgatatagagaaggaattgacatctcatttgtcagagatggggcggatcgcgcgcgtgcaagatttggcatcgcactttttgggacgtcaagccacgccgattgaaaaagcccacacggcatttatttccgagctagcgcaaaacatcactattatcaatgaaaacgacgattattaccaatcggcagccattagctcgctgggcgacgaaaagactatcaaaacgaaaatcgaagaaatcgtcaagtttattaaaaagcacggccagccgattactgccgaagaaatgcataaaaagctaagctacgaacatccgtcgaacatcgccgcgctggcaagcaccagtaaaaaactggctcaattaaagggaaattggggactaatcaagtggccgacagtcaacccgaaaaacatccgcgataaaatattcgttatcctggaagacaacggcaagccgatgcacttctcagacatctccaaggccataaaagacagcgattttaagcgcaaaaatgtcaccacgcaggcaatccacaacgaacttatcaaagacagccgctttattcttatcggccgcggtatttacgcattgggcagctggggctatagccgcggtacagtttccgacatcattgccgacatcttaagagaagctggcgagccgctgcaccgcgacgaaattgtccggcgcgttctggacaaacggcgcgttaaagaaaccactatcttgctcaatctgcaatccaagccgcagttcaaacgcaccgctaaagccacatacgttttggacgaaaaagcttaagttgcaaactcctgtaagaggtgagataatttaactagcatgcaaattatttcatggactattgagatgctgctgcaatggtatgtttggatgccaattgttgccatcctgtctttcttaacttggcgcaattaccagcgcgccgatgagtttgagccggccgaaagcgtcctgttgattctggaaatccctaaagccaacgataaaaaagaactagccgccgagcagctattcgccagcctgcacggcattttgcgcgataaaaaagaattgcgcctatctggcggacagcaagagcatattagctttgagatcgcctcggttaacggccagattcgcttttatgtttggacgccaaggacgctgcaaagtttcgtcgaggggcaaatttactcgcaatacccaactgtccagattcatcaagccgatgaggattataccgagcacgaacgcagccacgaaattgcctattctgccgaactaaccatgaccgcttccgaatttttaccgattcgcacctttcaaagctttgaagtcgatccattagcaggcattaccggcacgctggcaaaattggagacaaccggcgaagaattatggattcaagttttaacgcggccgattaccgatgattggcagcatgccgcagatagatatattgataatttgaaaaatgggcgcgtactatcattgccaggtttcggcgacggcatgcagtggcttgtcagcctgattggcgcattatggcagccgccagagcctggagaaaacggcgcaaaaactgtagaattatccgagcgcgataaaacccgcatcgccgaagccgagaaaaaatcgcaaaaattaggctacgaagtaaaaatccgcttagcgtatctaggcgaaagccaaaccaacgccaagctccgtatgcaggcgctggtcggcactttcaaacaatttaactcaaccaacttgaacggatttaaggctacgaaatcagcattcggcaaagaattcttaaataaatatcggcggcgggcattttacggcgaaggatttgtcctaaatatcgaagagttagcctccgtcttccacttgccgcacaccaatgtcgagacgccgaacatcgtctgggccagcgccaaaaccgccgaaccgccgtccaagctgcctgtcctgaccggcagcgacgccaacgacgaccagatttccgcctttggcgtcaccaatttccgcggtatcaaccaccaattcggcatgctgcgctatgaccgctcgcgccacgtttacatcatcggccaaaccggagcgggtaagtcggggttgctagagttattcgcgctcagcgacatttttcacaatcaaggttacgccatcatcgacccgcacggcgactttgccatcaacaacatgaaattcatccccggctcacggctgaacgacgtcgtctatttcaacccagccgacaccgcttatccactcggcttcaacccgctagaggtcaccaatccaaaccaaaaaaccaacatctcatcagaggttatcggcgttctgaaacgcatgtttggcgaaagttggggtccgcggctagagtacatcttgcgctacaccatcctggcgctgctcgaccggccagagacgaccatgcttgacatcacccgcatgctgactgataaaaccttccgcaaagaaacgctaggttattgccgcgacaccgtggtcttgcagttctggaacgtcgaattcgctagctggaacgacaagttcgtcgccgaggcggtcgcgccagtcctcaacaaggtcggcgcctttaccgccaatccaatcatccgcaacatcatcggccagccaaaatctaccttcaacatccgtcaaatcatggacgagggcagaatcctcatcgttaatctatccaagggcctgatcggcgaagacaatgccgctatcctcggctcattcttggtcaccaagattcagctggctgccatgagccgctcggacatcccagacatccgcgaccgccgtccattctatctttacgtcgacgagttccagaacttcgccaccgactcatttgccaccatcctgtccgaagcccgcaagtacggcctcaacctgaccgtcgccaaccagtacatctcacagatgaatgaaaccgtgcgcgacgcggtgtttggcaacgtcggcaccatgatttccttccgcgtgtctgccgacgacgcaccaatcctcgccaaacaatttgagccgaattttgaagccctcgacctcttacagatgcacaatcgcaacttcgtcatcaacatggtcatcggaggagagaagacgccagccttttccgcgcgcacactggaactcccgccgagccaagccgacaacacaccgcacatcattgaacattcgcggcgcatgtattcgcgaaacagggaagacgtcgagcgagagattaacgccgccattatgccgaatcatcgcccaaaaaatcaaccggcccaaccgcgcccgcaagccgtcgccgcagctgcattagcccagcctgttaaaaaggccgccagtcaaccagctcaaaaaaccaacactgccgccaacgcccgcccggctacgccgcaaaccgccacgaacagcggcgaagttgtcctgcaaatccgcggcaataacgcgcccaaccagccagccgcagccgtaaaagccgatacagcacctaatacaaccgcagccgctgcaccaaagaaacgccggcgaaggcgaaagaagagtgcgacaagcgcataatttgcccttgcaacaaccaaaacattcagctacaataacagtacagtcccttaagtaaggattgtaccaatatctaaattgttttaggtttctataataatttagcaacttagggcggcgattttggtcgtgcagctacggttgagaattctattgtgaatctaaagcaaagctctaatccgctcactcgttgggcggattatcttttgtctatgctcgttttgcttaagctttcaatcacagtgatttggttgtataatcatactcagttaagcacaaaaggaatctcacgcatggcacaaaaatcttcatattcaccgaaaaaatactcactagggctagacatcggtacctcctcagtcggctgggcggtattagatttagacaaggagcgtattcacgatttgggagtgagggtttttagtgggcaaatcgagaataaaagacggcgacaattttccagtgctcaacgtataaataagcgaaaaaagcaacgcctcaagcatttaaaggcggtctttataaataatgggctattaagctcagatgagataaatttagcccttaaggatcaaagggttacagaaaacatttattcgctacgtgcgaaagctgctactcagcaaatttcacatagagagctgttcagagtgctgtatctgattgctaaaaaacgcggcttcaagagcaatcgtaaatcagatccaaacgatagcgactcttcagacactaagttcaaaaaacagctagccaaaaactcggcgacagcaaaaaagtatcagaccattgggttaatgctagaaaatgatccagtctacgccaatcaaaaacacaattcgaaagataattatattgcaacatttcagcgtgaagatattcgcaaggaagttgagataattctaaacaaacaatttgaaaaagaattgaacgctccccagacaagcgataaatacagaaatattattgaagccatactcgatgaaacgaccgttgatgacaacggtgagaagcaatatcttggtatgtttacacagcgtccatatactaacgcaagtctaattgaaaaaatgactggcttttgtgagtttgaaaaaactgaaaggcgctatgtaaaggccagctacacaacagaagagtatatcttccttagcaatctaagtaatatagtcattttagatactaataataatgacgaaaaatactacatcggtaaagacggcatagggcgactattagcactagcaaaacaaaaaaagaatataaaatgttccgacttaagaaaagtgctaagtcttgataaatcaatctgtttttcaagcagagcaatagaagacacttaccgcgatagcattaaacatgccaataaaaagtactccgcacctcaaaataaagaaaagctagcagaagcgctagaaactgctagaaaaattcgagatcgtagtcgtaagagtatagaaagacaaaaagtttgtgagaagggcctagagactttttctatatttaaaagacttttcaaagacagtgttcttgagcagaagatagacgaaaatccatatttacttgacgacatagcgtatatactaacggtaaatattgatgatgaatcaatcaaaacaaatctgcaacaattagaatttctgtcagaccatgacatctccgtaatcatgaatatgcctaccgatgatttaaggcatttcagcggtagatcaaacttgtcgcacttagctatgcagaatatcataaagtatctgaaggaaggctaccagtcgcatttagcaatccaaaaggccggctacgatacaaaagaaatctaccaaggtaataacataacgcttccaccactgaagttatcagatttctcacaagacggcgatgaaacgtttgaggaatatggcattaacagcaaggttgcacaaagagcgcttagtcaatcaattaagctaattaatgcgatcattaaaaaatacggctcaccaacatatgtacgagttgagctagctcgtgagttcgccaagactgaagaagaacgtgaaaaaatagaaagaaacaacaagcgtaatcgagaaaagaatagaaaatatgaagaaataattaatcaaatattcaaagataatcataaattaccaccaagtaagataggtcatatcatacgcaagctaaccttacgcgatcagcaggattgcaaggatatttattctggtgatgatatagacattacaacactcgtccttgatgaatcggcttatgaaattgaccacatcatcccacgttctaaaagattcattaacgatatgaataatttagtactcacatctacaaaaaacaatcgtgaaaaatcgaatcgattaccgctttcctacatatctgaccctacgaaacagaaagagtttctagagcgtgttaacctaattaaagataagcaaaagcaaaagaatctgcggcttgattcctgcgaagatcaagacaacatgacagagcgagcgttgaacgacactaagcatatagccagatttttcaaaaactatattcagcggaatctattattcgctggcgatgacgaagaggacggtcgacagcgtgtttttgctataccaggtcctgttactgcttatctgcgtgcacgctggggatttgaacaaaaagatcgagatgcaaatgctttacatcatgcgattgatgcctgcgttattgttgcgaccacaccaaaattactaaacagagtaatgtatcacgaatctcatcgtgaacaaggaaaattatacagcgaaagacaatccgccgaacaagatactggagattttgggatgcaggcttatttacgggcaaaaaagatgtaccacgactctattgacaatgtgtctggagaaataattgatcctcacaaacataatgtagcgtacgaaatcatgcaagaacacgagaagctctacaggtactccttcccgcgaccatggatagactttgctcgtgaagtttctttgagggccagtgatatagataaaaaaactctacaaaataagctcgtcgagattaataattatgatgctgagttccgcaaaacgcttcatccaatatttatatcacatatgcgttatggtaagacacgcggatcaggacatggcgaacagatttacaagaaaccctataaagacgacagccgaattattcagcataaatcaatttatgaaatatcaccagacgatattgagaattcaccgattactatatcagatagaaagttgtacgaattgttaaaggacactttcagtaagattgaattgcaagtaaaccagagcgaaaaagataaacgaatagacaaaaatacagttatctataaaccatctaaaaatcccgacaagagtccagtagtcaaaagaattccagtttatatagacaaaacccctatatcgcatgacgttagaggtggtgcagtcttaaatgaaaaaggtacagtagcatactcaattttatgccaaagctcaacaacaggccactataaagtagtgcccgtatattttcgacaaatacacgccaatgaaaatatagaattagaggaaggttggaaatatatctcgcgtataataccgaacgattttgtagttattattaaaaaagacggaagcagaatatctgggtattataaaactcgcaaaggtgacactcttattagtatactacctcatcaacacagcgacagcagtagagcaatatcccaacgaattggcacggcaaaagaaatacgcatctataatatatccattcttggagataacgccccagaagaggaatacaaataatatggcttggcgcgtcgtagctatcgaaaatcccgccagattgagtttgcgcgacaaccagttagtaatcgcgcaagaaactgagacaactttgccgattgaagatattgatgcactcattctggacggttatggcatgactgcgaccacaaatctacttacagcactggcgaccaaaggcaccacaactgttatttgtgacgaaaagcacttgccgaccagcgtacttctgccgtattcacaacattcacgccaagccaaagtttcacgccaacaacttgccatgagtcaaccgctcaagaagcaattgtggcaacaaattatcatcagcaaaattaccaatcaagccgatgttttgcaatctatcgggttagatgacaccgccttgcgtacccatattagcgatgtcaaatcgggcgacactagcaatcgcgagtcgctagctgctcgcatttattttgaccagctactcgacgacgccacgcgccgcaagccaatttggcacaatgccgcgcttaactatggctacgcaatggtccgcagtcatatcgctcggcacattgctgtccgcgggctagtcgcttcgcaaggaatctttcatcacaatgagcttaatagttttaatttagctgacgacttgatagagccttaccgtgccgccgttgatttatatatcctagaaaaggttgcaccgcttcacgtcggcgaccgcgatgccagcctcaccaagcacgatcgccaacttattattgacatattaaattatcatgttataatggacggtaagaagtttactataaaacatgcggttgagcgaacagttgaaagctttatcgaatgtattgaggtaaaggaggcgcgtaagcttcttttgccaaaaatcgcctcctaacagggaagggatgtcatataaaatcatgagggtcgcggtatttttcgatttgccgaccaacactaaagctgagcgcaaagccgctacacaattccgcaagttcttgctggacgacggctttgacatgctgcaatatagcgtatacacgagattatgcccaaaccgcgacgttgctgaaaagcacatgatgcgcgttaaacgccacgcaccagatagcggatcagtgcgattactatacttgaccgagcatcaattcacacatatgtacgttatcgttggcgaaaaaactgtccaagaaaagaacgttcctgtcggtcagctagcatttttctaaccaaaaatccccctcgtaacagagggggatttgaggaagtaattataccaatatctaaattgttagggaactataacgaataagcacatgaaagaggctcagcttcgattataccaatatctaaattgttagggaactataacccattgtggtagctcctttcgtttagtttgattataccaatatctaaattgttagggaactataacataaagctaaagttgacttgccggctgaggattataccaatatctaaattgttagggaactataactccagccgccgtcagtgccaacgttagtgcattataccaatatctaaattgttagggaactataactactactaatcaatcccagcaccaccacgtattataccaatatctaaattgttagggaactataacacaaaccgccttgtgtgataattccatttaattataccaatatctaaattgttagggaactataactagttggcgttgcgatatttagcgatatcaattataccaatatctaaattgttagggaactataacaaactgcgcaaaatgtcctcgtcccattttattataccaatatctaaattgttagggaactataacctaccacggcaaacttcaaaatattgtttaattataccaatatctaaattgttagggaactataacttttcggattgattccgtgaatagcaatcaattataccaatatctaaattgttagggaactataacccaatacaaccttaagaattaagcttggcaattataccaatatctaaattgttagggaactataacaccgccaaactgttaagcgctagcttattaattataccaatatctaaattgttagggaactataacctaagatgttaaagtcttcgtcaactatgaattataccaatatctaaattgttagggaactataacttgtccaccacaacaggaggcgacagaataattataccaatatctaaattgttagggaactataaccaagacgacaagtggcaatatgtgccagagattataccaatatctaaattgttagggaactataactggtggcaaatatttcgtcgaccttgccagattataccaatatctaaattgttagggaactataacagctgcgacacgcgagttgacggctgcctgattataccaatatctaaattgttaagagttttaattaaaactattcaaatccttatcctttattgatatactaaactacgtctagatctgactgggaccgtatggtctggttcactttgcaaatgggcagccattgtgcgataaagtggacgcatgcgttcccttgtcaggtctagacagccagcaatggctgtccttttttatgacagctcggcgcggacaatctatatttattaataaaactctggagggaatatgggtaggaacgaacaaaagaaatctgggctaatcacagcaggattagttataggtattatcgggctggtgctatcagcagtcccgattattaacaacttcgccgcaatacttggcgtgctcgctataatttttggcacaattggcattgttggcgctaaaaaacgcgacggcgcgggccgcggaatgtcaatcgccgttttgattataggtgtagtctgcgttggcatcgtactagccagtcaagcaatgtacggcaaagcaataaacgatgccggtaaggctatccaagattcagtagatacatcaagcggcaaaaagactgacgagctacttaaaaacgatgttaacatcgagattggtaaattctcagcgacggctgatgagtatggcattaataaaacttcattgagtgttaaagtcacaaataagaataccgagacaaaatcatatactgttaaggtagaggctgtagacgctagcggcacacggcttgcagaagatacgatttacgctaacgacctcaaaagcaatgggtctggatcgtacgaagcatttaaatatgtagaggctggtaaagtagataatctaaaaaccgcaacattcaaggtttattctgttggtcaaagttaaagttaaaatataaaaacttacaaataactaagccagattaaaagctggcttagttatttttggtactaaaatgtacattatctatgtttatcgcaagcgatcccgtcattatctctgtcaaggtgcggcgaataccccggttcgccgcggcgcatatggctatagccagcagcacgcgcttctttgcagctactaaaatgtaattctgccgggggagcgggtgcaggtgttgctgggcgtggacgtggacgcggaggagttgttggagctggttgcggggcggcaggagtaggggtaacttggcgaggtgcaggctgcggtcgcgcttgctgctgttgctgccgagctttagctgcggcagccgctgcctcctcctgctttttcttttcttccgcttcttttttagctttttcagcgcgttctttctcttcctgcttggctttttctaatttggcaatacgctcagagaattgtccgcgtttatcctctggtaatttattgacatccgacttggagcgggagatattctcatcgttcgatttctgctcagcttttttaaccgattcctcagtacgtttgagagctttctctagttcttgtttgtcataatcagctttcgtttggcggtgaaacctgatagttttatcaccgtggcgtttaccatcgacgacggatatagaaatatcgctatcgccctcttttatgtctttgatctcatacttaatgtcgccagctgaatttttatgcccgtgtatgctagttttaccgttagctacctttacttcagcaagcaagctgactcctgatattttagcagaaatttcgcgcttgtcggtatggtaatcaagcttaatgttttcatccacattagagataataatagggatgttgtccttctcaaggcgagattgctccattatattgctgacatgtcctataacagcaagagtaacgacaactccgccaaagataagccagccacgctttcgctttttaacagcgggcttactcttattttcctgatctgtttgtttaagattttttctgaccactgatatctcctgtcaattcaacgtagcagggagctcacttatcctgttattgcttggtacgcccctgatggacgacgacttgcggggcgttacccgggcaggcagcaatctagaatctgctacaggcacaagtcctattagtaatccaccaggaactcacctataaatatatcacaaaatacattaaacgtaacttggtttccagtgatccatccctagctagcagacgaatcactggtttagcagcgcccaacaatatagttgaaattgtcgataggcagctcactgacaattttacaggcgctactggagcagggtattttcaagaatcaacgcccgaaaaaccatagaacaaaaagcgaactaattatccgcaggtttcttaaagtcatgccagaataattatctaacaattgctaatatttcatagattcataaaataccatctttagcgatcaaagctcaaaccataatcaataacacaaattagcgcgctaaaagccattaatagccaatagcaataaaaacatggaacatggcaaatatagacttagaacataaatacaccagcaaatcccaaacagggcggtaacataattaattgccgccgatatctccaaaagtttacaaactacataaatttatcttgaaaaaagacgatggagtaatcatgtttcgtagatagttttaatgtcgcacaatgtaccttttacgaactaataaatacgttcaaccggatgaatgagaaatatatccaaaataaaccagctttctcccatttatcgtttttcaccgccaacacctggcagggcaaccttagcactgccagactaaaacttaagattattctaaactttttatacgtattccatttacattaagacaagctattcattccacgccatacccgcagccgttaaaccaaaccagcagccggcacatgctttgttggcgtttttacaaccaaactgcgtacgtaacatcatatcgcgtacaaacttaagccaagttttccacacgccgccaaatctagccagcaatccacacatttgactttttcttaattttattcccccgctcccctaattcgccgcccagctaatatttgactttttagcatttagatataataatatatagtttttcgtgttttgcccagcttcccaaaaaagaacaaaaagagaactaatatcttaaatagagcaatacccgcccctgttaattagcctgcccgatcgcctatttagctatctataaaacgaccgctgatctactctgacgtcaatatatactggcgttatcccctgtccatccagatgttttatggtaataatcgcctgcttgacttgcggctcagctgccctatccaccgtcattcgtatataataatccctgccatcaaccttaaaccaaacctggcgcaccgtgccagctggcagtgttgcctctgatacttttaggttattttgggtaaacaaagacaccgcctgacctaagaagcttaagaattgccggttaatgatctcttggccgcttttagcagggatgccgctttcatccttgacagctaccgtcggcgcgtcaaaataattctgctcaaatgtcacgccgctttcatcgacaaaatacactttactaccggacgaccactgagcaactggctggcgaaattgtaattttactgatgatgaagccaaagattcgccctcgattcgaatcgtttttacctccggagcttgctgtaaaaagaagtttatcaaactattatgatccaaaaaaaatcggaatctttcagctggacgcgacgcataatagtcgttaaggattttaatatatttggcggcattaccagagctcttcgggtcgggagtttgaactgaaatattaatcgtcagttgagatagtaaatataacacaaccgcaagcccgcataccgcgccgaaaaaacgccggctggctttgcgccgctttttaatcagccggtgcgcctccagccgctcggatgtttccatcggcgaagctgtctggcggctgttcagcattcgattgcgccggtatgattgcgctggtatatcatcataaatttcagcctggcgcttcgcagcaatttcgcggcgcgttaacttaggttctttctttttcagaaagccaaatttcatttacgcctgccctgccggcgaattgtagttaatatcatatttgacatatcgcgagcagcgttcggcttggcaaatttgccaaaattattgcccaaaccttgcagaattttctgagaccgcagcaagccgataattttctttgccaaaatctggctgtcgtcatccagctcgtcctctgtcacaatcaccgccgccagcgcctcttgatacaccttagcattctttaactggtgtccagccgtcagccggccgtttggaataatgatagtcggtttgtgcagcgccgccagttccaacagcgtcgtcgcgcctgccctagtcactaccaaatcagccgccgccaaaacttccgccataccgtcatggacaaaagcttgcagacgccaaccgtcgcattcgctgaccgcttccttcaattgctcatattgcaaattgccagaaattaaaaacaccgatgattcagccaacaaatcctcccgaactgcaaccaccgcctcatttatcctggctgcgcccagaccgccgccagtaatcaccacgagcggccgattcggatcaaattgcagcttggatttcaattggcggcgctcctcgtctgtatacggcctgaactctgccgcaactggaataccgacatacttagctttttccggcggataattataatatttaagcggcgcgcccgtgccaatcgccttagcgaacgggcttaacagccgattagttaatcccgggtgagcatcagaatcgtgcagcaccagcggaatttttagcagccgcgccgcgtagccagccggcaagcaaacataaccgcccttaataaaaatcacatccgggcgccaaatcaataacttaataaagctttggcaaaacccgataaccaccttaaaagcatcgcggacgtttggcagcaagattgacggacgaagatgaaagctaatacttttaccatgatagcgccgcaattttccagcagcaatcagctcaaccggaatagtctcgtcaaatttgctaaaaattccgcgggcgcgggcgccaaactttcgatcgcaccaaaaccgcagctcatgatcgcctgattttttcaactccctaaatacggctaccactggcgtaacgtgtccgcccgaaccgccgccgaccgctaagattcttgccatcgcttccctcctctaatggtttatgtgatgtgtatctggaaatctgaaaaactagcccaagcgccgcggcgataaacatcatgctagtaccgccgtagctcaacagcggtagcggaatccccgtcagcggcgccacgccggtcatcgcagcgatattcataataacatgcgacgctacccagccgaatacgccagccgcagccagccgcagccgcatgtccggcaatctggcagacacgcgcaaaattgacaataatagcgccgtaaaaagcgctaaaatcgccatcaagccgagaaagccgaacgtctcgcccatcaccgcaaaaatcgagtcgttaatcgcctcgggcagataaccggtcgcctgcacgctcttgccaatccccaggcccagcagtccgccagaaccaatcgcaatccgcgcctgctgaatatgataatcaccgtcatcttgactagctgaacggcggctgtcgccctgtaagaacgttactacgcgctcaatccggtgcggcgacatagcaatcatcaacacgccaaggattaataccacacccagcaccttggcgataatctttccattcatcccagacaccaccagcattgccatgataatcgccaccagcgacatgccagtccccaaatccttttgcaagaacaccacgacaattaacgaaatccctgccaataccgctaccggcacaagcgtttcctgtatgtcgttaattttctcctgtttgacacgtttgcttaaaaaccccgccagaaacaccagcacgccgtattttagcagctccgacggctgaagactgcctaattgccccaaataaaaccagcggtaagccccattcgtgtctttggcaatcggcagatggagaactgcgcccataattaccagcagcacgcataaaaccagccctgttaaaaaaatctgtttcgcgtacttattaacccatgctagcggtaacagcgcgcaaaccgcaaacgctgcgacggcaataacaacgctaaccaattgcttgttaaaaaagaagttactatcataatgcgtaccgtatgcataatttagtacatttgcccgctgcggccccagcgcgtacataaccaccaatcccagcattaacagcagccccatatacaaagcaatctgatacatcggtcgatggcggcggattgacacaactttactagcgttgcgcttaaaggcggctgaactacgcaatatgaccccctgccaaagccagcatcacgccgataaacgccatcacacagccaatcacccaaaaccgcatcgtcaccttggtttccggccagccgatagcctccaaatgatgatgaattggcgccgataagaaaatcttgcgcttaaagaattttttactaaaaatctgtatcaaactggagcccgcctcaatcacaaacagcaatccaattaccggcagcagcaacagcgaatctgtcagcatcgccaccacgcccaagctagcgccgtacgcgaagctgccaacatcgcccatgaaaaaccgcgccggataaatattaaaccacaaataactcagcagcacaccgaccaccgtaaagcaaaaccccgccagcaatacctgctgctgcaacaaggcaatcaccccaaacgcgccgaaactagcgctcaagagaccgccagccaacccgtccataccatcggaaatattaaccgcattaccagtcgccaccaccgcaaatgcaaacaacgggataatcagccagccaatattcacatctcccataaacggcacgtgaaaactcatcacgcctaatttggcgaagaagaaccagcccagaactatgccgataagcgtaattagcgcaaacttcactggactgcgtaagcctgccgcaccgccgcctgtaccgcgaatattgataatatcatcgatcaagccaaccgcgccgccacccagcagcgctgctaatggcagccacgtttgcgcccgatctaaattacagaaaaacgtcactataaaaatcgcgatcacgccgatcacgccagccattgtcggaatattacgctgcaatttagccgcttggaatttggcaaaaatcttcaattttttaccgtcggtactctctgagcgctgccgcttccaaaaccggtatcggtaagcaaaaaacgtataaatcggcgtcagaaacatcgccaataaaaacgccccgacgctcagtaaaaatacgtgcgttaattcgttagtcattgtttgtaaagcagttgccatggttatcccttcggtgctaatttcatataatcaatcatccagttggatatgtccgtgaaaatcgggccggcgtggtaatttccctgcaggttaattcctc

SEQ ID NO: 1032 - DNA, 18512 bp, synthetic construct
  misc_feature 1..18512: note = Synthetic
  source 1..18512: mol_type = other DNA
cagtcatttcctgaagactgtgtgcgcttgaagctcagcagcacacgagccagccgggcgggtctgaaggaaatgatgacgagacgaagagtgagggattggctaggtagtagaactgagaaggctatacagcctgttctgaatgcctgatagacgcatccaagggtgtcttttgtccttcactctattatcatttcctgaagactgtgtgcacttgtagcacagcagcacacgagccggccaggcgacgaggcagaaggaaatgataatagagtgaagaataagggctgtagtgagtcagcacaagcctaaaacattcaccggctaaatatgataagataactggtgatgatacagtggctgtttaccttctttacccagtggtacatctggatgcctctcgttggtattctcggcatcttgacctggcgcaactaccatagccttaacgaccccggcgacgcttacgactacgtcctcctggctctagaaatccctcgagacaacgataagaaagagctctctgccgagcagctcttcgcttctttgcacggcatcctccgcgacaagcaggagctccaccgagccactggcgttcaggaacatctctcgtttgagatcgccagtgtgggcgggcagatccgcttctacgtccgcacccctaagcatctgcagaacttcgtcgaggggcaaatctacgcccagtatccgactgtccagatccaacccgccgaggaagattacgccgacggcatcaatgcccaccgagccacggcggttgatgagctggtcctgaccgacaacgaattcttgcccatccggactttccaggcgttcgacgttgacccgttagccggcatcactgccgccttgaccaagctgggcagcaacgacgaggagatctgggtgcagatcctcgtccgacctataccggatagctggcagaaagatagtgccaagtacgtcgctcgctatcgtagcggctttggctcgtcactccgctcgggcgccttctactacgtcctccaggcgctggaggcactctggcaaccacccgaaggaaacgataaaaacgccgagctgtccgaccgtgacaagctgcggattagtgagatggagaagaaatcgcagaagctgggctataaggtctgcatcaggctggcttacctcgggcacgaccaagactcagctcgcatccagatgaatgccgtggcgagcgcctttaagcagtttaactcgaccagtcttaatggcttcaagctggctactcagcctcgctacgatcgggcggcgcttgatctctgcgccaagcgatcttttccagatggcacaggctttatcttaaatatcgaggagctggccagcgtctttcatctaccacacatgaacgttgagacgcctagcgtagtctgggctaattcaaagaccgccgagccgccgaccaatctgccggtacttgatggcgacccggttcacgaccgagatatcagcgctttcgggctgactaacttccgaggtatgcaaaagcagttcggcatcctgcgagccgaccgaagccgtcatatgtacatcatcgggcagaccggtacaggtaaatcgggcttgcttgagctactggccttatcagatatctaccacaatcagggctacgccatcattgacccgcacggcgacttcgccaccgacaacctcaagtttatcccatcctcgcgagttaatgacgtagtctactttaatcccgccgacaccgaccacccgatcggctttaacccaatggaggtctacgacccgaatcagcgcaataatatcagctcagagatcatcggagtgatgaagcggatgttcggcgagagctggggcccacgactagagtacatcctgcgtcacaccctgctcgctctgctggagtaccccgacaccaccatgctggatatcaaccgcatgctaaccgataaagacttccgcagtcgggtgctgtctcaagtcaaggataccgtggtgctccaattttggcgagtcgaattcgccggctggaacgagcgctatgtttcggaggcaattgccccagtgctcaataaggtcggtgccttcgtggccaacccggtcatccgcaatatcatcgggcagcccaagtctagcttcaatatccgtcagatcatggacgagggcaagatcctgatcgttaatttgtctaagggattgatcggtgaggacaacgccgccatcttgggctctttcttagtaactaagatccagctagccgctatgagtcgctcggatatccctcggatagaagatcggcgacctttttacctatacgtcgacgagtttcagaacttcgccaccgactctttcgccgtaatcttgtccgaggctcgtaagtacggactcaacctcaccgtcgccaaccaatacatttctcagatggaagataccgtacgagacgctgtctttggcaatgtcggcactatggtctcgatgcgagttagcccggaggatgcaccaatcttagcccagcaattcgcccctaatttcgaagcgcaggacatcttgcagatgaataatcgccatctcgtctgcggcatgatgatcaatggcgagaagatgcctgctttctcgggcactactctcaagctgccggaagcggggaagggctacatcgaccaaatcattgagcactccagggctaattacacccgccccaaagcggaggtggaggcagagattgccgagctggtcactccaccgatggggctaatgtccagaaccgcccgagataaggcgaagaaagcactcaaagagcaacaacaagccgccgctcagtcaaccgccaaccagctgaagaatatcagcaacctgatggcgcagatccgtcagactgcccaagctggcgaccctgatagcatgaagattgagccgactcacgagactagcagtaagagtaatggcaatagcaacggtggcggtggcagcaataaggctcgttccggtagtagtcaagcagggcagggtagtcggagcagtcagaatcaaggcaataagaatcagcccaagaaaaataagaataaaactaataaacataatcgtggggcagataaaggcggacaagccggccggacgattcccgcagcttccgtcagccagccaagctcaccaaccagctatgtcagaccgaaccgccccttgcctcagccgcacccaagccagcccgccaagccggataagccggcctcagtcgcaccacccgccacccaggttcacgagatcaggtttcattagggctaataacaaaataaaagcccgacccctcaccttgatggctagaggtcgggtgggctaactgccggtggtggataacggcagttcacaggtagatagctagctaactatttcttcttgccgtcaccaatagcgatcttgtgtggctcaggcagcttggccattgggatagtgaccactagcttgccatcaaccatatctgccttgatcgcctctcggtcagcccgctcaggcagagtgatggaacgatagaagctattcgagctctctcgcacaaagtacttcttatcctcgtcctcttccttatcatgacgctcggcgctgatcaccagattgtccttgtcgatgctgatgtcgacatcttctttatcaaagttgggcatgtgggtctctaccaccaggttacccgccttctgatagacatcagtcaccgggatgttgctggtcatggtcggtaatagcaggtcgtcaccgaagaagcggcgctgcaagctatttagctcctcaaacgggtcatcatacttgattaaactgctcatatcatcctccttttattacgatggtatcaccatctgctagtagtatagctagttggcactccctcgtcaagagtgccagcgtaagcgtcttggggaagaaatgcggggcgatgcgaacatcgcccctccgagaagtgaatagacgctggctacaactcaatgcgatagacatcacctccgatctgcgcactagcgcaagactgattcaaacgccccatcatggcttccacgaagtcgaagaacttgctcctcaatcgtggattaccgccccacagataatagtcaagttgcaatgcaacctgagagccgcctagttttccctggcacgtctggcgtaccagagaaaaagtgacgtttttgagcttaccgccatcggactcttcgcaaatccactgaccgatttcgtttaggtcgacgtccccctcatattgagggaaaccgctgcccagggcgataatggcgcttgccttcagcgccccgtgactctttttgaccgacatgtcggcctcctctctgatgacatctatcgacgccatcggttttggtcacagcccgtctgtgacctcacagggagcaggagagacctgcgcccggcgagaccacagacacatccatccacttcatcataaagtacaccgcacccacctacagcactactatcatgacacatttgacaggaaagtaaacccagcagcccagcaggatgcatggcactacgctacctaagcggaaaaggtgtgtaatcatgctttactgtaatcagctggtctaactaacgcatctgctgggtgctgggcaagcccggcaggttcagctgatgtgtcagctaagctagctgactatgacgaaacatgactgtacaccttttcgcctggacagtaagcaccgtgtattctgctgggtgctgggcaagcccggcgtgataccgataagcaccgaccaacccgagaagacacttagctattgcaatccggccttgatactctataatgaaaatgtacactcatgggagcatgattgtataactatctgaattgcttaggtttctataataatttagtagaaatactaaagcaaagctctaatccacctccttagttgaggtggattaactgttctcagatcaataacaatcttgaccgaaacggaagcctcgctccatggacattatctcaatttagcccatcacgcacaccacttcgttgtataatactactatgaaatactcacttggtttagatattggcaccgcctcaatcggctgggcagtacttgatttagaaaaggaacgaatccatgacttaggtgtacgactctttgatagtcaaatcaaaaataaagaacgtagacaatacgccagcacaagacgtatgaataaaagaagaaaacaacgactaaaccacttaaaggctgtttttatagataacaatctattgagcgcagatgaaataagatcagctcttaaagaccaaaagatcacagagagcatttatccgctacgagcgagggcagctactcaacaaatttcaaatagagaattgttcagagtactatatctgattgctaagaaacgcggcttcaagagtaatcgtaagtcagatccaaacgataatgaatcttcgggcactaaatttaaggaacagctagctaaaaactcggcaacagcggaaaaatatcagaccattggattgatgctagaaaacaatccagcctacactaatcgaaaacgtaattcgaaagataattatattgcgacatttcagcgtgaagatattcgcaaggaagttgaaataattctacataaacaatttgaaaaagagctagacgaccctcaaatgagttaccaatatgagaagataattaaatcattattagatgaagtatccatcaacgataacggtaaaaagcaatatcttggtatatttgcacaacgcccatacaccaatgcaagcttgatcgaaaagatgactggcttctgtgagtttgaaaagactgaacgacgttacgttaaagccagttacacgacagaagaatacatttttctgagtgctctaagcaacatcgtcatcttaaatactagcaagaatgacgaaaggtattacattgataaagatggcgtagagcagttactgacattagcaaaacaagaaaaaatattaaaatgttctgacataaggaaagcgctaaaacttggtaaaacaatttgtttctcaaataaagccatagaagatacttatcgtgataacgtcgaacatgccaataaaaagtactcttcaccccagaacaaggaaatgctagcggaagcattagaggctgctagaaagattcgagatcgtagccgtaagagtgtagaaagacaaaaaatttgcgagaaaaacctagagaccttttatatatttaaaaaacttttcaaagacagtgtgcttgggcagaagatagaagaaaacccatatttacttgacgacatagcgtacatactaacggtaaatattgacgatgaatcagtcaaaacaaatcttcaaaaattaaaatttttgtcagaccatgacatctctataatcatgaacatgtctaccaatgatttaaatcattttagcggtagattgaatttgtcgcgcttagctatgcagaatataataaaacatctaaaggagggttaccagtcacatttagcaatccaaaaagctggctatgatacaaaagaaatctaccaaggcaataacataacacttccgtcactcaaactatcggacttctcgcaagacggtgatgaaacatttgagaaatatggtattaacagcaaggttgcacaaagagcacttagtcaatcaattaagctaattaatgcgatcattaaaaaatacggctcaccaacatacgtacgagttgagctagcccgtgagttcgccaagactgaagaggaacgtgaaaaaatagaaagaaacaacaagcgtaatagagaaaaaaataggaaatatgaagagataatcaatcaaatattcaaagataaccataaattaccaccaagcaaaataggtcacatcatacgcaagctaaccttacgtgatcagcagaattgtaaggatatttattctggcgatcatatagatgttacaacgctcgtccttgatgaatcggcttatgaaattgaccatatcatcccacgttctaaaagatttatcaacgatatgaataatttagtgctcacatctacaaaaaacaatcgtgaaaaatcgaatcaattaccgcttgcctacatctctgaccctacgaagcagaaagagtttctagagcgtgttaacctaattaaagataaacaaaagcgaaagaatctgcgacttaactcctgtgaagatcaggatagcatgacagagcaagcattaaatgacaccaagcacgttgccaaatttttcaaaaactatattcagcgaaatctattattcgctggcgatgacgaagaaaatggacgacagcgtgtttttgctataccaggccctgttactgcctatctgcgtgcccgctgggggtttgaccaaaaagatcgagatgcaaatgctttacatcacgcgattgatgcctgtgttattgttgcgaccacgccaaaattactgaacagagtcatgtatcacgagtctcatcgtgaacaaggcaaattgtacagcgaaaggcaagccgccgaacaagatactggagattttggcatgcaagcttatttacaggcaaaaaagatgtactacgactctcttgatagggtgtctggagaaataattgaccctcacaaacataatgtagcgtacaaaatcatgcaagagcatgagaagcgctacagatactcctttccacgaccatggacagactttatgcgtgaggtctctttgagggctggtgatatagacaagaagactctacaaaataagctcgtcgagatcaataattatgatgacgagtttcgtagaacactccacccgatattcatatcacatatgcgctacggtaaaacgcgcggatcaggacatggcgaacagatttacaagaagccttataaagacgacggccgaatcattcaacataaatcaatttatgacatatcaccagacgatattgagagttcaccaattgctacatcagatagaaaattgtacgaattgttaaaggatactttcagtaagattgaattgaaaggaaaccagagcgaaaaagataaacgaatagacaaaaatacagttatctataaaccatctaaaaatcccgataaaagtccagtggtcaaaaggattccagtttatatagacaaaacccctataccgcatgaagttagaggtggcgtagtcttgaatgaaaagggcacagtagcatactcaattttatgccaaagctcaacaacaggccactataaagtagtgcccgtatacttcagacaaatacacgccaataaaaagatagatctagggaaaggctggaaatatatctcgcgtatagtaccgaacgattttgtagttatcattaaaaaagacggaagcaaaatatctgggtattataaaactcgcaaaggtgacactcttattagtatactacctcatcaacacagcgacagcagtagagcaatatcccaacgagttggcactgcgaaagaaatacacatttataatatatctattcttggagataacaccccagaagaggaatataagtagtggggtggcgagttgtagctatagaaaaccaggctcatctgagcctggagcagggaagtttggtcatcaagggcgataaaagtgctaagctaccgatagaagacatcgatacgctacttattgatagttacgccgtgaccatgaccgccaatctcctcggcgaactcgccacgaacaacgtcacgaccatcatttgcgaccaccagcacacgccctgttcagtaatcgagccactatcacagcactctcgccaagccaaagtatcccgcatgcagctagagatgtctcagccgctacgtaagaatctatggcaagcaatcgtcaagcaaaagatcattaaccaagcccaagtcctgaccgcatttacacataccgagcaagccgggcagctcattaagctagctaccgaggttcgcagtggtgacaccactaatcgagagtctatcgccgcccgtatatatttcgatactctactggcagacgccaccagacgccagccgacctggtataattcagcacttaactattcgtacgctatcgtccgtagcttagttgccagacatatcgccagtcgagggctcatcccgtcgctaggtctctttcaccacagcgagctaaatagcttcaacttagccgatgacctgattgaaccctatagagcaatagttgaccattttgtcctgtcaaaattagctgatcagcacttagacttgagtgacagtagactgaccaaagaagatcgacggctgtcccttgacattctcaatgattatgctattatcaaagataagcagtttacagtgcgagacgccatagacttaaccgtcagtagtctagtgcaggctattggcgacaagtcacccgactcgcttcaattgcccaagtttaatcgctaagttaatcttaatcatgagctaccgttatatgcgtgtgttggtactatttgatttgcccacaggaacgaaagctgagcgcaagcaggctagtcaattccgcaactttttagttggggatggctttgatatgctacagttcagcgtctacagcaggctgtgccctaatcgagacgtagccatgaagcatctcgccagagtcaccaagaatacgccagcggataccaaaggctccatccgagcacttctcgtcaccgagcgtcagttcgctactatgttcatcatcctaggtgaaaaaactgaccaagaagagctcgttaaagccaaccaactatcatttttctaaactaaaatcccctctgtaacagaggggattttgagtgagtattatacaactatctgaattgtcagggaactataacgataatcgactatcagtgacagcttgcttaattatacaactatctgaattgtcagggaactataactcagtcgctgtatcaatagcagattggaccattatacaactatctgaattgtcagggaactataacttgcgatctttgccatgccacacgacgctattatacaactatctgaattgtcagggaactataactctctgcctgataccaaaatgacactgacgattatacaactatctgaattgtcagggaactataacttgcgatctttgccatgccacacgacgctattatacaactatctgaattgtcagggaactataactccaacagtggacaccatcttgcagagagaattatacaactatctgaattgtcagggaactataacggcaagtctgtcaatacgtcgatatcaatgattatacaactatctgaattgtcagggaactataactccaaaaccacaatagacaatatgcgtcaattatacaactatctgaattgtcagggaactataacaacaatgggctgtacccctctcgctggacgattatacaactatctgaattgtcagggaactataacggagaatgatatcgtttgggtgaccgaggaattatacaactatccaaattgtcagggaactataacttttggcgttgcccctggctttccatgggattatacaactatccaaattgtcagggaactataacaccgacacccgagaaaacagataagcccgaattatacaactatccaaattgtcagggaactataacgaaaagtcagcccaccgctgggtgggcaacttttcgttacaaatcctaacggatttgcatccctctaagaccccttgtatgacaaatctcttatttctcgcacgaatgccaacctttggattggaagatgcagtaaagaatgcaaaatgtgaccaaggttttcgtcttatacgacatacctgaggcatgaccatatcagctataccgacttatgcgatttaccacgcaaaaatcactaaaaaattaccttactcagtcgttacgccgtcgaagtcttcctcgttagcctcagcttcctggcgtgtcgccctgacgatgccgtctttgtgatgcgccgggctgtagatagtgtacagcttcagcggctcatcaccggtgttgatgacgttatgctcagcacccgccggcacgatgatggcgctaccgtcagacactgcatactcattatcatcgattaacactttgccctgacccgcttcgaagcgaaagaattgatcgttctcgtcatgaacttctgagccaatctcaccgccgaccggcaagctcatcagtaccagctgacaatgcttagcagtgtaaagcacttgacgaatgttatcattcgccagcgtcaattgctcgatatttgcgctaaatcccttcatattacctcctactggttactgctattagtataccagcctctctgccaaaaagcagagtcgtcattatctcataattaaagttacccacttactagtcgttagcccataatttcggttaccccatcttacatcatgaaaggagtaagtagaatgggcatgaaggagatatagccaggtttcatgccgtagccggtttacacatgctataatcccagaaaggagaaatagtatgtactacggtaatagggctaaggtttatatcccgggctggtgggagatccggaagatgtgcaaggggctggagcgacttaaacctgaggtgaatatcgtcttcggatacgacggtaatcttgataatattccaaagaagagcagcgctctgtgtttctctgccggtgagaacggaattgacataaagcctcactattactggcgtgactacgacaaaatgtctccacaggaagccgcccagcgccttacttgggatagaattaggaaaaagggctacaagcccgccgatcagccggacgagaccttggctcactttagctggaaggatatctacggctttagctacgacaagtccaccgatgccggtgtctctaatgtcactatcacccagcgcattaccgctacccggatagccatccttggtccatatgctcttgcagtgcctaagaccaagaagcactacgaatattacgataatggtggcgtggtagccatgacccttcacactgcaagtatgggagacattagccttatacaagaatgcgcctacgccagatatgcgggcgaactagccagagaatgtcgcaccttcggcaagtacgtcgcaaagcatgccaaggccatcccgtcacaagatcggatcagtcataacgtctggctctaactagtaagtttcctagacaacaaagcacccctacgacaaaaggaaaacactatcaccacagcacagctagctgcctaaacaacagaggaaatacatactgtcatcgacgcttgtcgccaactaagcttcaattcgattcttgcttctccagcagcagtcaaaactgtttcttcaagtctacactaatgatggatttgggcggatattacattgcccatagaggcttcagatacttcatatcatgaacttcgtagccgcagtgcagcatcacttcaatatcgtctctggtttcacaaatataaagcttgtaacatccacccccaggagacggcaagcaccttgatctcacttggcggcaagtgttagtgtagtcgccgtccttttgatctttaatcttgtttgttgttttgcctttggtcatgttaccacctttgttaattgtacacgacctatcgccaaagagtgatccgtcaaagcgccaaaaggccatgtaattggactcctaaaattcatgtggcataagcaggcaaaactggggtgcttgtagttcagatagctccagatgggcgtcaaggctttaggactaactctaggttgaaagtaggtttttgatcttttcctttatattaacatatactgccctcaacctatctttagcatcttgcgtaagtcttgatgtgtgcataactgcattgcgaataggcgtaaaggccttttcgtcgttggcaagatgatctggatatccgtcaccgcttcttgacggatcagcaagggtagccaaatgcgccaggtcaaggtaaaataaatcgtcgttcttactgcgtatgtcaattgctatattaccatttcttttatctttgctctctcgctgcctccattttcgtatctcgcggagagcacctttcttgattcctgaactctcgtcaagcgcaatagatttatgctttattaatttacggacgagattctctgatataaagcactccgtatacgattgaagattaaatgtagcatcctcctctagttcattgatccatttctgaactctagcagtaggttctgaattatttggcaggaccggtttatattcgcttgctgtttcgttatataatttctttgacgcccgcactttttgcgaaaaacgagggttgtcatcgtctccatcttgcttaatctcaatacgccactcatcccactggtcaatgatagatttgataacggacttaatgttttctagtagttctagaaataaggcatcgtcagaaactataccttcacgactactggtgaatctatccacttcatctccatcaaggtcattataatggatctgtccatacagataactctccggaactctcgcactttgaatatgcttcaatatatctcgttcacgaagtcggccattgacaaataaatccacaccgaccttctccccagttcctaatatatttagatctctcggtttttcgaccgaagctataaaaccgttaatatttttgttaatagtacgattgtcatttttgatagatctttttaataatgtttggacaaatgaatcatggctgctgttgtttattgaccagacaaattgagttttgtcagttaaatctttgacatctcctaaatttatttcgttgtcattaacataaatcttgaaactctcatcaacaagagaaaaacgaaaatataatgcgatggacttacgtatattatcaagcgtattaattataccatttttgagaccaataaatttaatgagagtcccatgtcccatcttatctagtaactttatgtcttcgttagaaagttttccaagcttataagactcatggtctttgtcatcctgaatagccttgtctagctcgctattgtctatcactccaccagtagctatttctccggattttttagtcacgataacaatgcaatcggcacatgaaagtaaagctaattttccgataccttttctacctatataggggcgacctttttgtgaattagacctctttgcgcgctttgaataaccaatccttagaaacttattcctaaaatcagacgaagacataccctcgccatcgtcaacaacaatcatctccgacttttctttatctatagttattctgacattatttgcatccgcatcccaagaattagatatggcctcgccgaggatagttataaaatttctataaagatttcttcctagactattaagcaccgccagagatatgttaaaggtaaattgatcgtctcttatattgctcatggctttatattctccaaatgctcattaattgacataccgatgatcttacccaaaccaaccggcacagcatttcctatgtgcctgctaattgtgccaattgatattttatcaatatcttcaaagaacttgtaatctttggggaaagtttgtaagagcgcaccttctctgagagatagagccctgtcttgctcaggatgaccgtagcgaccggttccaaaagagtaaaattgagttgttatagtaggcgacggcttatcccattccatgcgcccgtatacactaccaaatgatctaccggaaagcttcttatagcactccggcagaagtgatctgtcccaatctcgccatgtcccgccaggttttgattgcctaattctcttgagatttatctctgtcaatccagcgcttctatggagagggtccttactgtccgtttgaccttgagacagcgcaggtaatgacgataatacgtctctaactgtaagcttcttgcctatagagctttccggtattaactgaatattcccatgtcttgaagctaggagaacgagccgacgacgtttttgcggtagtccgtatttactacagtcaactatcttgtaactcgtataataccccagctcatccagattcttcaaaaaatcattaaatacatcatacttgcgaagttccggaacgttttccatggatacaatatccggttttatgtcttcaatatattgtgcaaacgaccttaatagattccagcgaacatccgttttagtatctatactcttgcgatatttattagagtgctgcgaaaatctctgacatggcgcacaacctaccaggattttaatgtccgccttaccaaacatgctatctacatccacactaggcaatcttgatacatcagcttcaataaatctcgtatggttattttcttcataggcatatcgacatgacgcatcattatctataccggcaaccacatctagaccagccttccttagtccacaagtgagcccacctacgccacaaaataagtctacgacggcaaccttgctacccacgcttatagtatagcagccaataatacttatgcataggatacgttgcagtatgatttaccacaattttatcatgtagtattttgagccatggtcgtcacacaggagcactccgccattcttctatattgttttatctaagttaacgttgccggccgaagcttataccggcatttcttcaaaatctctagctttggccacggcggacgtcattgctaacacatcatctacctcatcacttcctcaatacttcgtcgcttggagtagggctgcggtttaccatagccgattcgcagcaggatggtagggtactcgccatccagccccagatccttcgccatggcttccgctacttccgcctcttcgttcggttgattgaagtacgaatgggcaatacccaggctggtagcagccagcaagaaacgctgtaatgtccgccccaagttgacccattcacgtagcgtattatctctggtagtaaagagaaccaggtgggaggctgagacaagcttgcgacggtcggctttattctgcgacttagcattgatggcacccgacataattagctccgccagccggcgggggacattcggcgcaccaaagacggcgtagctcaacccgtccagcgtctgatcctgatgctttttattaaatctcatccagctctttagctcaatcttaaagtcctcgttttgcatctggcggtcatcgccctctaggacacgtcgctcaatggcactaaactgcgtcgtcccacgagcatagtagtggagcagtacaccatcatcgatgtagacagactgtagcttagtcagtgtctcaggtgggatcatctctccactgtagacactgcggttcgtctgcctcttatctatctgattaaagagcggatccggcgccaatgtcctcctagctagtgaaatggtgatgacacccgcatcgctcgtcgcaacgtcaacttcataattattggcatgagctgccaggcaaatattctccgtcgcacagcccagactgatgaatagctctcggtgagatgcatccaccaccttcagtgcccggctaaaatccgggtgaatctctaccgccatacccttctgccggaatagccagggctgggtgttgtgtcctgatggcgccttgacagcctgctccaccagatacttgaaatcagcggaggatagctgcgctttgctcgtcatctctaccatagtgcttattataacactaccactttagccaggttaaaaggcgagtcgtcgcctcatagctctacttgtcacctatgtaacatactttccatcgctgaaactgagcgccaagatagccctacttccactcccgatgactattaatctcgtgcttctcgaaataagcttccgccagattaacgtcgaaccgattagccagttccatcaggtagttcaggacatcggcgaattcttgccgcaggttgtcatgattctccggcttggcttcgcccttaaagcccgtctccttacgaatggctttggccagctcaccaatctcctctgagaaaagcaaaaacacctgcgtcactgagtttttatcccagccattctctcggcacgttttatccagatgctcctgcaattcagtcaagctaatagtcaatggatccatgggtaattcttctcctctctactgatcttgatcaggcctgataccgcagttgtcataatgtagattgcacctttactcataattgtcactcctatttatctaattctaccattattacagagatagcgaccatgacgtccgcaccctcttgacaataagagataacgtgttatcattatatcaatttagctataggagattatcatgagcgaaattagccccaaattaaacgaacatctcaacggtctgaccaatgagatttctcgtcgccatttcgacgaggcgttggagcacggcagggaagcgatagcctccgacgagctacatagcgatgagaataggtcaatcttagcggctgtctaccgtaatatgggtgccgccaatgaccacctcgggcgagacgacatagcctgtgactatatggagcaagcctaccggatccatgacgaccaggtagccgagaaccgtactcccgaggcgctacgggagcgttcagccacagcctcttacgtcggcatcttcgccaccaaggcgtacctggccggacagagacaagatcctgagctggccaagaaggcgataggtgccgttcatcaagcagaagcggatatggcagaggcgggtcgcatctccggcgataaatatcatcagtacgagatcaacatgaccggtcgctggagtatgattgagagcttggtcggcagtaaagggcgaggcttcgtcctggccggacgagccattcgcctggctccattatctgagaaaaatcagcagaaaggcttgaccaagaaagatgtcctgcgagccaggaagcgtgctctcatgcgaggggtagccgccatggcagtaaatctaaccagccgtactaaacccaccgagaaagtcgctgaatccattgccaataaggcgatgtaggctaagctagcattccatctcatgaaccgggtactccgcttagcgcatccgactcatggtataatagccactagagtaaggggatccacacattatatggacaaacaagatgggcagtctcagcaatcaagcttacatcggtcgagcaacaccgcttatctgcctgaaccgggcttagccgagtcgtctcaagagaaacagctcactagtcaacagcgctcagctcagtctcaggctataccggcacaaccagcgacgacaagctcgtcacacctcgatggtatcgcaggctggctagccttctttatggttgtccttatcatcggtgcccttctttttcttggtgtcttttttaacacactgactaaggttaacaaaccgcgatttcttccttctgacttacttttccctttcgccgataacgtcttgccaatacgcgacgacgaatcatcctacatggtttccgctgttatggcgcccg

SEQ ID NO: 1033 - DNA, 10555 bp, synthetic construct
  source 1..10555: mol_type = other DNA
  misc_feature 1..10555: note = Synthetic
ttactaacccgaaccaaaaaaccaacatttcatcagaggtcatcggcgttctgaaacgcatgtttggcgaaagctggggcccgcgactggagtacatcttgcgctacaccatcctggcgctgctcgaccgaccagagacaaccatgctcgacatcacccgcatgctgactgataaaaacttccgcaaagaaacgctgggctattgccgtgacaccgtggtcctgcagttctggaatgttgaatttgccagctggaatgacaagttcgtcgccgaggcggtcgcgccagtcctcaacaaagtcggcgcctttaccgccaaccccatcatccgcaacatcatcggccagcccaaatccaccttcaacatccgccagattatggacgaaggcagaatcctcatcgttaatctatccaagggcctgatcggcgaggacaatgccgctatcctcggctcattcctagtcaccaagattcagctggccgccatgtcgcgctctgacatcccagacatccgcgaccgccgcccattttacctctacgtcgacgaattccagaactttgccactgattcatttgccaccatcctgtctgaggcccgcaagtatggcctcaacctgaccgtcgccaaccagtacatctcacaaatgaacgaaaccgtgcgcgacgcagtctttggcaacgtcggtaccatgatctcgttccgcgtgtctgccgacgacgcaccaatcctcgccaagcaatttgagccaaacttcgaagccgtcgacctcttgcagatgcataatcgtaacttcgtcatcaacatggtcatcgggggagagaagactccagctttctccgcgcgcacgttggaactcccgccaagccaagctgataacacgccgcacatcatcgaacattcgcggcgcatgtattcacggagcagggaagacgtcgaacgagaaattaatgccgccattatgccgaaccaccgcccaaaaaatcaaccggcccagccgcgcccgcaagctgtctctgcagccgcattaacccagcctgttaaaaaggctgccggtcaaccagctcaaaaaaccaacactgccgccaacgcccaaccgactacaccgcaaaccgccacgaacagtggcgaagttgtcctgcaaatccgcggtaacggtgcatctgaaccagcaactaccgacaccgccgcaccgaagaaacgccgacgacgacggaagaagagtaccaccgtcacaacatagcaactcttgcaataactaaagtgatcagctacaatagccttacagtcccttaagtaaggattgtaccaatttctaaattgttttaggtttctataataatttagtagaaatactaaagcaaagctctaatccgctcactcgttgggcggattatcttttgtttatactaattttgcttatactttcaattactgtcttttgattatataataacaggtagctatcgggattaccaggcgggttagcccggatagccatatatatcgatcaaaacataaaggcagtttttgaaaatagaaaggctattttgcaaaacataaaggcagttttatcgaatagataggagtataattatgccaaaagacatcataaaaaggacttctcaatgacgcaaaaatcttcatattcaccgaaaaaatattcgctaggactagacatcggtacgagctcaatcggctgggcagtattggatctagacaaggagcgaattcacgatttgggagtgaggatatttagtggacagattgaaaataaaaaacgacgacaattttccagcgctcaacgtatgaataagcgaaaaaagcaacgcttaaagcacttaaaggcagtcttcataaataatgggttattaagcccaggtgagataaagttagctcttaaagaccaggagattacagaaaatatttattcgctacgcgcaaaggccgttactcaacaaatttcaaatagagaattgttcagagtactatatctgattgctaagaaacgcggcttcaagagtaatcgtaagtcagatccaaacgataatgaatcttcgggcactaaatttaaggaacagctagctaaaaactcggcaacagcggaaaaatatcagaccattggattaatgctagaaaacgatccagcctacactaatcgaaaacgtaattcgaaagataattatattgcgacatttcagcgtgaagatattcgcaaggaagttgaaataattctacacaaacaattcgaaaaagaattgagtactactcagacaagcaatgaatacaaaaagattattgaagccatactagacgaaattattattgatagcagtggcgaaaaacagtaccttggtatatttacacagcgcccatatactaacgcaagtctaattgaaaaaatgactggtttctgtgaatttgaaaaaactgaaaggcgctacgtaaaagccagttatacagcagaagaatacacttttcttagtgctctaagtaatatagtcatattagacaccaacaagaatgacgaaagatttcgcctcaatgaagaagacctagagcaactactagaactggccaaacaagaaaagaatataaaatattccgacataagaaaatcactaagccttgatgaatcaatctgtttttcaagcagagcaatagaagacacttaccaggatagtattaagcatgccaataaaaagcattcctcgccccagaataaagaaatgctgacagaggcgttagaaactgctagaaaaattcgagatcgtagccgcaagaacatagaaagacaaaaaatttgcgagaaaggcctagagactttttgtatatttaaaaaacttttcaaagacagtatgcttgggcagaggatagaagaaaacccatatttacttgacgacatagcgtacatattaacggtaaacattgatgatgaatcaatcaaaacaaatctgcagcaattagacttcctgtcagaccatgatatttccgtaatcatgaacatgcctaatgacgatttaaagcattttagcggtagatcgagcttatcgcgcttagctatgcagaatataataaaatatctaaaggagggctaccagtcacatctagcaatccaaaaagctggctatgatacaaaagaaatctaccaaggcaataacataacacttccgtcactcaaactatcggacttctcgcaagacggtgatgaaacatttgagaaatatggtattaacagcaaggttgcacaaagagcacttagtcaatcaattaagctaattaatgcgatcattaaaaaatacggctcaccaacatacgtacgagttgagctagcccgtgagttcgccaagactgaagaggagcgtgaaaaaatagaaagaaacaacaagcgtaatagagaaaaaaataggaaatatgaagagataatcaatcaaatattcaaagataaccataaattaccaccaagcaaaataggtcacatcatacgtaagctaaccttacgtgatcagcagaattgtaaggatatctattctggcgatcatatagatgttacaacgcttgtccttgatgaatcggcttatgaaattgaccatatcatcccacgctctaaaagatttatcaacgatatgaataatttagtgctcacatctacaaaaaacaatcgtgaaaaatcgaatcaattaccgcttgcctacatctctgaccctacgaagcagaaagagtttctagagcgtgttaacctaattaaagataaacaaaagcgaaagaatctgcaacttgattcctgcgaagatcaagacaacatgacagaacgagcattgaacgacactaagcatattgccagatttttcaaaaactatattcagcgaaatctattattcgctggtgatgacgaagaaaatggacgacagcgtgtttttgctataccaggccctgttactgcctatctgcgtgcccgctgggggtttgaccaaaaagatcgagatgcaaatgctttacatcacgcgattgatgcctgtgttattgttgcgaccacgccaaaattactgaacagagtcatgtatcacgagtctcatcgtgaacaaggcaaattgtacagcgaaaggcaagccgccaaacaagatactggagattttggcatgcaagcttatttacaggcaaaaaagatgtactacgactctcttgatagggtgtctggagaaataattgaccctcacaaacataatgtagcgtacaaaatcatgcaagagcatgagaagcgctacagatactcctttccacgaccatggacagactttatgcgtgaggtctctttgagggctggtgatatagacaagaagactctacaaaataagctcgtcgagatcaataattatgatgacgagtttcgtagaatactccacccgatattcatatcacatatgcgctatggtaaaacgcgcggatcaggacatggcgaacagatttataagaagccttataaagacgacagccgaatcattcaacataaatcaatttacgacatatcaccagacgatattgataattcaccaattgctatatcagatagaaagttgtacgaattattaaaggacgctttcagtaagattgagttgaaagtaaaccagagcgaaaaagataaacgaatagacaaaaatacagttatctataaaccatctaaaaatcccgataagagtccagtggtcaaaagaattccagtttatatagacaaaacccctatacagcatgacgttagaggtggtgcagtcttaaatgaaaagggcacagtagcatactcaattttatgccaaagctcaacaacaggccactataaagtagtgcccgtatattttcgacaaatacacgccaatgaaaatatagaattagaggaaggttggaaatatatctcgcgtatagtaccgaacgattttgtagttatcattaaaaaagacggaagcaaaatatcggggtattataaaactcgcaaaggtgacactcttattagtatactacctcatcaacacagtgacagcagtagagcaatatcccaacgaattggtacagcaaaagaaatacgcatctataatatatccgttcttggagataacgccccagaagaggaatacaaatgatatggcctggcgcgtcgtagctatcgaaaatcccgccaggctgagtttgcgcgacaaccagctcgtaatcgcgcaagaaactgaggcgactttgccaattgaggatatcgatgcgctcatcctagacggctacggtatgaccacgactacaaatctactcacagcgctggcgaccaaaggcaccacaaccgtcatttgtgacgaaaaacatctaccggctagtgtactcctaccgtattcacagcattcacgccaagccaaaatttcacgccaacaactcgccatgagtcagccactcaaaaaacagttgtggcaacaagttattatcagtaaaattaccaatcaagccgatgttttgcaaaccgtgggactagatgattccgccttacgcactcatattaacggcgtcaaatcaggcgatactagtaatcgtgaatcaattgctgctcgcatttattttgatcagctactcgacgataccacgcgccgtaaaccgatttggcataatgctgcgctcaattatggctacgcgatggtacgcagtcatatcgctcggcacattgctgcccgcggactagttgcttcgcaaggaattttccatcacaatgagcttaatagttttaatttagctgacgacttgatagagccctatcgcgccgccgttgatttgtatgtcctggaaaaagttgcaccacttcatgtcggcgaccacgacgccagcctcaccaagcatgaccgtcaacttatcattgacatattaaattattgtgttataatgaatagtaagaagtttactataaaacatgcggttgagcgaacggttgaaagctttatcgaatgtatcgaggtaaaggaggcgcgtaagcttcttttaccaaaaatcgcctcctaacagggaagggatgtcatataaaatcatgagggtcgcggtatttttcgatttgccgaccaacactaaagctgagcgtaaagccactacacaatttcgcaaatttttactggacgacggctttgacatgctgcaatatagcgtatacacgagactgtgtccaaaccgcgacgttgccgagaagcacatgatgcgcgtcaaacgccacgcaccaaatagcggatcagtacgattattatatttgaccgaacatcaattcacaaacatgtacgttattgtcggcgaaaaaactgtccaagaaaagaacatacccgctggtcaattagcatttttctaaccaaaaatccccctcgtaacagagggggatttaaggaagtattataccaatatctaaattgttagggaactataacccaaaatattaaagtcttcgtcaactatgaattataccaatatctaaattgttagggaactataaccgaatgcaacctacactcattagtatttttattataccaatatctaaattgttagggaactataacaagaaagagaccgtcttatccgaaaagcccattataccaatatctaaattgttagggaactataaccgcagaaggtaggtcgttttaattgcagctattataccaatatctaaattgttagggaactataacagtatacaccattaacaatcaagccaaggtattataccaatatctaaattgttagggaactataacgattttggtgttatcaatccgatgatcgttattataccaatatctaaattgttagggaactataacctcctctccagtttagaaatgttgacttatattataccaatatctaaattgttagggaactataactgaggacagcgccacccaccaatatcatctattataccaatatctaaattgttagggaactataaccctttagccgatttgttgaatggtggaacaattataccaatatctaaattgttagggaactataacttgatgaccttctaatcgtttcctgtcgcaattataccaatatctaaattgttagggaactataacgcggaagcgcgccggccgagcgaaccgtgaattataccaatatctaaattgttagggaactataaccccagcaatggctgtccttttttatgacagctcggcggacaatctatatttattaataaaaactctggagggaatatgggtaggaacgaacaaaagaaatctgggctaatcacagcaggattagttataggtattatcgggctggtgctatcagcaagtcccgattattaacaacttcgccgcaatacttggcgtgctcgctataatttttggtatagttggcattgttggcgctaagaagcgcgacggcgcgggccgcgggatgtcaattgccgttttaatcataggcttagtctgcgttggcatcgtactagccagtcaggcgatgtacggcaaagcaataaacgatgccggtaaggctatccaagattcagtagatacatcaagcggcaaaaagactgacgagctacttaaagacgatgttaacatcgagattggtaaattctcagcgatagccgatgagtatggcgttaacaaaacctcgttgaatgttaaagttacaaataagaacgccgaaacaaaatcatataccgttaagatagaagctgtagacgctagtggcacgcgactcgcagaagacacggtttatgcaaatgacctaaaaggcaatggggctggttcatacgaagcattcaagtatgtcgaatctgataaagtagatagcctaaaagccgcaacattcaaggtttattctgttggtcaaagctaaaaatataaaacaataaaagcaactaagccagctttaaactggcttagttgcttcttggtactaaatgttatttatgcttatcacaagctatgccatcgccatccccgtcaagatgcggcgaatatcccggctcgccgcggcgcatatggctatagccggcagcacgcgcctctttacagctgcggaaattcaactctgctggagctggctgcgacggcgcaggggccgactggcgttgacgcgtcctagccgcagcggacgcttcctcccgtctttttctttcttctgcttctttttgtaccttctcggcgcgctctttttcttcctgcttggctttttctaatctgacaatgcgctcagaaaatggcgcgcgcttgtcactcggtagcttatccacatctgatttagcacgagatatattttcatcactcgattgttcttcggcttttttgactgattcctcggcgcgcttgagagctttttctagctcttgtttgtcataatcagcttttgtctgacgatgaatcttaatagtcttatcgccgcgacgcttaccatcaacgacagagatagaaatattactatcgccctctttgatgtctttaatctcatacttgacactaccagctgagtctttacgatcatgaacctcaatcttattttccgatatttttacttcagcgaacgaactaatgcccgatattttagcggatatctcacgcctattcgtattataatcaagtttaatattatcgtccacgccagaaataacaatagggacgttgtctttttcaagacgagcctgttctgcggtgctattgatttgaacaatagcaaaaactgcaacaattacgccgccaaaaatcatccagcctcgcttacgtttattaacagaaggtttatctttattctctttctgttgtgtttgttcaaaattttttctaaccattgttattctcctaagtacttttaattaagttaatagacaattcttatccaatccgcttataaacatatcacaacatactccagacaacaatatagcttggcttctaaagaaataaactcatttatcaagtaatcacaatgttctggttacccagcagccttatcgcttctgcctgccaatctggacgtgtaaacttttgtgttatactcgtactcatggaagtgctatttgtcataatcataatttttgccttagcagcgatcggagtaaaaacaaataataatatcgccaaaaaaccaaagagggaatacgcatacactaaaaaagcctgcacgatgacacggcacgagctaacattctataaaaccctgcttgaagtagtaaacggctgcacgatcatcccgcaagctcacttaagcatgtttttagatcataaggtttacggacagaactggagcagggcattttcaagaatcaacggcaaatcagtggattttcttatttgcaccaatgatatgaaaccgctcatagctattgaacttgacgacaacacccatgatcgtcctgaccgtcaaaagcgcgacattttcgttaactcaattataagcaatgcaaatatgcccctgctgcggtttaaggcgggtgagtggaatagtgaaatcatcaagcaagaagtcgcccgcgctcttaaagaatcaacgctcgaaaaactatagaacaaaaagcgaactaattatccgcagctttcttaaagtcgtaccacaaataattatctaacaattgccaatatttcatagattcataaaataccatctttagcgatcaaagctcaaatcataatcaataacacacaaaaaaacatgaaacatggcaaatatagatttagaacatataatataccggcagacccaaacagggcggtaacataattaatcgccgccgatatctccaaaagtttacaaactacataaatttatcctgaaaaaagacgatggagtaatcatgtttcgtagatagttttaatgtcgtacaatgtaccttttacgaactaataaatacgtccaaccggatgaatgagaatacgtccagaataaaccaactttctttctatttatcgtttttcactgccaatacctggcagggcaaccttagcactgccagactaaaacttaagattattctaaactttttatacgtattccatttacaaagacaagccagttcattccacgccagacccacaatcgttaatccaaaaaccaacacatttaaaagctgccagtacgttcttgttggcgtttttacaaccaaactgcgtacgtaaacatcatcgcgtacaaacttaagccaagttttccacacgccgccaaatccagccagcaatccacgcatttgactttttcttaattttattcccccgctcccctaattcgccgcccagtcaatatttgactttttagcatttagatataataatatatagtttttcgtattttgcccagcctcccaaaaaagaacaaaaagagaactaaagccttaaatagagcaatacccgcccctgttaattaggctgcccgatcgcctatttagctatctataaaacgaccgctgatctactctgacgtcaatatatgctggcgttataccctgtccatccagatgttttatggtaatgatcgcctgcttaacttgcggctcagctgccctatccaccgtcattcgtatataataatccctgc

SEQ ID NO: 1034 - DNA, 4509 bp, synthetic construct
  source 1..4509: mol_type = other DNA
  misc_feature 1..4509: note = Synthetic
actcgttgggcggattatcttttatttatgtcggcttttctcatactttcaatcattacaatttggctgtataatcatactcagttaagcacaaaaggaatcttacaaatgacgcaaaaatcttcatatccaatgaaaagatattcacttggactggatatcggtactagttcggtaggctgggcggtgctagacctagataaggaccgcatccatgatttgggggtacgaatttttagcggacagattgataataagaaacgacgacaattttctagtgctcaacgtatgaataaacgaaaaaagcagcgcttaaaatatttaaaggcggtcttcatagataacaggttattaaacccagatgagataagatcagctcttaaagaccaggagattacaaaaaacatttattcgctgcgcgcaaaggctgctactcaacaaatttcgcatagggaattgttcagagtgctgtatctgattgccaaaaaacgcggcttcaagagcaatcgtaagtcagatccaaacgatagtgaatcttcagacactaaatttaaggaacagctagctaaaaactcggcaacagcgaagaaatatcagaccattggattaatgctagaaaatgatccaatttacaccaatcaaaaacgtaattcgaaagataattacattgcgacatttcaacgtaaagacattcgcaaagaagttgaaataatattacacaaacaattcgagaaagaactaaatactcctcagacgagcgatcaatataagaagataattgagtcagtattagatgaggtgattgttaatggcgacggtgaaaaacaatatcttggtatatttacacaacgcccatacactaatgcaagtttgattgaaagaatgactggtttttgcgaatttgaaaaaactgaaaaacgctacataaaagccagctacacaacagaagaatatgtatttctgagtgctctaagtaatataatcatcttagatactgataaggatgatgaaagatgccatatcaataaagacggcctaaaacagatactagaattagctaaacaagagaagaacataaaatgttccgacataaggaaagtgttaaaacttgataaatcagtatgtttttcgagtaaagctatagaagatacttatcgtgacagtgttgaacatgccaatgaaaagtattcttcatctcaaagtaaaaatgaattagcagaagcgttagactcgggatcgtagccgtaaaaacatagaaaggcaaaaggtctgcgagaacggtttagagactctttgtatttttaagagacttttcaaagacagttcgtttggaaaaaagatagaagaaaacccttatttgcttgacggcatagcgtatgcactaacggtaaatattgacgatgaatcaatcaaagcaaatcttaaaaaattagaatttctgtcggatcgtgacatttccgtaatcatgaacatgcctgccgacgatttaaagcattttagcggtagatcaaacttgtcgcgcttagctatgcagaatattataaaacacttaaaagatggttgccagtcgcatttagcgatccaaagagctggatacgacacaaaagaaatctaccaaggcaaaaacacaacactcccaccactcaaattatcagacttctcgcaagatggcgatgaaacattcgaaaaatacggtattaacagtaagatcgcacaaagagcactcagccaatcaattcggctagtcaatgctcttattaaaaaatatggctcaccaacatatatacggattgagctggcccgcgagttcgctaagactgaaaaagagcgtgaaaaaataaagaatactaacaaacgcaatcgagaaaagaacagagaatatgaagaggtaattagccaaaccttcaaagataatcataaatttccaccaagtagaataggccacatcatacgtaaactaaccttacgcgatcagcaaaattgtaaggatatttattctggtgacgacatagatattacaacgcttatccttgatgaatcggcctatgaaattgaccatattattccgcgttctaaaaggttcatcaacgatatgaataacttagtgctcacatctgcaaaaaataatcgtgaaaagtcgaatcgactgccgcttgcctatatctctgatcctgtgaagcagaaagaattcctaaagcgtgttaaactaatcaaagataaacagaagcgaaagaatctgctgcttgactcctgcgaagatcaggacaatatgacagaacaggcactgaatgatactaagcatattgctagattcttcaaaaactatattcagcaaaatttatcattcgctggcgatgatgaggaggatgggcgacagcgtgtttttgctataccaggcccagtcaccgcttatctgcgtgcacgctgggggtttaagccaaaagatcgagacgcaaactctctacatcatgcgattgatgcctgtattatcgttgcaaccacaccaaaattactgaaccgagtgatgtatcatgaatctcatcgagaacagggcaagttattttgtgaaagacaagccgccgaacaagatactggagattttggaatgcaagcttatttacgggcaaaaaagatgtatcacgactctattgacaagacatctggagaaatagttgatgctcacaagcatagtgcagcatataaaatcatacaaaagcacgaacaacgctacagatattcctttccacgaccatggacagattttatgcgtgaggtttctttgagggctagtgacttggacaagaaagccttgcaaaataagcttgttgagatcaataattatgacgatgagttccgcagaacgcttcatccgatattcatatcacacatgcgctacggcaagatgcgcggatcggggcatggcgaacaaatctacaagaagccctataaaggtgatgaccgaattattcaacataaatcaatttatgaaatatcgccagcagatattgaaaactcgccaattatcgtttcagatagaaaactatacgaattgctcaagcatactttccaatcagttgaactaaagaaaaaccaaaaagagaaagatagacgaatagatgaaagtataattatccgcaagccatctaaaaatcctgacaaaagtccaatagtaaaaaggattcctgtttatatgtctgataagcctatatcacacgacattagaggaggagccatcctaaatgggaagggtacagttgcgtattcgattttatgccagtacacgacaacaagccactataaagtagtacctgtatactttcggcaaattcatgctaatgagaatatagaattaggagagggctggaaatatatctcacgcatggttccaaatgattttgtggttatcactaaaaaagatggaggcaaaatatctggatattataaaactcgcaaaaacgatacacgcattagtatattacctcatcaatatagcgacagcaacaaagcgatattcccgagtattagcacagcaaaagaaatacgagtttataatatatccattcttggagataatgccccagacgaggaatatagataatggcctggcgcgttgtagctatcgaaaaccccgccaggctaagtttgcgtgacaaccagctagtgattgcacaagaaactgaggcgactttgccgattgaagatatcgacgcacttatcttagacggttatggcataaccacgaccacaaatctactcacagcgctcgccaccaagggcgcgaccactattatttgcgatgagaaacacctgccagccagtatacttctgccgtattcgcaacattcacgccaagccaaagtttcacgccaacaactcaccatgagccaaccgctcaaaaagcagctgtggcaacgtgttgtcgagcaaaaaatcaccaatcaagccgatgttctgcaaacagttgagctagacgacgcaccgcttcgcacgtacgcaggcgatgtcaaatcgggcgataccagcaaccgcgaatcgctagctgctcgcatttattttgaccagctgcttgatgacgccacgcgccgcaagccgatatggcataatgccgcacttaactatggctacgcaatgatccgcagtcatatcgctcggcacattgctgcccgcggactagttgcttcgcaaggaatctttcatcacaatgagctcaatagttttaatctagccgacgacctgattgagccttaccgtgccgcagtcgatttgtatatcctagaaaaagttgccccgcttcacatcggcgaccgcgacgccagcctcaccaagcacgatcgtcaacttatcattgacatattaaattattatgttataatggacgataggaagtttactataaagcatgcggttgagcggacggttgaaagctttatcgaatgtatcaaggtaaaggaggcgcgtaagcttcttttgccaaaaatcgcctcctaacagggaagggatgtcatataa

SEQ ID NO: 1035 - DNA, 24914 bp, synthetic construct
  source 1..24914: mol_type = other DNA
  misc_feature 1..24914: note = Synthetic
taattcatttgatttttatacgtatgaaaacccattcgttttatatcatagcactgtcagccctggctttggggctgagtgcttgtttcccggtacgtatcgtcactacggcacctaccgagactgtttatgtcaaacagcaacctaccaccgttgtcgttcgtgaaactacacccgcttactatccggtacagacaactaccgtcgttacagcaccttccaaacctactaccacaaccacggtaaaagtaacctctctcaccaacgacctctcttactatcttgacctgcaggctgtagctgccgcttttgcccagtccgggtcggtcaatgagttcgaacagttgctcaactcttcgagatacatgatcaataatctggatctgaacaacgacggttatgtggattacctccgcgtcttggagggacagcaaggctatcgccatgtatatcttattcaggcatgcttggcgccatcggtctttcaggatgtagcaaccctcgtggcggaagcgcagaccacctcgctctatgtcgaggttatcggtgatccttatatctacggatcgcattatattgtgcgtccggtatgggtgaaacgccccccgatgtgggatgttatgcgccggactaactatgtttgctggcactcaccatattactatggtcaccatccgtcttattatgagtacatgaaatgcgtctatctgagccattatatggcttacgtggagtcgtatatgcataacaaccactactgccaccattgcgactatcccagttcttactattatccgcaatatacagaggtaacgcgcccgcacacgcgtcaggattatgctacacagtacccgcagaactcgttctcgaaccgtaacgccaaggtctataccgctactacgggttctgcctccggctcgtcggctgctgcggggacacgttcggtgcgtaacaccgcagaactccgtcaggctgcttctgcttcgggcgctacgacacgtacacctgccacatcgacatcttccggtcgcagcacctcaacaacgacttctacaccggcatcttcaggtcgcagcacctcgacgactacctctacaccggcttcttcaggtcgcagtacttcgacgactacctctacgccggcttcttcagggcgcagtacttcgacgactacctctacaccggcatcctccggtcgtagttcgtcgtcttcggcatcgtcttcggctacccgtacgccgagtactactgtcaccacaagggtcaactcctccggtgctacacgtactacgatccgcactaccgatgagaatggtcgaaccacttctacacagcgtacctctacgacggctccaagccgttctgcaggcacttctacgcgtacatctacttcaggctcctcaacacgtacatctacatccggtagtacaccgcgtacctcatcaggaacctcaactcgtgatcgtcgatgaagtccgttcgtgcaatatttctggctttagccctcagtgtgtcgtttggcacgctgtgggctaaagcacctgtccacgacactgtctatgtctatattcatgatacgatttatcgctgcccggatttggaggaattgatgttcgatgtcgatgccttggggctctctgaggcgcagttggacagtctcttggcagagatagagggcgacctcctgtattcgattgccatggatagtatcatgggcgattcattggatgaagaagcgaatcttgagcctttggatggcactacggcagatcgcatcatctcttatgccagacgttttattggcaggccttatgtctatggggcttccggtcctaaagccttcgactgctccggctttacatcatatgtcttcaaacatgcaggcatttccctcacacgctcttcgcagggacaaagcaaggaggtgcgccgtgtccgaggcggctttaagaaccttcgcaagggagacctcgttttcttcggacgccataatcatcacacagtcggtcacgtaggcatagttatttcggctaccgaaaacgatttcaccttcattcatgcagccatccattcgggaattactatttcgcattatcatgagcgttattatcggtcatgttatatgtttgcagggcggattttgaggtagaataggcgagtatagcattttttttgcaaaaaatagcaaaaaaatttgcgtatgtcagaaaaaagcagtacctttgcatccgcttttgagaaatgacaaatataaaatgtcaaatttcaaatgcgcgtcgcgaccattgaggtcgctcgcttatggtggtcttagctcagttggcagagcatcggattgtggttccgagtgtcgtgggttcgagccccacattccaccctttagacatcctgcgggatgtcttttttttgtatagtggcttgttccttgcggcactctttatcggttagtccatccgtatcagtaagcaagcttcctatacgcctgtactatccgctaaaatcttggcagatgagccactatacaaaaaatcggtggatgtgagggctctttagccaggttcttatctcgctgcgctcgaacgatctgcgcttttagcgccgtatgcttgctcgtttctctcgctgcgatctgcgctccgcgctgtgcgagcccacattccaccccaaaacacaagagagtcctttcgggctctcttatttcattttcattcgcatctcattcgcattacggacgtttctgtcgggtgtctctataatttatatcgcctcactttatagtgatattaacaagctataatccgttccatcgtccacaatgctatgaccggaattgtccgtagcaacaacaggtactgttatattgtcttgaggctctgttgggcgatggataaaaagccctatcaacagaccagcaacggcagcagcaggcgttgctatccatccccaataacgtgtgtgcttttgcggaacaaccatcgttgcaggagtggagatgtctttctccgattgcttgcgcagccgacgtgcagaagcagatagttgggattcaaaagtattactcataatcttttaattttagtcgtagataattggttaatgtattgaggcgcgatttgacagtgccctccggaacatctataatcgcggctatttccgggacggttaactcctgcgtgaaccgaagttcaaacaacatttgttgcgcttcattgagacgggcgagttcttgttgtaaagcactatcaaatgtcgctgcatctaatttcagcggagtgctgtcttctgctatcggttcttccgttggaagcgaatccaagtacgcttgctcgtgttggttctgccgataggtgttcttgcaaagattgtatgcgatagtgaaaatccatgtgcggaacggttgtccgtctgaatactgccaccgtgaagaccacactttcaagaacgtgtcttgcatgtgatctgcagattgctcctcgtcgccacccaacctgcggaagaaaaaaccttgcagcaaccgggcatagcggcgatagagttccgcaaaggctttctcatcatctttccgacggacacgttccatgagttgcccgtcggaaagagacttatagtttacgaagagtgctatcattacttgtcgcccaataggttgatatacttttgcttctcttcattagacagcgatgtcctcgcaacggctgcactcaggtatcgtgtcaggcggttggcatgcaacgtatcacctgcctgcttgtagctcttgacaaccggcgccagcatgaccatatagttgagttggatgcgttcgctgcctttccactgctcctcattgacataaagcggctctgtcagatagtccatgtgatatctctcttccacatttcgcatcgcaacagccatattgtcgtaactgtgcgtcgaataacggaataccaagccttcgttatacagtttccggctcagaccgttctctttggccagcgattcacgcggagagaaataaacagggcggcggctttctttgatgatatgttccacgatatcctgcaaatacacctcgttcccattctccatggtagcgtagtctttggttgcttcgaacggcttgataccaagcttgcggcacaaggcatcgcggtacgtgtccaaccagaggaaagatataggaataatgattttatcggtgtggatgtccaatgcctcttgcaaaatgagaggagcgtagaacgatacgtcgccgttctcaaaatagagcgcgtttggttccattccccgcaggcagttgtccgcgtaacggagcagataggacggatacgtattgttcttatagagtgacagcgtgagtgtgtgcaacgtggctctgtccgcatcggttaaatcgcctttcatcaccagataggcaatcagcatggttgtattctgccgtcctatgttttccggaatctgctgcaatgctttttccgcccaagacgaagcgtccactccctgcatgtcgcgctcggtctgatacatggctaagttataggtaaacgtattgggaatatgctttgccatttcgtccaacactgcctttttacggtccgtcatgccgtattggtcatggagcatgtctgcataacgtgccgcgctgaagcactgttcccatgcgtgctcgtcagtaggattggcttgtgccttcttgtgccaaagggcttgctggtgttcataccatgcggcatcgtattcatcgacgacaataccacggatttctttgggttcttgcgtttccaaatgtgtgaacgcttgaagtgttccaatgcagcccagtgctaatactgctactgcaataatcaaatactttttatccattttggttgtaataatcgtgcccataggggctaagaaattttatcggttaatattctgttttctgagtgcgctctcactactgcatacaccgataaactcaaatcgttcatttttctatagcaaaaaatgtgccttaatgtatttttatatgtgtcatattttaaaatcaaacttcgccatcttcccaaacggaattatgccaaactgccgaacataattgcgccaaattaccgattaaaattcacaaaaaatgctgacgctcttgcatatatcaagaaaaagcagtatcttcggactccgccttgcctaattatggttgccatccttaggcggaggccgctccttccgaaagcggaaggacgctccgcccccgaaattacgttcgcaaaatcctgcaaatggcaaaataaaatgaattttatttgcacattcggattttttgttgtaactttgcagccgaaaatagcaaagagagtaaaacaacatggcaaaatcggtcatagatagaatagaatatcttgttctgttggtagcggagttcgcccgcctgaacaagctgtccgaggtgcaatcataccgctacctgcagcagtatggggcgttggctctgtgcgagaaacattataatatcatgcacacgctctctgtggaggagaatctgcaaaccctgcgtgaatattgtcaacggaaaggaggcaatctatgattctctatcatggcacaacggtcaatatagagcgtatcgaccttatgaaatccaagcccaacaaggatttcgggcgcgctttctatctctcggaggactacaaccaagctttggaaatggcgcagttcaaagcggagtttgctgaactgccaccggtggtgaatgtctatttctttgacgaaaaacatttgcaggagttacgttacaaacgctttgagtcttacacggaggaatgggcgcattttgtgtataaccatcgtaccgaaccgcaagggcgcacgctgcatgagttcgatatcgtctatggaccgattgcgaacgatactataggcgcacagattacccgttacaaacagaactatattacgtttgaagagtttctcaaacgtatccaatatcccaaaggtatcacattccaatacgctttttgtacacaaaaggcgattaaccaactgatcaagcaatgaacgtatcgcaggctgaatttcagaatatgaaagaggagattgtcaaagacctcatcgctcgccttatggatgagcgcggtttggcgatgcaagatgcgttcgatacggtgtataactcgcgtttgtttgaaaaactcagcgacccgaaaacgggtctgtattttcaatcttccggctatgtgtatagctacttgcaagacgaactgaatcaataaaatacacgtcccttgctccgagacgctaaatcggagaaacgcgcgtagcgatgcgcgataatatatttgataaaaagaagcgtttgctttactcttaagtagaaaaattaggaacttttcggaacaagagcatagcgaataggcttcatgtatttgcgtgaagttactatctgcatacttgttccaaggttttcctaattacctctacttgagtgtgtggcatagcagcctcacgcttttgtttgttattattttaccgctttgttcgaagctgctgcaaagcaataaaaaacagtcatagcaatgaaaaaaagaactcttttattggcactcctgtatggatggatgattttaccaatgcaagcgagaatgtttaatccttttgacgaagaaccattaaacggtcctataaaagaaattattatacgtaatcctgacaagaagaaatggtatagtcaggagatctataacgaaaaaggtattctgatcgaatcaggcagatataagaataagagcgttgagtttctgcaaacatggactcaatcagatttgtctgaatacatttatcgtggtatttatcttaacaacaagcgcaaacagaaggacaatcagtgtgtcttaattgcttataatgaaaatggaactattcaggaaaaggtaaatatgcaaggggctgttattatgggaagagagttttttgaatataatgaggatggtctgttgacgaaaatctatatgtcaaaaaatgaacaacctaaatctttgagtcaaatgtacacatatgataaaaatggacgacttgaagaatattgctattattttaatgataaattgtcttttggattcaaacttgaatataccgattccgttatactagaacacggttttaagggagaggacaaaaaaccgaacgattcacatggagtatgttatatggatggcgaagggcgaataagaaagaaaataaaatggcatggcgtatataacagttatacgcaagttgaatatcttcaatatgaccgttatggtaattggacagaaaagattgtgacacattataccggagatagtcaggcaattaaattaggtgatatcaagtctaaaaatcttgagatagaggatgctgttatatatatgccatctgatcgcaaaaaagttcaacactgggtgcgtcaaatatcctattatgaataacatactcagaacccgtatattttaccaaattatttcgtcttcatgccgcgtacgtgaagcggttaaggtaataatcgtctgagccatgtgaaataagaactccttagagccgaggctgacgggacgctgtcgagacgatagcgccccataagcacgcggattccaacgtaccaaatcttaatcatcggcaattttcaccgtggaagtgtactggtgtttgatagcacttgcctccgagatgcctccgagattactccgacttgcctccgatatctatattgtaattcgttgcaaatgaacggtttatgatgtcattgccatatagggtgtatatactgcctatcgggtagtgtgtgggcgaatatttcataaagcagaaatgatttgtttataaaaaccagaaattgcaaatttaatgccagacactattatggcataatatttgcatcggaacacgtatgttccgaagaatgtggataataatgtttctggtttctgtactgcctatagcggcacggaaacaaaagccgcttgtgccggattcgctccaactcatagagactaatatccacggtattccccttcggatgaggagagtggaaggcggatcgtttgtcatgggctcgacagccgaccaatacgatcccgaaatctacagcgacaaaccggctcacatcgtttttctctctcctttctatatcgctgaaacggagatcacatacgagttatggcaggcagtaatgccggattacaaatcttcatttcatcccaaaggatttacgtatagtcctatctcgtatgtctcttggtttgattgctgcgagtttatccgccgtttggatagtatcaccggcttgccgtttcgtctgcctacggaagccgaatgggaatacgccgcgcgcggcggaaaagacagccgcaagtaccgtttctcaggaggaaacgagccggatagtgtaggatggaacagccgtaactccggcaattggacccacgctgtgggacgcaaacaagccaatgagttaggcttatatgacatgtctggcaatgtagcggagtggtgtcaagactggtatgcgccttattgtgtgggcactgcggtcaatccctgtgtgtgcgattccggtgagtttaagattgcacgcggtggcagttatgacgactgtgccgctaatagccacatttcgctccggcggtggtattctcccgaatcgaattacaactatattggtttcagagtcgctttcaccttaccggatgacccgatgatgcaaaaacagaacatctctgaaccggcacttaccaagaagatccgtgcgaaaggaaaaaagttgctctttcattatgtagaggcggaacaaccatattatatctcggaagaaatcactgtgtcccaatggaagaaaaccatgcaacagtccccgaaggacacacaaaagaaccttgctaccggaatgagcaggaacgagcgtgcccgttttgccgagatctggagcttggaaacaggcgaggctcttatagtggcaactgcggaacacatagagaaagcaaaggcacaagggcttatctctgcatccatgccggacaccggcaaaaaacaccaaagcatccggcggacacaacgcaaacgcaaggcggtaagtgctctttctccatggactgaactggtcggtgtcaggctgtccaaacccgatgacccggttctgttggagtatcggaaagacgatgacgactcccaacccctgcggcttgtactcttttattccttataaaattcataaatctatcaggataaacattcactattttaagaaaaaatgtatcctcggtattaaaaaaaacgcccgactattgcatatgtcaggcgttttgtgtgcttttgcagtgcaatttaatagcgctatcaaataagacacataatatcatccgaaaatagtaactatgtacagattaggtattgacatcggcagtacaaccatcaaaatggcactgatagaagttagcggagaagcaaagtctgtcagcggtacgccgcatattaaaattctggctaccgactaccgccggcataatgccgaaccgctgaaagtagggcaggaaatgatggaaggaattctacagcgtagcggcctgtattctgtcagcgaagcagtccaacaacgcagcggtctcaacttcctttcaccacccaaccgttcgagccatccgatcgcgaccgggtaatcctcaccccttatttcgccgagggccccttgattgtccccttcggcggcattcttgccgccgttattagcgttgccatatatcagcgaaacggtctatactctatcagcattacgatctatcctctaataaccagtctaaattcaaaaaagcatttaatttcttgcatatatcaaaaaaaagcagtacctttgcatcactttttatgaatgacatacacaataaggattattccgatgtgtaaacatttagggtggggcacagcctcgccctcttttttgctcttatagtgcgcttggtctatcaagcgcagccgatcctgcagcgcagcggtctttcgctttcgtctattgtgccgtctgagagacggcgttcttctttttgttctgtccctacggtattccgcggatcttttttcttcgtcctgttcgcgggtctttagccctgcgccaccttttttgattgtccccttcggcggcattcttgccgccgttattagcgttgccatatatcagcgaagcggtctatactctatcagcattacgatctatcctctaataaccagtctaaaattcaaaaaagcatttaatttcttgcatatatcaaaaaaaagcagtaattttgcacaaaattgtcacaaacaagaaatcattgatatcatgaaaaagaaaattctcggtttggatttagggaccaatagtatcggttgggcagtagtaaatgaggaagacactaagaaaagtatctcccatgccggtagtcgtattattcccatggatgcaaaactaatgggggattttgaaagtggcaattcagtttctcaaaccgcgacgcgtacagcagcacgtggtgcgagacgcttatatgagcgccatgcattacgcagagagcgccttaaccgtgtattgaccattcttggatttctaccggaacattatacctgcgaactaaaccgttatggccagctcaatcaaggagcagagcctaaattagcgtgggaaatggtcgatggaaaatactcattcttattcaaagactcatttttggaaatggttcatgagtttgcgcaagttcatccggaattactggtgaacgggcgaaacattgcttatgattggacaatttactatttgcgtaagaaagcactaacgcaggctattacaaaacaagaattggcatggatacttcaccaattcaatcaaaaacgcggttataaccaagcacgcggagaggaagacgagcagaaagagaataaacgtcaagaattcataacacaaaaagttatttctgttcgcgataccagcgaaaagtcaaaaggaaaatcggtatatgaagtatgtcttgaaaatggatggatttttaccaaagaaagcaaatatcctttagattgggaaggtaaaactaaacacttcattgtttcaaccactcttaattccgatgggacagatgcaatagataaagatggtaaaatcagaagaacatttagggcaccggcagatgatgattggggacttttaaaactaaagacccaacacgatattgatgtaagccacaaaaccgtcggagaatttatctacgatgctttgctacaaaatccggatcaaaagattatcggtcagttggtacgtgtcgttgaccgaaaatactataaggacgagttaaaacgcatccttgatacgcaaaagcagtttattcccgaattacaaaacaaagaattgtatgcagagtgtattaaggcgctttatccgcaaaatgaagcttatcgaaacagcatagcaggtaaggattttacatatttgctgttaaatgatattattttctatcaacgtccactgaaaagcaagaagtcattaatcaacgaatgtccgtacgagtatcatgtatttaaggaaaaagatggtaaatggcaaaaacaatacttgaaatgtatctccaaatctcatcctatttatgaagagttccgtttatggcagtttgtggaaaacttacatatctatagagaggctgctaatggaataggcaaagaagattgtaccgcagaacttattgctaataaagcggatttaatctcttggctgctaacacaaaaagaggtttcagaaaaatctctattaacgcaattagttggtaaaaataagattaaaggattatcttggaattatgtatctgaaaaagacaagaaatatcctgctgctcctgtttcttctactataattggtactattaaagaggcaggtggagacatcaacactttgaccgatccatttgaaatccgcaaaaacaagcatcatagaaaattatcaggtaaagaacaagacgagaaagccaaaaagaataatagaattatcaataatttagagcaaatatggcacatgctctattctatatctgacaagtctcaactgctcgctgcactcaaacattatgccgaaacaaaccatctgtccgatgtgttcgtagagaaattgggtaagatgaaaccattttccgactacggagcatacagcgaaaaggctacgcgaaaattactgaacttaatgcgttgcggagagtattggagtgaagaagctatagatgccaatacaaaatcccgtatcgagcatattcgaacaggcgaagtggacgatgcaatcagtgagcgtgtccgcgagaaactggaggcgatgaataaaataaaagatttccagggacttcctttgtggcttgcggaatatgtggtgtatgatgtgcgcaagaacgacaccaaatgggaaacaccggaagatattgacaagtatctgcaatctttccgtttacattcgcttaataatccaattgtggaacaagtagtaatggaaagcctgcgtacggttcgcgatatttggaaacaggaaggacagatagacgaaatacatattgaattagggcgcgacctcaaacaaaatgccgagcaacgcaagaaaactcaacaacgccaacaagagaacgagaaagcgaaccttcgggcgaaattactattacaagaatttatgaatcccgatatggagatagaaggtgtacatgcttattctccaagtcaacaagagctgttccgtatctatgaagatggagtattaagtgccaacaagcccgatgatgagacacaacgcatcataaatgacttgtcttctctcaaacaaccatctgcccaagatatcaagaaatatcgcctttggttagaccaaaaatatatttcaccatatacgggagagattattcctttagccaaacttttcacaccggcataccagattgagcatgttatccctcaatcccgtttctttgatgactcaatgtcaaacaaggttatatgtgaggcagaagtgaatgcccgtaaagaaagaatgttggggcatgaattcattgtaaaatgcggaggagaaaagattacactttccggaggtaaggtggtaacaatattatcccaagaagcttatgaagatactatccgaaagaactttgccggagccccacgcaaacaggagaagctgatgctggatgatattccggagaagtttgttgcacgccagatgaacgatagtcggtatattagccgattgatgatgcaactgctcagtaatatagtgcgtgagaaaatcagtaacacagaatatgagccggaggcagttagtaagaatctgattgtatgtaacggcgcaaccacaacgcgcttaaagaaagactggggtatcaacgatgtttggaataagattattcttccgcgttttgagagattgaataggttacaaaacacgacggtctttacggctaaaacagcaaacgggcacattattcctaatatgcctttggaattacggcaaggctttgagaaaaaacgtattgatcatcgtcaccacgcgatggatgcaatcattattgcattcacaactcgcaatcatgtagctttgttgagcaacgaatccgcattagacaaggatgataaagcacgctatgatttgcaaacgcttctgcgcaagcgggaagtctggagaagtgcagacgggaaagaacattataaattcacagattttattgcaccttatgacggtttccaaaaagacgtacaagatactttggaaaatataattgttagtttcaagcaaaacttgcgtgtgattaataagagcaacaatcgttccgttcgttttgtggatggcaagaagcaaatggtacgtcaaaccgaaggtgacaattggtctattcgcaagtccttgcataaagcaactgtatttggcgaagtgaatttgcgtaagaagaaatatgtcaatctgacttatgcgctcaagcatgtggaagatatagccgagaaagatttgcgtaccaaactgcgcgagttgctgcaagaaggcaaggacgagaaacaaatcaagaaatactttgcttccgaaccggatgtctgggctgatgtcaacctcaaacgtatagaggttttctattataccaaggataccaacgaccactattatgcggtcagaacagcattggatgactcatttacggcagattacatccgcaacaaagtgacgtcagaagccatccagaaaattcttcttgcgcatttggcgcgttgtaataatgatccgaaattggcattctcgcccgatggaatcgagcagatgaatgcaaatattctgcaactcaacaatggagtgcctcataaaccaatatataaggtacgcacgtgtgagaaagcagagaaatttgcagtgggacaaatcggcgctaaaagcaaaaagtttgtagaagcagacaaaggaacaaaccttttctttgctgtttattctaccaaaacggaagaaggctctgataaacgttcttttgttaccgttccattcaaagtggcggtggattgccagaaacgcggaaagaaagaatggcgtacattattagacgaatgggcgcattctgaaagtatagttgcagagaatgcaaaactacaatttattctttctccgggagatttggtctatgttccaactgcagaggaaatacatagtggaaacataagattggataaatccagaatatataaatttgtttcgtcaagtggtaatcaagtgttctttcttttagaatatgtttcggctcctattattaatataacaatggaaaggaatggagaaaagaaaactatatcagaatattccactttgaacaaaatggagcgcgctattaccggggaaatgattaaagagatttgtctgccgataaatgttgaccgccttggaaatattatagagccatgataaaacgcgtcttatgttttgagaatccggcacgtttgagtcttcgtttggagcaaatcgtcgtagagttaacagctgttgttaacaaccctaacgtgcctgaaattgcgcaaaaaatgggcactaaaaccattcccattgaggatgtcggggtcgtagtgctggataaccggcaaattacgatcacacacgcgcttattgacgcacttcttgaaaacaattgtgccatcattacttgtaatgaaaaacatcttcccgtgggattgatgcttccgttagacggacacaatttgcaaaacgagcgtttcagggaacaaataaatgcatccgaacctctcaaaaaacaattgtggcaacaaacagtagttgcaaagattttgggacaagcacatgtattgggcactcagcatattgaacataacaacatgctcaaatgggcaaaagatgtgcgttccggagatacagataatatggaagctcgtgcagcagcatactattggcgtaatgtgtttggtgatcaggattttatacgtgctcaagaaggactgccgcctaataatctgctcaattatggctatagtattgtccgcgctatgatggcaagagcgttggttgcggcgggattattgcctactttgggcattcatcaccataatcgctataatgcttattgccttgcggacgatattatggaaccgtacagaccatttgtggatgaaatggttttgacgatgatcaaacaagggatggttggtgaagatattactactgctcaaaaaatccaactgttgggtttgtgcactgcagatgtgcatattgaaggtcatcgccgtccaatgatgttagccatccaaacaaccgcacaaagtgtccaaaagtgttactctggcgaagcaagaaaaattatttatccagattggtaactgtctcatcctaaaagtaaaaatacggactaaaacaagcttacgctaacatatatctttccgatgtatgttgtgtatgtcattcaaaaaaaagtaaaaatacggactaaaacaagcatggtgacaatctgggcgggcatgcccaagttgtgtatgtcattcaaaaaaaagtaaaaatacggactaaaacaagtactattatgcaaggaacacctaaagcaatgttgtgtatgtcattcaaaaaaaagtaaaaatacggactaaaacaagtctttggaaagacttaaacgaccacacctagttgtgtatgtcattcaaaaaaaagtaaaaatacggactaaaacaagagcctacatcgacgcccaaaatgaagaggagttgtgtatgtcattcaaaaaaagtaaaaatacggactaaaacaagtctacacatttttcaccattttgatatattgttgtgtatgtcattcaaaaaaagtaaaaatacggactaaaacaagctattattcctaatggtatttatccgcgtggttgtgtatgtcattcaaaaaaagtaaaaatacggactaaaacaagagcgagttacgacaccatcgccgaagtttagttgtgtatgtcattcaaaaaaagtaaaaatacggactaaaacaagaccaactaagggaccactattcggaagctgttgtgtatgtcattcaaaaaaagtaaaaatacggactaaaacaagactatcaatttccaagacgtcgaggctatgttgtgtatgtcattcaaaaaaagtaaaaatacggactaaaacaaggtacgccaccgacatgtgcaataccgagcagttgtgtatgtcattcaaaaaaagtaaaaatacggactaaaacaagcgtattttgtttgccgtctgtgtgtgcatgttgtgtatgtcattcaaaaaaagtaaaaatacggactaaaacaagaccaaagaccaaggaaaggaggataaccaagttgtgtatgtcattcaaaaaaagtaaaaatacggactaaaacaaggaattggctgcaaattgtagaacatttccagttgtgtatgtcattcaaaaaaagtaaaaatacggactaaaacaagcaaactctgcaccgttgaactgctccgcatgttgtgtatgtcattcaaaaaaagtaaaaatacggactaaaacaagaacgcaatgggattctccatcgaggacacggttgtgtatgtcattcaaaaaaagtaaaaatacggactaaaacaagttcgagcgatggaaggcgaagcgtcgagccgttgtgtatgtcattcaaaaaaagtaaaaatacggactaaaacaagtcattcgtcgtggatatagacacattgcttagttgtgtatgtcattcaaaaaaagtaaaaatacggactaaaacaagttaggctcttaggactaaatgtcagtgtgagttgtgtatgtcattcaaaaaaagtaaaaatacggactaaaacaagctcttggaggtaaaggtacccaggtaggcagttgtgtatgtcattcaaaaaaagtaaaaatacggactaaaacaaggccaagaagatttgttctccattgttgcagttgtgtatgtcattcaaaaaaagtaaaaatacggactaaaacaaggaatttggttaaggaaagcaccgagagacggttgtgtatgtcattcaaaaaaagtaaaaatacggactaaaacaagtccgcgtaactcttggaaacgtgtccaacggttgtgtatgtcattcaaaaaaagtaaaaatacggactaaaacaagttattccgtataaaacactaaaacacaacaagttacaacatgttttagaacgtaaaaaagcagtacttttcggtactgcttttgttttatttttggtatttctaatttctaaaacagttccaattgttgaaccggctgatctttcaacacctctttgcagcaatcaaaaatctgcatatcgccaaactgtttgtcggttatccggagtatgcctattttgccgaaaggaggcatccagcgtttcactcttgtaatatgaacatccgcattttcggcgctggggcagtgcctcagatagatactgaactgaaacattgtaaacccatccgtcaagagtttcttacggaattgggcatattccttcctgtctttcttggtatctgttggaaggtcaaacaaaaccaacacccacataatcctatattcgctaaatcgtgtgtccatttcttagccctaagggcacgattaaccaagtttgggctacaaaattactgaaaaatgtagaattttcaaaattatttgtcaaattatttgcatatttccgaaaaaaaccgtacctttgcatcactttttatgaatgacatacacaataaggattattccgatgtgtaaacatttagggtggggtacagcctcgccctcttttttgcacccttatatttttttgcatagcaaaagtggcaaaaacaaaaatgtaaataatacggactaaaacaattaattctcgactaaaatcggtctgtttgatgcaaaaactctgcttttggaatcaaaaacaagttttttacacacaaagttgcaaataaatttgcacatgtcaaaaaaaaatagtatctttgcaccgtcattagaaatagtggcctctatacttagagtaaagtgctgtttcacgtgttgagataacactataaaatggaaaccggtgggaggtcttagtacctcccttttttattcaaaatatgagcgacagaaaaacagctactacaattgatgaacaattagcccgcctgcagagcagaggaatgacaattggcgatatagaaaatgctggcaaagttttgtcaagtgttggctattttcgtatgggcttttattggtattgttttgaaattcccaaacacaggaagaatggcattcacaagttccgtaaggatactacatgggaaaaggtgaaagcactgtatgattttgacgaccgcttccgcaatctgctttctttctatctccagactatcgaaacggatatccgcacgcgtattacatatatagtatctaatcattataagacagatccgttctggtttgttaatcctgcctatgtcggtgattcttttattcaggagttttgtgccggatactcgaagctcaagcgaaataacgatgtcattaagaagcaccatcgcaagcatccggaagatacgtacgctccagcatggaaaacgctggagttccttactttcggagaagtgcagcatctgtatcttaatatcttggataacctgttgcgtcagcagatatactcacgatatcaaatagcggaggaagatgtctttaagtcgtacattgatattctgcggattatacgaaatgtgtgtgcacatagccatatcctatacgacaaacgcttatatgatggaattgtcggtaggcatgagttgttgggattggcatctggagaggaattctctatcgtgggtgttctcaaactcatctactatatgctacgacagatcgatccggacaaagagacggagatgcgcaatatgcttcgttcactcgtcaatcaagtagaatatgacagcgtaaaatttgccatatcgcgccttgctttctaaaaaatattattccgatgtgtaaacatttagggtggggtacagcctcgccctcttttttgctcttatagtgcaacgatcttgcagtgaaacggtctatcaagcgcagccgatcctgcagcgcagcggtcacgcagaaaatctgcgtaatctgcgtaatttgtgaacaaaaaaaacacaaaaaagacatttttatttgcatatgttcaaaatttgttgtacctttgtaccgtttttaattcttaaccattatggaaaatgctaccaacaacgctcctgcactgcagttgagaacctcgcgcggactcctcaaaatgatctttttgggactcatcacttttggtatttatccgctggtggtggagtcgcacatcggcgaagagctgaaccttatcgccagcccgcatgacggacgaagaaccatgcatttctgcctcatttatttcatcttctcctggctgacaatcggcattgcgttactcgtttggtaccatcgcacatccgatcgcatgaacagcgagttgaacagaagaggcatcgattactctttcggcgcactggatttctggctttggaacattctgggcatgctgattattgtcggcccgtatatttatgtctataagcgtatgaaggcgatgaaccttatcaacgaggattataaccaaagaggataagtttctgcccgaaccatgaacgcccgactgccggtttgtccgtggacattgaacgaagggtaggggagttgctgcctggaacgggactcttcctgcctctttccctcgatgacaaatcgaggttttttcggactcacataaaggtaaaagggggtgattacagggtgattacagggtgataactgggtgattaccgggttattcggcttacgtcagaggcaggcaagaacaagaaaagtttccaactgaccacttgtcagaacgacaaatatatacgtagtatataccacaaaaatcatgctaaaagatgactaaaattaaatttcatgctcccgttaaagaaatgaacggggaatttgccaaaggaagcggtattatcatgcggaaaaagaaataccgggctccaaacggggcggtccttaaagaaggctctcaagaatcatacaagatcgtgaacccgagggattatgaaaaaacaccgcctaaaggcgcagaactcgctaatattcagctgtttgctgactccaaacgccttgcctcggaaatcctgcattccggggatttctcagatgacgaattggctctcatgacgcccgaagagcgtcagaaaacgctcgctttgcgcgcacagttcgaagacctcaaaaagcggttctatgcccagttcaagcacccggatccggaagctccgtttgagaagaaaccggctcctggatcttccaaactgcaccggaaacagtatgccaaactggataacttcattcaagccataatccgcgaaaaactcaaaaacgcaaatcctgaataacaaacatatcaatcccgaataaccgacacaccaatcccaagcacttattccagcgaacctgccaatttggcagaattcggcaatcaaattgtcataattcaccaattcctgcacgcatggtataattcttgtccttcaacctgtatattagtatatagtaattttgaatataatcccgattatgttaaatagcactcctgaagacatctaccccgtagaagatacgctctcggttctccctcttaaaaacatgacgctctttcccggcgtaatgatgccggtggtcgtaacacgcgaacgcgcacaacggctcgttcaggctgctgccaaagacaatagcctgttggtcatcctctgtcagaaagaccgggacatcgtggatccgcaaggcgaagacctctatgacatgggcactaccgcacacgtcgccaaagtaatggagatgcagagcaatattgtggcattccttgaaggcgttagccgcgttcgcgtcaccgagtttgtcaattccgataagggattacaggcgcgtatcactgaaatgccggagatctttcccgagacggaggacaaggaggcaaaagctatttacgacaacctaaaagagcaggcgggatttatcctctcaaacgtcacaaacgtgccttcagaggctccgctgatccttggtagcattaccaatatccctaccctcattaactatatttgtatcaatttcaacctctccacagccgacaaacaactcttactcggctacgattcgatcaaagaaagaggttttcacctgctcgaattgctcaacaaagaggtcgaaatgctcaaaatgaaggcggagatacaatccaaagccaaagaagatatcgacaaacagcagcgcgaatacttcctcaacaaacagatggagaccattcagcgcgaactcggcgacacaagcgcagaaacaatcagagacttggagcagcgggctgctgagaagaactggcctgaaaacgtggcgcagaccttcgcacaacaactcaagaaactgcaacggatgcaccaggaatctgcggaatttaccatgcagcagaactacctcgagacgatgctctccctgccttggaacacctttaccgaagataactatgacatccgccatgcacagcaggtactcgataaaaaccattatggcatggagaaagtcaaagagcgtattgtggagttcctggctgttcagcgtcaggtaaaaacctctgcgccgatcatctgcttgtacggcgctccgggtgtcggcaaaaccagcctcggacggtctatcgccgaagccttgggacgcaaatatgcccggatatccttgggcggtctgcatgacgaagcggagatacgcggacaccggcgtacatacattggcgccattccgggacggatcatcgaaaacctaagaaaagtgcagtcctccaaccctgtcttcgtgctcgacgagattgacaagattggagctgattacaaaggggatcccacagcggcacttctggaagtgctcgatccggagcagaatagtactttccatgacaactaccttgacatggattacgacctcagcaaagtactctttatcgctaccgccaacagcctcgattctatcccgcgcccgcttctcgaccgcatggaactcatcgagatgacaggctatcttgcggaagaaaaagtacagatcgccaagagtcaccttattcccaaacagctgtccaaacacggactcaaaccttcgcagctgaaattcaaaaatgctatcctcacacggattatcgaaggctatactcgcgagtccggagtgcgctctctcgatcgacagatagctaccgtctgccgtaagattgacatgaaacttgcgctcggagaagactacaatatctctgtcacggaggaagaccttatagactatctcggacaaccgcgcttctcgcgtgagatgtacgagaccaacaaatatatcggtgtcgtcaccggcttggcatggactcaggtgggaggtgaaatactctttatcgagacctctctctcgcactccaaaacacccactcttactatcaccggaaacctcggcgatgtaatgaaagagtcagccactattgccttgggatatattaaagcgcacgctgatcaactgggtatcaagcaaaaggatctggagacacaatccgttcatctgcacgtacccgaaggtgccattccgaaggatggaccatctgccggaattaccatgactacggcactcgtctctgccttcactcaccgcaaagtaagagccagaattgccatgacaggcgagatgacactacgcggaaaagtcttaccaattggtggggtcaaagagaaaatccttgcagccaaacgcgccggaattacagaccttgttctctgtgaagataaccgcaaagacgtaactgccatccctgagaaatacctcaaaggcttgcgcttccattatgtcaaagagatagacgaagtgctctcgtttgcacttctctaaccccataccggtattacctcaagcacccgtcagtacggctcaaatattcagtggcattacctcaaaccatttaataccattacccgaaaacatccaatggcattacccgaaaccatttaataccattaccgaaaacatccaatgccattacccgaaaacatttaataccattacccgaacagaaaagagatttgtcttcaattttgcaatctgagcgccccaaataccaccgctgcataatcttccactaaccgcccgaaaagtgccgtagaatcaatattcacctatatacataacaccccttataatgcaacgtaaatacagcgattatacaataaagtaatacattattaaacataattaaaacacagaaatacaacgttttacgctttttatatcactcaaaaagtagtaattgtataatacaaatatacagaaacagcgcattgcataaagcaatactttagataaaatatataaatgctgtaaatcagttagttataagaaaatataccgcgtgcaaaagcgcatgaatgtatattcattttgatgaatgaataaaatgagaatttcggctaccctactctgcctcaaattctgttgaaacaaagtacaacataccttacataaaactactatgctaaaatcgtgccggaaatattgtccgcgttgcggaaaagaatttgtctgccgccatgaccaaccttctatctgccagtgcgcagcagtacagttgacaaaagaagtgcgcgcctatctaagcgcgcactaccaagattgtctctgtgcagactgtctcagggaactgtcgaacagcctgtctgtcgtcgagtagctttgtatgttatcgaagttatcgaactgcctgtctattgctgaatagccttctctcttatcagacgacctctccaaacaggctttacaggacttaccaaaaagtcttctccccgtctctaccctaacagagcgtctgccagtgttttcagttcttcgagttgggattctttgagtgctccacggatggtgactgtaggttctacaacctctacattcttgcatccgccaagcatctctttcattactcgcacagcttgcggtgcccatgagccgttctctataagagccaccttcctgttctggaatcctttgagccggagcttgtgcaggaacatgtgcatcggcgggaaaatatctccgtcataggtagcacaacagagcaccagtctgttcatacggaaggcgtcttctattgcctctgccatgtcgtcgcggctgagatcggtgactgccactttgagagctttgccatccgccgacttcatgtcttgggtcttctctttgagtatctgaaccaactgttctgcagcccggcgtgtgttgccatggattgaagcataagccaccaatacaccgtcagtctctacaccataagcactccagattgtatagagccgcagtgc

SEQ ID NO: 1036 - DNA, 24893 bp, synthetic construct
  misc_feature 1..24893: note = Synthetic
  source 1..24893: mol_type = other DNA
aaaaagaaactctgcgaaaataccgacgaagcactgcaaaaaatccacgtgattgcaaaattggagggtttgaaagagcaacttgttaatatagggaacaagttgacaagttgacgaggagacaaggaattagatattaggatattcatagatattcgatagatatattttcagttactcaattattcagttattaaaaaatgaaagtcagcggttttacctttattcgcaatgccgaaaaatacgattacccaatagttgaggcaattacttcgatattaccggtttgcgatgaatttattgtatgcgtgggtaattccgacgataataccgaagctcttattcaaaacatagattcgccgaaaattaaaatcattcattccgtgtgggacgattcgctgcgcaccggcggacaggtacttgccatagaaaccaacaaagctttcgacgcaatttcgcccgatagcgattgggcattttacattcaaggcgatgaatgtgtacacgaaaaatatctttctacaattgtgaaagaaatgcaggataatttgaataatccaaagattgaatgtttggttttcagttatttgcacttttatggcaattatcattacacggcaaattctcgcgggtggtatcgccgcgaaatgcgcattattcgcaacgataaaacaattcgttcctaccgcgatgcgcaaggttttcgccgtgataacaaacacttaaaaggtaaattgattgatgccacaatttatcactacgggtgggtaaaaaatccttattttcaaacacaaaagcgagccggatttaccgctttatacaccgaagacaatacggtaattacaaaaataaagcaagaagaattgttcgattattcaaaaatcgacaatcttgaagaattttcgggttcgcacccgcaaactatgcaaaaacgcatttcggctcaggattgggattttgaatttgatatgagcaaacgaaaattgagcacaaaagaccgtatactccgttttattgaaaaagttaccggaaaacggttgtttgaatttcggaattatgaccttgtttagggacgagggattaggagacaaggaaacaaagttttcctaatccctcgtttccttgtctcctaaaacctcgtctcctttttcctaaaaaagctccaactgaatagaactattgaacgtttttctatgatacggtgttaatccatgctcataaattgcttttcggtgaaaaatggttgggtagcctttgtttttttgccaatcgtagtgcggaaattcattgtggatttgctccatataatcatcgcgataggttttagcaagaattgaagcggcggcaattgagagatatttatcgtcgccttttacaatgcaatggtgcggtgtagttttgtagtttttaaagcggttgccgtccacaagaatgtgttgcggtgcaattgcgagcgcatctaaggctcggtgcattgccaaaaacgatgcttgcagaatgtttattttatctatttcattgttatcaaccacgccaactgcccatgcaagggcatcttgttcaataatcggacgtaaaattttacgttgcgcatcgctcagttttttggaatcgtgcaggcgttcgttggtgtaatcgggtgcaaaaataactgctgcggcatataccggtcccgaaagacaacctctgccggcttcgtcgcaaccggcttcgtgtacattttcggtgtggaaagatagtaatacccctaaatcccctaaaggggacttgggagtcgtactaactccgttgttttgtttatttatagttttcatttttttcgtttttcaatctgctcgcactttcctaagccccctcggttactgagcgtagtcgaagtattagggggttgggggttacttcttaggaaatcgccgcaactgaatgtcttgaatatcagccataagcaacacccatttgtcgccatacaccgccattcccatatacgtaaattcgggcgaatagagttttacgcagttttgcgtgcgaggttggtcaagccatttttgcaccatggcggctactacttttttcatatcgtcttcggaatttacaccgtgcaacgtgtaaccatagcccagcacttcgccgattttgagcgcttgaatgtgttttacgcccgtttcggtttcgtattgcgtgccttttaaataggtgcttcgtattctgtcccacggagttacgccgtcgggggcaatgttgtcggtataattataggtaaacatatcgcgggcgtgttgttcggcaagcatggcaagtgtgtcgtgccattgcagcggttgcaccggaaatacttttaccaatctgcccgtgtcgcacacaaattcttcgctgcgccattggtttacaatttccaaggcggcatttttaaactgtaaaacctcaacgccaataggtgcaacgtgaaattcccgattgagcgattgttgcttaacttcaagggtggcactgcgtgggaaaatttctgtggcaacgtctaaaaacacgtatgtatcgcgcagcaaaaccgtgtcagcccatgtgcggtttgcttttttttcggtatttctgaatgtttgcgccgtagcgtcaatcaaatccaaccatttcatttctatatagttgaggaaatcattgtcgtccttatacaattgcactgcctgttccgaaaaaattgcgaaatgcgatttgtcgtccaccgaatatgcggtgtcgattaccttgtacatggcggtgcgcaaaccttgcgaaatcacctcgttttgcgcaaaatggtctttataattttcaactattgaaaataaatcgtcgaacatccaattgttcacaagcaatagcggcgctttttgcagtaccgcgtaatcttctgccgaaattgcgctactgtttttggcgcgttcataaaatttggcaatttctcgcatcgctctttcgtaatcgcctgattttgcgtatagttcggcgttttccaaggcgttggtttttatattgtacgctctattcaatcgttgataaaattgcactgtccactctttgcctttttcacgcataactttattttgcccttcgcaatatttataaatcatattgagcgtggcggcgttttcatcgaaaataaaaccatcggggtcttgcacacgcagggctgcgagcgttttcacggtttccatcaacgggtcttttgtgaatttttcgtagcgcatgggcgattgcgccatttcaaaataacacaaggcttttatgtaatatgcctccaaaaaaccggcatcttttgcaattgccaaatcacaacggtctacgcatttttcgtaatttttactgttgtatagttcgtataatttgtcggtgttttgtgcgaatacgatggttatttgaaaaattgcgaaaatcgcgagaagggttagtcgtttcattattttatagatatttggttgatattcaattgatattcgatggatattcagtagaaaattattacaatttgatttttgtattttctatcaattccttgtttatttttgcaaatataacaatttattttttgattatatttccctcgttccttgtctcctattccctcgtctcctcgttccctattcccttgtctcctgtctttttattcaattcctcttcaatttcttcaatcgaaggcaggctgcctttaaattgttcggggaatacttttgttaattgatattccgaaatgccaattggctgatttataccacgtaaggcatattcggcaaccaaattatttttttctttacaaataatcaaaccaatggttgggttgtcggtcgggtggcgcattatatcgtcgattgccgataaatagaagcttgttctaccggctgcatcgggcgtaaatttcacggtttttagttcaatcacaacaaaacaccgcagtttcaaatggtaaaacagcaaatcgactgggtaatccgtaccgtcgatatttaagggaacttgccgtccaacgtaggcaaatccggcacctaattcaatcaagaattttgtaatattttcggtcaaggcattttccaattcgcgttcagtgtatttttcggtcaatgtcatgaggtcgaatacgtatgggtctttcaaggtttgcattgccaaatcactttgcggcgcagggagtgtgacggcaaaattggtaacggcttttccttcgcgcgcgtacaaattcagttccaaatgatgcgtgagcattgaacgactccaaccgttttctatggttttgcgaacgtaaaagagggcttcgtttactgatttgcatttggaaaaaatgtgaacatgatgaaaccaaggaatttggaaaataggattgtttcctaattcttcaccaagttggtgaagaattacattgttctcattattagtagtttgtaattggtcagcaagttgctgaccaattacgccaccaatttgttgacgaattgaaatgtcctccgtataaaacagataaaaccgtttgcaatacttcaaatttgtagaagaaaatcctttcaaatcaggaaactctttcttcaaatctttgctcaactgtcggataaccgtatcgccccattgcgatttaagttgtttttctacaatatcacgccccaaatcccaataaagacgcaacaattcagtatttacctttatcgccgcctttatttgcgtttgcttaatccgtgtttttatgtcggtcagccaacttttgtattcgttgttatgtttaatattttccattattgtatttctattttccttgttaacttgtcaactcgttagctaaaaaactatttactaaatctccattgtctgcaaaatatactccaaatcttcgggcgtgtcaacagctaaactttcgtaattggtttgggcggtttttattgtatagccatgttcgagccaacgcaactgctccaaactttcggctatttcgagcggtgtgcgttcaagtttggtaagctcacacaacacctgcggacgataggcataaatgccgatatgtttaaaatacgtatgctgttcaagccactcgttttcgtcaacaccgcgcaaatagggaattggcgaacggctaaaatacaaagcctgctgacggttgccaatcacaacttttggtttgtttgggttccaaatatcgctgctgtgcgcaattggttttataagtgtggcaatttgtgtagtttcgtcttcaaacaaatctatcaattgctgaatttgttcggcttgaatgaagggttcatcgccttgcacgttgattaccacgtcgcattccatgccgttgggaatttttgtgattgcttcggctaaacggtcggtgccgctagtgtgcgtttcggcagtcataatgcactttccgccaaaattttccacttcggcttgtatgcggtggtcgtcggttgcaacccatacggaatttactacctgttgcgcttgttcatacactcgctgtatcatgcttttgttaccgatttttactaatggcttacccggaaaacgggtggaggcgtagcgggcgggtataattactgttgtgttaagccccctaaatcccccacagggggacttaaagaactgtggtttaattattttgttatctttatgttgcatgtctatctatcttgtttacttatttttttgcttcagcaagtcccccttgagggggatttagggggcttaaatcccctccggtatgcggcatatataaatcctcttcaaaaagattaaatgtgtggtttttaatggattgcataaggtttttcatgaaaattttgcgatgttcttcgcttggttggttggcgtgcaccaaatacatggtttttttgtattttaccaacaaaaatgtgtcgttatcaagtggaatttcaaaacaattgtaagagtacgagggatttgtgtaatccaaaatcacactgctgtcggtaactgtgtatgtgccttcttcattgaaagctacgctttttatgtgttttgttttgtaactaaatgttttgtcggcattcaattgcaatgtcattgaaacattatcggtttgcaacgaaaatactacgggcgtttgcgccggacgattgcaggcggcaagtacgaaaatgaatgatataccgtaaaaaaagaatttcatagtgtcttgtgtctataagtcttgtatctaaaaatctatttatttacaaaagtacaaaatagaattgagatatataaaaaaagtgtatttttgtttgtatggtaaaaaaatatagaacaataggagaatttgcgttatgctaaaaaaaaccgaaggaattgttttgcatcgcataaaatattccgaaacaagttttattgttcacatttacacgcggcacgaaggtattgcatcgtttattatcggtaatgcccgcagtaaacggtcgcaagcggcatttttccaacctttgcaggtggtcaattttgagtattattgcaatgcaaaatcgagtttgagccgtattaaggaaatttcattttcctacgtaccggtttcgttgcatcagtcaattcaaaaatcgactattgctttgtttgtgagcgaatttttgtatcacacattttccaacaaggaagaaaaccaagaagtgtatgcgtttttgcgcaattttgtaattacacttgacacgcacaccgaaccgtgcaacaatgcgcatattgcttttttgctcgatttcagcattttgtgcggcattgctccgcaaaataattactgcgaaagtttgcgttttttcgatattgcaaaaggcagttttgtggcatactcttccgccacaacctgcaccaccaattgcagcagaacactaagcgatgcgcttgccaaacgtttttcgctcattaccaccggcgaacggcgagaattgttgcaaattctgttacaatattattcgctgcacacaaaaaaaatagatatgactcgcactttggggattttggaggcggtatttcggtgattgaatatgtgccgtaggttttgttgtgaattcctttcaaattagtatctttgacacattgaaaacaaccgagcctcaaatatggcagacaacaggttggttgtgaattcctttcaaattagtatctttgacacattgaaaacaacccgcgtccgcaaggattagattacgaactgttgtgaattcctttcaaattagtatctttgacacattgaaaacaactggattaaaaatttggtagaactttacaagttgtgaattcctttcaaattagtatctttgacacattgaaaacaacgaccgaagccgacaacgcaatggacgaggtgttgtgaattcctttcaaattagtatctttgacacattgaaaacaaccaaaacaacgagcaaaaccacgaattgcaggttgtgaattcctttcaaattagtatctttgacacattgaaaacaactttcaaacacacaagtagagcaatacacagttgtgaattcctttcaaattagtatctttgacacattgaaaacaacatctcgtaattcctgtgataattgtttttggttgtgaattcctttcaaattagtatctttgacacattgaaaacaacttacgtgacgattgggaatggtacaggcagttgtgaattcctttcaaattagtatctttgacacattgaaaacaactgaaaaaactatttaaagaagcatacatagttgtgaattcctttcaaattagtatctttgacacattgaaaacaactagggaaatttgaaggttgggaagctcctggttgtgaattcctttcaaattagtatctttgacacattgaaaacaacaagctaatttttacgttgacggcacagaccgttgtgaattcctttcaaattagtatctttgacacattgaaaacaactgtgttctctagccctttgtcgatggtgtgttgtgaattcctttcaaattagtatctttgacacattgaaaacaacaaaaggttaaacgtacaatacccgtttatgttgtgaattcctttcaaattagtatctttgacacattgaaaacaacgacctatggaacaagcattattcattttagttgtgaattcctttcaaattagtatctttgacacattgaaaacaactttattaaaattttacacctgcgtttatagttgtgaattcctttcaaattagtatctttgacacattgaaaacaacgtttaataaatcattatttgatttgagcgagttgtgaattcctttcaaattagtatctttgacacattgaaaacaactaaattttcaaaagttgaggaccctctaagttgtgaattcctttcaaattagtatctttgacacattgaaaacaactttttaagtatttttatgaaagttatcatagttgtgaattcctttcaaattagtatctttgacacattgaaaacaacgaatgtttatttgaagaaatagaacaactcgttgtgaattcctttcaaattagtatctttgacacattgaaaacaacttgacatttttaaaatgccgccaaaacccgttgtgaattcctttcaaattagtatctttgacacattgaaaacaacctctcactgatataccattattactaccttgttgtgaattcctttcaaattagtatctttgacacattgaaaacaactaataattattttgaagtttacggatataagttgtgaattcctttcaaattagtatctttgacacattgaaaacaaccatgagcgccattatgaaatcgcacaagctgttgtgaattcctttcaaattagtatctttgacacattgaaaacaacccgcctgatttttgactttggcaagagtatgttgtgaattcctttcaaattagtatctttgacacattgaaaacaacaaactacaatcaaattgctaacgaaacaatgttgtgaattcctttcaaattagtatctttgacacattgaaaacaactgttttttgtattgtgtcaatctttgagcggttgtgaattcctttcaaattagtatctttgacacattgaaaacaactttcattcaaataactttctgcgtgtgtttgttgtgaattcctttcaaattagtatctttgacacattgaaaacaacgaaaccgctgaaatttttgtgtcgttatatgttgtgaattcctttcaaattagtatctttgacacattgaaaacaactccagaattaattggaagagacgaattcatgttgtgaattcctttcaaattagtatctttgacacattgaaaacaaccaacgatgttttaaacgtttctggaattggttgtgaattcctttcaaattagtatctttgacacattgaaaacaacccaactggcgctgctatatcaatcccattggttgtgaattcctttcaaattagtatctttgacacattgaaaacaaccatctacccgtacgatttgcgccatagtgtgttgtgaattcctttcaaattagtatctttgacacattgaaaacaacatttggcgattttttagaggcttttatagtgttgtgaattcctttcaaattagtatctttgacacattgaaaacaacccgtatattttagatgaaatttcggaagagttgtgaattcctttcaaattagtatctttgacacattgaaaacaactttaaacatagtgctaataagatattagctgttgtgaattcctttcaaattagtatctttgacacattgaaaacaacatacatgcgataaagcaaatgattttcaatcaattacgtcaaaaattagaattctaaaaaaacgaacgttttcaatgcaaaaatcccgattgatgtcgggattttttgtttctattttttccacaaaaaagccccgtattgtaagacgaggcaacttaaatgttttcacaacggaataatccttattgtgaattcctttcaagcacaaaaataatcgtttttttattgctacaaaaaatattttcatatttttacgagaatattttgaaaaaccacattttatgaaaaagatattaggacttgatttaggaacaaattcaatcggttgggcgttaatcgaaaatgatttcgataaaaaagaggggaaaatacttggacttggaagtcggattattccaatggacgctgctataatgggcgaatttgacaaaggaaactctgtttcgcaaacggcaacacgcacagattatcgcggaacaagacgattgcgagaacgaaatttacttcgtcgcgaacgcttgcatcgtgtgttaaatatttttggatttttgcccgaacattatgctaatcagattgattttgaaaaacgattaggtcaatttttgaatgaaactgaaccgaaaattgcgtggaataaagtatggaacaaacaaaaaaataagaatgattttgaatttatttttcaaaattctttcaacgaaatggttgaagatttcaagtcaaacggtcaagacataaaaattccttacgattggactatttattatttacgcaaaaaagccctttctcggaaaattgaaaaagaggagttggcttggcttttgctgaatttcaatcaaaagcgagggtattaccaacttcgtggcgaggaggaagaagaaaatcaaaataaattggtagaatttcattcgttgaaaattattgatgtaaaagcagatgttgcttataaaatgatgttgagtaatggtatggaatatcgttacgaaactaacaacaacttgtttgaatggaaagacacggaacgaaaatttgttgttactacatatttgaactttgacgaaacgcctaaaaaggaaattgacggaacaaataaacgcagtatttatatgctcaaagagaatgaaactgctgcaattaaaaagaaaaaagatgtatctgttgaaatttgtgatttaaaaattgttgatgttcaagaagatactgaaaagaaaaaagatgatgtttggtattctctgattttggaaaatggttggatttatcgccgttcgagcaaaacatctctgtttgattggaaaaacaaggtgcgtgattttattgttacaactgatttgaacgatgataaaactgtaaaaaccgacaaagaaggtacagaaaagcgttcttttcgtgcgccaagtgaagatgactggactttattgaaaaagaaaacggaaaatgatttagataaatatattgaaaagtatgaagaaaaaaacaaaataaaaggtactgtcggggcatacatttacgaaactttattacaaaatccgacacaaaaaatccgagggaaattagttcgtactattgaacgaaaattttacaaagacgaattgaaagcaattgtgaaaaagcaaattgaacttcagcccgaactttttaccgaagatttgtacaacgattgcattcgggaattgtatcgcaacaacgaggcacaccaaactattttgagcaaacgaaatagttttgaacatctgtttgtcgatgacattattttttaccagcgacctttgcgaagtcaaaaatcatcaattggaaattgcactttggaatttagaaagtacaaagacaaagacgggaaagagataaaagaatatttaaaaggtattccaaagtcaaatcctttgtatcaagaatttagaatttggcaatggctatataatctcaaaatttattcgagagaagacgacaaagatgttactgctgattttcttaaatccacagatgattatacaaatttgtttgattttttgatgaacagaaaagaaattgacaataaagcattgataacttattttctgaatttgcagggaataaaagggaaaaatgcagataaagaattaaaaaaatatcgttggaattacgttttcgataattcaaaagataaagaagaagataaatcaaaaaaatatccgtgtaataaaacaagagcacagtttgtttcacgattagcaaaagttgaaaatctccccttggattttcttacacccgaaatcgaacaaaaactttggcacataatttattcggttaccgacaaaaacgaatatgaaaaggcattgaaaacttttgccgttaaacataacttacacgaagtttcgtttgttgataatttcaaaaaattactatttgaagaaaaagattacggctcattttccgaaaaggcaataaaaaaactcttgcctttgatgcgtttggggaaatattggaaatgggaaaacattacgtttgaaacacaaggcagaatagaaaaaattattacaggcgaatatgacgaaactataaaagagcgcgttcgagaaaaagcaattaaactgtcttccgaaaatgatttccaaggattgcaattgtggttggcgcaatacattgtttatggtcgtcattcggaaacagaaaatgcagaccaatggaaaatgtcttatgatattcaagattatttggacgaatttaaacaacattcattgcgaaatccaatagtagaacaaattattacagaaaccttgcgtgttgtaaaagatatttgggaacagtatgcgtcggaaaataacgttgaatgtatcgaaatttatgatgagaaaaaaaagaagaatgtaaaaagttacggcaaatttttcgacgaaattcacatagaacttggtcgtgaaatgaaaaacacggcagatgaccgtgctaaaattaccaatcaagtttctgataatgaaaatacaaatttgcgtatcaaagcaatgttaatggaatttgcagaagatggttattttaacaatgagaataacgaaaatactgtaagaccatattctcaaaatcagcaagatattttgaaaatttatgaagaagatgttttgcgcagatattccgagcaagaattgaaaaacgaaaaaaccggtttaatagagaaagacgataaaggcaaggaaaaagaaattacgtattatgatatttcaaaaaaatctcaaccaactaaaacacaaattcaaaaatataaattatggctcgaacaaaaatattgttcgccttatacgggaaaaatgatttcattaagcagattatttacacccgattacgaaatagaacacattattccgcaaagtcgttattttgacgatagtttaagcaataaagtgatttgcgaagcggctgtcaataaattgaaagaccgcaatcttggacttgaatttataaaaaaacacactggcgagaaagtggaatgtggaatgggtgttgttattgaaatttttacggaagaaagttataaaagttttgtacaagaacattataaaaacaacaatgctaagcagaaaaaacttttattggaagaaattcccgataaaatgattgaacggcaactcaatgacactcgatatataagtaagttcgtttctgcccttttgtcaaatattgttagagaagaaaaagatgatgacggtgtaaattcaaaaaatcttatttcgggaaatggaaaaattacaactacattaaagcaaagttggggattaaataatgtgtggaatgaattgattttacctcgttttgaacgaatgaatgaattaaaaggcactgatacattcacttcaaaaaatacagaaggacatataattcctacgataccgttagaattttcaaaaggttttcaaaagaaacgcattgaccaccgacaccacgcaatggacgcattgacaattgcgtgtatgacacgcgaacacgttcaatatttgaacaatgaaaatgcaaaatcgcagaaatttcatttacaaaaagggcttgcaaaaacattacgcaaatacgaaacaattgaaaaaacgatacaaaaaaaagatgaaaccggcatttggcgaataaaaaaagatgaaaccggaaaacaaataacaaagcaaatagaagttcccaaagagtattttatgccttggaataattttgttgaacaggctaaatcagaacttgagaaaatcatagtgagttttaagcagaatttacgagtgataaataaagtaaaatttgcaggtttgacttataaagaaagtaaagaaaaatcaaacaatagaaattggggaattcgtaagcctttgcacgaagaaacattttcgggaattgtacaattgccttgggtaaaagttggcaaaggagaatttactacagcaactcgaaaagctttggataaaagttttaatgaagataaaattgagaaaataactgataccggcattcaaaaaattctaaaaaattaccttcaaagtaaaaaaaataattcagaattggctttttctcccgatggaattgaagagttaaataaaaatatttcacaatacaatgatggaaaattccatcaaccaatattaaaagtacgtgtttacgagaaaggaaaaggaagatttgtcttaggaaatttaggaaataagaaaagtaaatatgtacaaggtgcaccaaacttgttttttgcaatttatgaatacgaggaatttgataagaaagaaaacaaaaatgtaataaaacgttcttatgaaactatccctttaaacattgttatagagcgattgaaacaaggtttaaatgttgttccggaaacgaatgaagaagggcataaattatgtctcgaatgtccgtttctttctcccaacgatttggtgtatgtcccaatggaagacgaaaaagaaaatattcgtgcgatagattgggaaaatttgagcaaagagcagttacaaagattattcgttgtaaatgatttcagcggcacgtgctattttacgccaaaccgtttggcaaaaaacattgtaccgaaagaagttgatttgaactttgatacgaagaaaaataaactttcaggctcttatgatacaaaaacggcaagttttgaagggaaacaaataaaagatgtttgtatcaaactcaatatcgaccgtttaggaaacattaaaccggcattatgaaaaagcaacccgaaatatcaatccgctcctccgcagccgaatacctaacattcgtagccgccaccggcgacaacccacaaagcgtagaaatgcgctacgaagacgaaaacatttggcttacgcaaaaaatgttggctacgctttatgacataactgttcagggaatagggcaacatattaagaaagtattagaagacaaagaactgagcgaaggggcaactgtaaagaaattctttatagttcaaaacgaaggaaataggcaggtttcgagagaaattgaacattataatcttcaaatgattatcgcagtcggtttcaaagtaaacaacgaccgtgccgtgcaatttcgcaaatgggcaaacgcgattgtaaaagattacacaataaaaggctgggtaatggacgtggaacgattgaaaaacggcggctctattttgaccgaaaagtattttgaagagcaactcgaaaaaatccgggaaatccgcatttcggaacgaaaattttatcaaaaaattaccgatttgtatgcaacggctttggattacgatataacagcaaaaaccacgaaaacattttttgccaccgttcaaaataaattgcattttgccattcacggaaacaccgccgccgaattgataacacaacgggcaaatcacacaaaaccatttatgggacttacttcttggaagggatttcccgatgggaaaattcaaaaatatgatgtggcgatagcaaaaaactatttggaaatagaagagttggacaatttgcagagaattgtaacgatgtatcttgattatgcagaatatcaaacactccggaaaattcctatgactatggaagattggaaaaaacgattggacgcttttttgaaatttaatgaagaggaaattttgaccgatgcaggaaaaattacgcacgaaattgcaaaatcttttgccgaaagcgaatttgaaaaatatcgcattattcaagaccaattattcgagagcgattacgataaatttattcgattagaaacccaagtaaaacaactgaaaaatgattaagaaaaccctctatttcggcaatcccacctacctgagtttgcgcaacgagcaaatcgttgtcaaactaccggaagtggaaaagaacgacactgtttcggaagcattcaaacgaaacaatgaaaaaactttgccggtagaggacgtgggcgtggtagttttagaccataaacaaattaccattacgcacggattaatcgaaaaactgttagataataatattgcaatcataacctgcgatagtcgccgaatgcccgttggattgatgttgccgctgtgcggaaatactacgcaaaatgaacggtttcgggaacaactttcggcgagcgaaccgcttaaaaaacaattatggcaacaaaccataaaagcaaaaattacaaatcaagccgaagttttgaaacaattccgacagtgcaacataaaaaatatgcaacattgggcaaacgaagtgcgtagcggcgaccccgataattacgaggctcgtgcggcagcatattattggagtcaagcatttccgcaagtcgaaaatttcacacgagatagagagggcattgcgccaaataatttattgaattatggttatgcgattttgcgggcaattgtggcacgagccttagtaagtagtggacttttgcccacgttaggtattcatcatcacaatcgctacaatgcctattgtttggctgacgatattatggaaccataccgtccatttgttgatacaatcgtatttgcaatggctgataaaggcgtaattcccgaagaactaacgattgagtacaaagccgaattactgcgaattcctgatatggatgttatgattggcggtagaatgagtccgttggcattggctgtggcacaaactacggcttcgttgtatcaatgttttgcaggagaaacacggaaaataaagtatcctgagttaccataaaacacgcttcgagagcctcagcgtccggtgcggtggctgaggctctcgaagccacaatgggaatgacaaaaaatataacaaaatggaactttcttcacgtttaaatcaatatagagttatgtgggtgcttgtgttctttgatttgccaaccgatacgaaaaaagagcgcaaagtggcttccgattttcgtaagaccatgctcaaagacggctttacaatgtttcaattttcaatctatctgcgccactgcccaagtatggaaaatgccgaagttcacatgaaacgcataaaaaacgctcttcccgaacacgggcatgtgggcattttatgtgtaaccgacaagcagtttggcaatatggaaatattttatggcaaaaaggaaaaagaaaaacaagtggggtggcaacaattggaattgttttaattagggaacaagggaataggagacaaggaaacgaggtcgaaataaacaaattctacattttctccgccaactgataaaaaaaacgcaaagcctcttgtttttcctcatcaaattcataactaacagcattgtgcaaatagctgtaaatatcaaaagtttttggcgtattgttgtacgcaatcgcatcatcaatatgcgccacaccataactcaatgcttgttcaaaaagttgcaaataatcctgcggaatatctttattggcaacccagcaggcaaatacaaatggtttgccgaaagccttgtaccattcctgcgccaaatcccatgagtaggcaaacgaacttttgtgttgcaaagccctgtcgcctatgattacttttgctgtgccgtcgtttgcggtttcgtaaccttgtgtgccttcctcaaattgcggattgatgcgccacacatttttgcataaaactttggtaagcatattcgatgtttgtgattgataatcaagtgttatgcgttgaatattgggcaaatcgacattgctgcacaaacacaccgaatcaacatgcgtgcgtgcgccaatgcaaaattttgaaataatacgtccctgcggaattaacggaattgccgccacaggaactatacctatatcaacttgattattgcatagcatttctacggattgtgcagggtaatgatagaaaaattcactttgttgcacaagttcggcattgctctgcaaaccatataaaaatggaatggtgttgctgtaattgatgattgatataagccccctaaatcccccacagggggacttaatgcccccaaccccctcagggggctttgagttgtggttcaatttgttgggttgcataaatttggagcaatctttcattttatttgttctttctcctccctaaggggaggtcgggtggggctctttcccaagtcccccttgagggggatttagggggctttatattttcgcaataactgtctgccccccacgcaccctgtcgcacaattttacgcacacttccatgtccaaaggaataaataaatctacgcgagaaccgaatttaataaaaccaaattcttcgttttgcttcgcttgcgtgccttttttcgcataatttacaatacggcgagccattgctccggcaatttggcggaatagaatttctttaccaaattcggttttcataagtattgatgtgcgttcgttcagtgttgacgatttggggttgaaagccggatattttgcaccatcgtggtgcacgctttctaaaatttcgccgctacatgggtaacgattgacgtgcacattgctcggcgacataaatattgaaatttgccggcaaggcgattttaaaaattcttcttcaacaacctcttctattaccacaattttgccgtcggcaggtgctataattgcctgcgaatcgtacacatacgtgcgcttgggaatacgaaaaaatgaaataatacatagcaaaaaaataaatgatgccacagctatgggatacaaaataaaacccggcgtgcgcagttgcaataaaaataaattgaccaaagccaatactcctaaaacggcaataataattgaagcgccttctttatgtagtttcatgctattgattttataaaatttctacaatttgcaaatatacaaaaaatgttggaatactaaaaagtacgctatcaaatcggtctaacaaaccgccatgaccgggaagaatggttcccgaatctttaacacctgcatagcgtttgagcattgattcaaacaaatcgccaaaggtagatgctactactataaccgtcgctgcaccgacccactgccacgcactgagcggagtttctacccactgcgctatacaatatgcaagcacaagcgttgaaagcaaaccgccaacaaagccttcaacactttttttaggcgaaatacgaggaaataatttatgtttacccaaactaatgccccacaaataagcaaaggtatcgttgctccaaataaaaataaacataatgacagccacgtgcagttgcgccgtggggagcgttgcaatatcgccacctacaatgtgaaccaacaaacaaaaaggaatagccgcataaagaacgccgaatactgtgtaaactatgctatcaaacggattttcgcttttttgaaacaattgccacacgcacaataataaaattattggaacagcaacaagtgaatagggtacgctccacgaataacacacattgccgcaagcaattgtaaacaacgccaaggcaaacaaatacgccggcaatttgtacaccacatgatttttaagagcaattattccaataaactctttcaaagtgcggagcataattatggcaaaaacagcatagaaaacccaagaataactatacaacgccactataacaagcgatacgtaaacaatgccggtaagcgttcgtgtgagtaaattctttatcatgcacaatgattttagtgagagtgcaaagatacacaatatttaaagatttaggatttaaaaatttaaagtttactgttaattttctatttttgttaaatttaaaatttttcaaatcaccaaataaacaaatcaccaaataaaccatgcaattaaacaccatttcaaacttttttttcgttggcatagccggaacgggcatgagtgccatagcgcaatatttacagggaaccggcaaacaggtttcgggaagcgaccgcctgttctcgcccaccgataaaatgcaggtgcaaacacaatttgaggcacagggcatacagtgtttttttcaagacggcagcggaataacgagcgcaacacaagttgtggtggtttctaccgccattgagcaaacgaatattgagtatcaaaaagcgcttgcgctcaatattcctatcgtaaaacgttcggaactgttggcggcaatttccaacagcataaaaaccatagccgtgggcggcacaagcggcaaaagcaccacaactgccatgatttttcatattcttgatgtttgcggttatgcgccttcgcttattaccggtgccggactttcgtgtttgcaagaaaaaggcttgcccggcaatgcgtggaacggtagcggcgagtggcttgtgattgaagccgacgaatcggacggttcgattgtaaattacaaccccgaaattggcgtactgctcaacattgaccgcgaccacaaagaattcgatgaattgatgcaacttttcgcaaccttcaaacaacatacaaaatcgcaatttattgtcaatcaggattatgagcgcactcgtgaattatcgcaaaatgcacagtttgattttggaacactcgatgcaaatgtcggcgtatatggcgaaaattttgtgcaacaagggtttgaaatttcttttttcgtttcgactccgctcaacgaccgtgcggtggctgatacttcgactacgctcagcaaccagcggagtcgaagccataatattctgtgtacagtgccgcttataggcaaacataatatggaaaatgcgcttgctgcccttgccgttgccaaagctgtaggcattgatttgcaacaggctattgaaagtttggcatcgtttcaaggaatttaccggcgcacgcaattggtgggcatacataaagaacgaaatattattgtaatcgacgattttgcgcacaatcctgccgaagttgctgctgctataaaatcatgtcaaaatattgcatcacgagtaattgcatattttcaaccgcatggttttggtcctttgcgatttatgcacgaagaattaagcgaagaagttgctcaggcattgcgcccgaatgatattttccttattggcgatgtatattacgccggtggcacggttgatatgaatatttcgccgcgcatagtgagcgatgctattcaaaaacatggcaaacaggcaatttttagtggttcaaaagaacaaagtttgcaagaaattcgcaattgcgtgagcaataattgtgtggtgcttactatgggcgcgcgcgacccgaaacttgatgaatttgcacgattggtaagcgaggttgtagttgacgagtagggattaaaattatctttattttaacgcacattgcaagacactttccgcaatccctttctcgtccaatccacaaagcgcataaagttcgtcttgcgagccgtgggtaataaattcgtcgggtaaaccgcaaacggtaatagaaaccgcggcatgttgctgttgcgcatattcttcaattgccgagccaaatccaccggtttttacaccgtcttcaatggttattatgtgtttgaattgtgaaaatacctcatcaagcaaggcggtgtcgagcggttttgcaaaacgcatattgtacaccgccacatctatattgtgtgtgtttgccaattcttcggcaactgtataggctcggtaggtcaatggtccaaaaccaagcacggctacgtcttttccggtgcgaatgcaacagcctttgcctatttccaactcttccatgggtaatttccaatctacaaattgaccgcaaccacgagggtaacgaattacaaatggtcgttctgccttgtaggcagtatagagcaaattgcgcaattcaatttcgtgcatgggcgaagctactatcaaatggggaatagcccgcataaatgcaatgtcgaacataccgtgatgcgtggctccgtcggcacctaccaatccggcacggtcaaggcagaaaactaccggtaattgttgcagcgccacatcgtgaattacctggtcgtaggctcgctgcataaaacttgaataaatattgcaaaacggcagcaaaccgtcttttgccattccggcagaaaacgttacggcatgttgttcggctatgcccacatcaaatactctatcgggcatggcgttcatcaaaatattcatagaacagcccgaagccattgccggcgtaacgcccaccacacgagcgtctaaggctgccaattccaacagcgtttcgccaaacacatcttgatatttcggtgcagtgttttttgcatcgggtgccgaaaccatttcgcctgtgtgtttgtcgaattttcggggagcatgccactcggtttgctcttcttcagcaggtttaaaacctttgcctttttgcgtttttatgtgcaataattttggtccgggaatgttttgcaaatcttgaatagtgcgcaccaattgaaacacattgtgtccgtcaacgggaccaaaatagcggaaattaaaagcctcaaacaaattactttctttcaaaagcatgaatttgaaggcattgcctattttttgcgccactttccgtacatttggtccaaaatcgctcacttttcccaaaaaccgccacattgatttttttaagttattgtaaaaacgcgaagtggtaatgtccaacaaatattggttaagtgcgcccacgctggcatcaattgccatattattgtcattcaaaataaccaacatgttggcattggcaaaacctgcgtgattgagagcctcgaaagccattccgcccgtcatggcgccatcgcctattacggcaactatttgcttgcctggatcgccttgcttttcggcagcaaccgccatgcccaacgcagcagaaatagatgtagatgaatgccctgcaataaaggcatcatattcactttcggcaggattggggaaacccgaaattccgccaaatgtgcggtttgaatgaaattgctctttgcgaccggtaataattttatgtgcgtaggcttgatgccccacgtcccacacaatgcggtcatcgggcgtattgagcgcataatgcagtgcaacggtaagttccaccgtgccaaggcttgcaccaaaatgccccggattacgactactttcatcaataataaattcacgcaattctttgcataattgcggcaattgttctatacccaattttcgtaaatcggcggggaattgtatgttgtcgagtaattttgtcatttggcaaaaatacactttaattgttaattacggtcattgagcttgccgaaattagggcaaacacacgaaatttattttttgttcataatctgaaagattaaatgtgaataattaaattgtatctttgtaaaaatataagaattatgaaaaacccactaaaactcttattgctaatcgttacaatatttgtgtgtaccatatcagccttttcacaaaatgcctatcttacttatagtgcaaataatggcaaccgctataaatacagcggattacaaggagaaacaatgtctaaatccgatttgctgaaaattcccgaattgtcagttgaaacaggttatgttgttaaatcattcaaagtaagtgctcacatagggagtgccgaagcggaacgtgcatcaacctcaagtgaatttaccgatgcgcaacgaagcgatatttttaagaaagcatcagcaggaacaaaaatttatattgaagatattgtggttgcagacaaaaatggggtacgaagaaaaataagtccacttattattaccgtatcagcatcatcacaatgcgaaataattgaaggacattctgttgcgcatttgacttatacagacgatgccggtgcggttcaagaatacaaaatattctcaaatgacgctgtaattcctcaatctgttttgataaatgctctcgaattgtatcacaatgcagaagatattaaatcattcagtgttagtgccaaaataggaatatattttttggaatatatgagtggaagtaataaatttaccaatggaatgcgaaatgagatttttgcgaaagcaccaagtggcacaaaaatttatattgagaatattaaagatggagcggggaaatcgttaccggttatactttttatggttaaataaatccctctgcttattttttgaataaatcggaatgagtgcccattcttgcaagctgaataacagcctttttcctgtcttttttatagagcaatacccaatcgggggttatgtgtaaatcccatttcttttctctatcgcctgtaagagggtggtttttgtatctgccgggcaatttccttccgcaagcaattgtactacagtttcaaattcgtgcattggtcggttttggctgattgccaacttcatatcttttttaaatgcagtggtgtattcaaatgtgtacataattaactatttaattgtttcattaagtctgccacattttttgctttaaaggtcttgccggcatcggcatcggcgaatgattttttagacgcatcattcaaatctgcaaatgtgtaattctttgcttgttttgttgtggttatcaaccacttaaactttttagccaaaggttcaacaagcggaaattcttttaccggaatattaagggtaacatacggttgtaatgctattgctgccataattgtagaattaaaattagtttacaatgcaaatatacaacgtttttgtaaaattcaattagagaatgtcggtagatgtgtatatttcgcgcataaactccatttcgggcggtatttaattacacaaaagcaacataattttttgaaaaccctgtttctttgcaaaaaaaaacgtttctttgcaaaaaaacttaaaacattatgg

SEQ ID NO: 1037 - DNA, 24863 bp, synthetic construct
  misc_feature 1..24863: note = Synthetic
  source 1..24863: mol_type = other DNA
cgccaatgttcttttagtcatgtcgctcagcaattcaggaaactgatttctgaacatattaatcagatttgctgtctccttgcggtcgcctgacatcagcgttaacaggttgtcgtaaatttcatctatatcgaaatcaaaaaacggcacttcctgattatccttattcaaatgcttactgatcatatcatacaactgctcaggcagataaggttttgtaaggaaatctgtcatgcctgattcctttgccttctctttttcagctgttgactcgtaagcagtcaaagcaattacaggagtattgcatgccggtgaaggtaacgtagttcgtatttgcgaagtaagctgatatccgtccatcccgggcatctgcacatcggtaataatcaaatcaaaatgctgatcacgcaggagatgcaatgcttcttcgccatcggaagccagttctaccgtgtggccttttttctgcaacatggtgcgtgccagaaactgattgattttattgtcttccaccagcagaatggaagcagtagtttttaccgttgctttacttctttcagttgtcttttttaatgacgggctgagtttgtaaggaagttcaaccacaaagctgcacttcatattttcaagtttgacagaaatttttcctcctgcaatctgtgtaaatgtccgtgcattaatcaacgataatccaagcccgtatccatttaatccggcctgcgtgaaatggggattgttgagttcaaaaaaatcttccggacgaggaaacgctttcttgctgtgtatgttgaatttgatattggcaaacaatttattctgcgaatgataaattgccagctgaattttgtcattacttgaaaatgcacttccgaaaaacaaaatattataaataacttttcggaaaagtatgtcgtcaaaaatcaactcgtcttcttctttgaaatcagtatctgtttcaattgttttctcagggtaacgttcagcaagtctttttatagtttcggtcacggcctgattcagactggctatatgctcagacgaaaccacctggcctgtattcaggcgggcataatccagaatatcgtcaacgatataaaccaactgataagctgaatttctgatggtagccaaataattttgttgctctttcggaagattggcatcagctaatagattcgccattccgatgatgccgttgagaggcgtacgaaactcatggcttacgttggccaaaaaagtatccttcagcaacaacgattgctcaaccaacattttctgtctctctgtttcttccagattatattttaactgcaagcctttcgtttttaagcttaccgcctcactctgtatttcacgacacagctgatgataagatttaaaatgttcaagtgctttctcatggttaccaagtgctttgtatgaatccgacaaaaacaaattcaccagatgcaaaggttgcttcagattgagtttatgacaaatttcagcagcttccagcaacactcttattgcatcgttgtagcgtcccatctgattgtacaaattgccaaggctcttcagtaaatcacttttcagtcttacattgtcaacaaggctgcaattgtcaattgcatcaaaaaaataatctaatgatttttcgtaattcttctgtttggtaaataagattgcaagacttccgagtggcttaatcttcagctcagggtttcttagtttctcagcagttttaagtcctttgatcaggtagttgtatgaaatatccaattcatcggcccagttgtagcaattaccgatataataatttgaaacagcaatctgctctttattgtccaactcttcaaatatcttaagtgcatgctcatgttgtgctatcgcttcagcatattcgctgagcattttatgggtttctccgattttatttaagatgtgtccgagtttggatttatcttttaccgaagtgtaggatgatgcaattttaagcagatgctccagcgctttgtcatgttgccctaaaccggaataaatttcagcagcaaactcatgcaagggtatattgagtttggcatgttctgcaatggccttttcgtctaagcactgcgtaataatttttatcgcttttaaatcttctctgctgttatgataagctgttgcaagttgcaatccacattcagcaagagctttttcgctgtcaggctccttggtaagtaataaaaatgcttcttccactgactgcaatgcattccctgggtcaatcgtcatcagcgattcggcctgttcgcgtaaactgtttattttctgttgtccgttattcaatattttctgactttcctgcaaatttaggaattagctcaatcggaattacatgaatttgcaaattactctaccgggactccgttgtttaataccctgattacttctatgtaacgcaacgatgacgctgcagggctaaatacagaattacgtttatccttcaaatcgtcactgatgttcttacctaccatatcttctccaacaggttcttccacaaccttcaacgaaccattgctgataaaattatacagctttccgttatcgtaagtcttccagaaattcatcacactgcttattcttcgcttcgaaagatttttgttgtaattactttcggcaagagggctggcagagcctcttactgctatttcaattttatcgcctgcctgcaattgtttaagcagcaatcctgaaaaacgatccaggtcattaaagctcttctttacggtattcgtaaaaaagtcagtcatccttttctttgcatccagcatttttgcattgtcagtaataccggcaatgtaattctgtacatactccggctccctggcaatgtattgattgtataattcaacatagttgtggcgtgtaacagtgagcatggttttggggtcaggtcggtcattatcaaaataaagtttcatcggcagcagtggttctatctgctttgcggtttcctgacgtgacgaatccaatgcagtcagtggctgaagtatttttacagaatctgtcttctttgttgtgtcacgataaacaccttcataaatatcatagcagcaggttcgtgccttgatatacatagagcccggtctgtttgacgacaataaaaatttattgggataagcggtaaaatacaaatcgttgtagctggtgttgatggggtaaccggcattcataacctgccctcctgcagaaagaactttataaacatcaaaaccacccaaaccatgatgtccgtcactcgaaaaataaaatacattgttcaggttatcgtaaaatggagtaatgtcatcatccggagtattgatttcaggccctgcattcacaggatttgaaaactgaaattcagcattcacttcacttttccagatatcaagtttgccaaaacctcccgggcgatcactcacaaaataaacagtgtaaccacttattccattattggcaatacatggcatggtggctgtataaccttttaagttgatgctgtcattcaatcgcacagcctttgtccactctccatccttatgcatgctgtaatacaattcgcaaatcaacttgtctttaacctggctgcactgtgtgtaaatcataaacgtgttattactgctgattgcagaattgcatgaatgcaatccgtcagcattgatggttgcacccaatgcaacaggcttgctccatgtttgcttttcattttctgacgacagaatttttgaaatatacttgttgcgcttttttgtttttgaattttcattaagatatcgcaatgaagaataaaccaactgcgtactatcagtatattgtgctgcaaaatcagaatataccgagttgatttctgtaccgagattattgatatcagcctgtacggtatctttcagaatctcgttcaccctgttgcagctttccatctcgaaacgtgctttataagtataatagctgctgtcgcggccaaacatctgaaggtagttggaataaatttttgaagcttcggaataatcaccaagtcgctgcttcatatcagccagataaaaggatatgagcggataacggtgctcacgatcgagggcataggctttggtaaaatatttttcagcattttcataatcattgtactgacggcatgcatctgccagtttgtacaccacttccgtgttggaagcatctgccacatacgctgagtaataataggttgatgctgaataataatcagcctgttccattgctttatcacctgcacgcacatacgctgacgggctttgcgcagttgcaactataccacacaaaacaaaaccgattacaaaaattattttcaacttcatctaacgctgtatcattttaaaatcagtaaaccggacaaggcggattctttttcaatggttttacggtatgaataatataagtaagtgcaatttcatacgcacctcttccattgcttgcacgttttaaatcagaaatattgaaatcataagcaaatccaatatcaagattgttatagcctgctcctaatcttccaatcacggcatccttattcctgtagaaaacccctgccagaaaacgataatttttagtatcagcagaacggaatgacagattggctccaccattaatctggttaaacttattctggttataatacaataactgcggaagtaaatacaaccgctcgctcatgcggatattaaacattgcaagagcagtaaaacgcataaacaatggtgctttatcgccataataagagaggttgggcttgttcaggtgattcattcctaaaataatctgcatgtctgactcctctgaaaaaaggtaacgataaccaagtcccgcattcagattgaaattattgttttttgtttgatcaggattttcattggttggcaaatttgaatcgaatgaaccattgtcatactgatttccgaaatacaattcagaaaaatccaatccgttctgaaaccatcccggttgcaatcccagtgttatgcgatgttttttatcactgtctaaaaaacggttccatgcaacagataactcaatatcaagagtagaataacctgcatcaccggttttgtcctgctcaaacataattcctgaactccagtaactcatcttttcgtccgtcagattgtgattcatatcgaatgatgcaccgatagatttataaggtaccgtaactgagcgatactgattgcggtgaatagccgtaaaacgataatcaccattaaaatttccggtgttggcagcactctgatgcaatggcgaaaaatcgaactgcgaaaaatgtacatcctgtgcagaagctatttcagccaaaagaaaaataaaggttatatgtaaaattatttttttcattcgttaatgtataaccgtaatatttccttttttgaaaaatttctcatcgttgtaacaagtggcttccacataatatacaaacactcctggcattaccttcttgcccttgtaagtgccgtcccatccttcaccaggtttagtggtttcaaatactttctcgccccaccggtcgtaaatgcggaacaacaattcttttatctgatcaccatacacatacactacatcattgttattgtcgtcattaggtgaaaatgcattgggaatataaatttcaggttcatcacaaatataaatcaacacatgaatgacagaagtatctctgttggtgcatccatactgatctgttattgtcagcacgtactgaatgtcctgtgcaggtgtactaacggggttggcaattgcgctgttgtttaagaatgttggcggttgccagttataggtataacctgctgcaactgtggactgcagatttacactttgacctaaataaattactgctgaatccggaataacttccagtggtggtattgagtcaatataaactactgtagccacaacaggaggcaaggtgcaaccattggcatccgttactgttaccgtataattgccatcacacaaatgttgtattgaagaggttgtatttccgttactccagttataactgtaaggagcggtgcccccggttacctgtgcagatgctgtacccacacacaatcctccgcagtaatcaggtgtggtggttacactcaaattcaaaggtgcaggttcggtaattgcaagtgtagctgaggcagtgcatccggcagagtcggtaatcactgcattgtatgtgccgctgcaaagattactgatggaatcatttgtttgtccgggtggatttgtccacagtatggtgaacggcccctgattatttaccgcctgtacataaccggcaccatcgcaaagtcctgaacaggaaacattttttatcaaatgagtagaggcagttaacaccggcaaagcagtcacagttttgacgacagtatctttacaaccgtcagccgatgctatcagtgttacattatagttgcccggagaactataggtgtgttgtgggttgtgaatacctgaagatgtgttatctccaaaattccagctgtaagaaaccgatgaaggagtaaaagccgaaagaatggtatcattaaactgaaactgattggtgcagctgtctttggtaaaagtaaaatcagcaaccatctgtggacgcacatttacaataccggtgacggtatctgcgcagttaggattaaacagcgaaaatgccagtagcgttactgtataagttccggtatcaggataggtaaatacgggattaacagcattggatgtatcatcggtagcaccatccacaccaaaatcccagtgataagatactgcaccataacttccattctgaaaagttaccgtattgctgccacaactggttataggattcagaaatgctgctaccaccaatgaaggacatggcaccacattcagctgataatctctgcgtgtttcacccaaataaacattgttgcgatattctttcgcacaaactccaatcacaaactgaccataagtgttgggagtggcagtgagtagtcctgtgatggaatcaatactcagtggctgaattcccagagtaccattcagcatattgtttactccgtacggaggaacaaaaatcacattgttatagggaggagcagtaggtggtgtaggcacagggttcagggtatcgccaccaataaggggtgtacataaagtataacgaatgctgtcgccatcagggtcggttgcagaatggtcgaataccaatggataattgagacaggcgaaaggaggaggcaacgcattgaaacgcggacttgaattcgggaaaaaattactggtgcgtatttctccgatataggttgctcctgtctgacccggatctaaaatgttgttaatggtattattcctgcagcaacgctgataaacgatgtagtatgcacctgatgtgggaggaagattgagaaaaaatgtataagatgctttgcggtaacaaatgttggtaggaggaataaagcagggattgttgatggtaggaggaataagtactgagtcgggatttactgtgactgccagctgtcgtaccagattattattctgatcatatacaccaacggaagcgggattgtcgaaaggaggaacaccattgaaacagtcgcgatatataatcatggtaacgcggtagttgttgtttcccagataatcgtaataaatttcaccaccaacaatatgtgtggccattgcctgcgaaaatcccaacagcacaaacagaaaaattataaaactcctgaatctattttcaatgctcatacacatgcgaaagtaaacaaagatagcgaaacatcatggtgcaacaaccttattgcaatatttattttacattcatcagttattctgaatcagctcaacggtagaaggtttttcaaggtcaaaatcagacaaactgaaattactgcttcgcagtggattgtatttaaaaacatccacccctttgccaggaagttcaggatagaaagcaaaactcaactgaaaattactcagtgccagataatcgttgcgaatgagcaatcccaaaccaaacaaagaataaatgcggcttcgcgaaaatgcctttccgttttcgcccaacattccaaatgatgccaccagatatggaccaaacctgaatccataaaaatcaaccggtgcatacgactgtgtctgaaaagaaacggtaattctgctggtgccataaggatattcttcaaaaccattcaactcatctttaaaagtaatcacttcatcagacaccctgtcaatacccaataccgactccatgcgcaaaaactgtcgcagtttccatttgcctgctgtgagcaatggtgtgaagtaactgccgtttatttttactgttgactcacgcgggcgtgctgtataaaaataagttccatactgaccaattgcactgaaatatcccaatgaagtataatcgcccacaccggcagtaaatcctgcataccacgttccgcttccgtttttttcgcggtagccaatggttgctcccaacattcttcctgagggaacatcttctgtttgtccgtacttaaacaaatatttttcggtgttataaaaacgcgaagaatatccaatgcctgccagataaaaattctgattggtaaaaattcccaacgtatcaaacagcgatgatggttttacaggatattgttcgctgtagaaacgtgcagtagtaaccagcctcgaacctcgctgataagctgcattacctctgagaagtttcaaagcatgacctacccacaaatcggtaatgttttggcggtaagtggtaatctgagtagtatcggcagccataaatcttgatttcacaaaattctgactgtaggcagcaccacctgcataacgagtgtcataagaataaaacggacgttcagcaatgatacttttcttttcgccatgataggcatcgtaggtgtaagcaacctttgccatggcgtagctgcgcaaaatatcaggaaccgtataaccggtttcatacacatcagcttttctgttgtaataccatttgtacgaattgtcgaatgtatgacccataccggcaaaatttctctctgaaataccaattcgtgtggcagtttccgaagtacttccggttacaattaagctccatgcatccagcacatacacattcagatccaccttgcctgtgctgtcattcaggtgagggagaatttttacttcgcgcacataaatctgttttcgtataagcctttccgattcctgcacttgcagtgagtcatacaactctccgggcaatatccgcagcatacccataatctgactcgttcttgtttttctatgcatgaaatttcctgccttgggcaaaaatcctgatggtcttcgcaaggtatcactcagcgaatatccaaacggatcgtaaaccgtaacatgtatatcaccaaccgttaacccctgccactccggattctgataaatcacttctgttttatctgctttgcgctgtttgcttgttttgcctgccggcctgaaaataagacggtaaaactgacggagatacttgttgtccgaagttttgttctccatcttacgatagagttgctgcgtattgtttttagcgctgtcggtttgtgcatgcacatctgcagtaagacaacaaaaacagatgacaggaaaaatttttctgaaaaaccctcttaccaaaactgaaaacatacgcaacaagctgttacaaaaatgcaaagaaaagatttgcaggatgaaatgcgaatatcagaacagccaagaatgaattattttgaatatgatgacttctctaagaaattcccttgctgatacttttctttttgaagtaaatttcttttctttagggggtgaaataaaaaaagtaatattaaaaggaatgtggtgtttacaactaaaaagtcataaaaaaaacgatcccgaataatcgggaccgctttaaatgttttcacaacggaataatccttattgtgatttactttttgaatttctgctgcaatagtataaataacttaattaaaatcaaaacatgaagaaaaaaattttaggactcgacttaggtacgaattcaattggctgggcacttgtagagcaagattttgacaacgaaaccggcaaaatccttggtatggggagtaggattattccgatgggagcggatattattggggactttggaaaaggtaattcagtttctcaaactgcagaacgtactttctatcgaagtgttagacgtttgcgtgaacgtaatttattacgcagagaaagattacaccgggttttgaatgtgttaggttttttgcccattcactatgccaatgatattgattttgaaaaacattttgggcaatttaaacaaggaaaagaaccaaaattagcttggataaaaaataaaaataacaaatttgaatttatattccctgaattatttaacgagatgcttgctgagtttaagaaagctcaacctgatttattcaatcgaattaatttaaaaggagaaaacgttaaaattccatacgactggacgatatattatctacgtaaaaaagcacttgaggaaaaaattaccaaggaacaattagcctggctaatactaaattttaatcaaaagcgaggatattatcaattacgcggagaagatgaggaagatactaatgataataaaaaagaatatgttatttctcttaaaataatcaatgttgttaaaggagaaccagacaaaaaaaataataacaaaatttggtattccatcacttttgacaatggttggcaacactcattcccttttacttctgaacccaattggctaaacaccgaaagagagtttattgtaacagaagagtatgagaatgggaagattaaaatattaaaagataagaaaaaagattctgttggaagagaaaagcgtagcttatcaatattaccttctttcgaagaaattaatttattaagtaaaaaagaacaagataaaatttataaaaaaataaaagctcgaacagaactcactatttcagaaagtaaaaagacagttggttcatatatttataaaacactattaagaacccctaatcaaaagattagaggtaaattgattcgcacaattgaacgtaagtattatagagatgaattaaaagcaatcttagaaaaacaaattactctccaaccggaattatttacagctgatctttataacgcctgtgttcgtgaactatatagaagtaataaggcacatcagattcaattaagcaagagagattttgtacatttatttctagatgacattattttctatcaacgcccactccgcagtcaaaaatcatctattggaaattgcacattagaatttcgatcttacaaacaaaaagatgatcatggaaacgaaattaaaataaaagagtacctgaaagttattcccaaatcgaacccttattatcaggagttcagggtatggcaatggctgtttaatcttaaaatatatacaagaaatgatgacatagacgtaactgaaacttttttaaaaacaatagaagaaaaagagaagttatttgaattcttaatgtcaaaaaaagaagtaaatcattcagatatattaacttttctgcttgcacctataataaaagataaatatccagcggctaaaccaaaagcgtttaaagatgctcttataaaagaaatatctaaatatcgttggaattatgtgtttgatgagtctcaggaaaaggaagatgaaaaatcaaagaaatatccaatgaatgaaaccggttatgaaattcgtaagcggttatttaaagttgaaaatgcgcctgatgatttccttgacattgttgatgtaaaggaaattgttgataaaaaaacaactaagaaaactaccatcgaattaggaacaagagagtatcaattatggcatttaatctattccgttaacgatccaaaagaattcgaaaaagcgttaaaagcatttgctcataaataccagttaaatgtaacatcatttgtagagcaatttataaaatttccaccattcaaaagtgattttggtacgtattccgaaaaagctatcaagaaacttttacctttaatgagattgggtaaatattggaatgaaaataaaattataaaagacagctcaatttactttaaaaatattcatcaattaatagataaactacaaaaaaaatctgatgcaatcacatcaaatcaaaaagagaattggggtaaatcaataaatgaaaaactttataacgaattataccggttcctggatgcagatattgccaattttcagggacttcaactctatttagcgcaatatttaatttatggaagacactcagaagcagctgaaacaaaacagtggagttctgttaaagacttagagatgtttttgaaatcatttaaacaacattccttacgcaatccaatagtagagcaagtaattactgaatcacttagagtaattaaagatatctggacaagctatggaaataattctgacaacttttttaatgaaattcatgtagagttaggaagggaaatgaaaaataccgctgacgaccgtgctactattacaaaacaaatttcagaaaacgaaaacaccaaccaacgtatcaaattattgttgactgaattaagaaatgatcttaccactgaaaatgtcagagaattttctccatcacagatggagattctgaaaatatatgaagaaggtgttctaaacttaatgaaaaacaaagaatacagtgagggtgaaatggcacaaaaagaggaagatgagaaaatgttgaaaattagtactacagctcagccatcaaaatcagatcttactcgttataagttatggttagagcaaaaataccgttctccatatacaggagaaataatccctttgagtaaattgtttacaccagattatgagattgaacacattatacctcaaagccgatattttgatgatagtttaagcaataaagtaatttgtgaatcggttgtaaataagaacccttataaagacaaccagttgggcttagagtttattaaagcacagggagggagaattgtcaatgaattatcttctaatggcaaaatcgttaaaatttttactgaatctgaatatcgggattatgtaaatgaatactatgcaaaaaataatactaagaggaataaattgttgatggatgaaataccggataagatgattgcccgtcaaatgaatgacacccgatatatcagcaaatatatttcacatatcttatcaaacattgtacgtgatgaaaataatgatgatggaataaattccaagaatgtcattcccggaaatggaagaattaccgattctcttaaacaagattggggactgaacaatgtttggaatcagttaatattacctcgatttgaacgtatgaatcagttaacaaattctaaatcatttacaacaacaaacaaagaaggtcataccattccaactattccattagaatattcaaaaggatttcagaagaaacgtattgaccatcgtcaccatgccatggatgcattagtagtagcttgcatgacgcgtgatcatgttaatttgattaacaatcaatttgcaaaatcagagaatacaaggtatgatttacaaaacaaactacgcattaaagaaaaatgggttgacaacacagggaaggcgcgagataaattcacgtcttttaaaaaaccatgggataattttgcaaaagatgcaaaaacagaattagaaaaaattatagtaagctttaagcaaaatctacgtgttataaataaagcaaccaattcctatgaaaaaattgataatggcaaaaaagttgaagttaaacagaaaggaactaattgggcaattcgaaagccattgcacaaggaaactgtttcagggaaagttgaattaccaagaataaagacacctaaaggaaaaatattaactgccacaagaaaagctattaatacgagttttgacttaagaacaattgaatctatcactgatttaggtattcaggaaattttaaaaaattatcttgccagtaaaaataataatccggaagtagctttctcacctgaaggtattgaagaaatgaataaaaatattgcaaaatacaacaatggaaaattccaccaaccgataaataaggtaagaatttttgaagttggaagtaaatttccattaggccaaaccggaaataaagcaaagaaatttgttgaagctgcaaagggaactaatttgttttttggagtttatacagatgaaagtggaaagagaagttatagttcaattcccttaaatgaagtaatagaacgtcaaaaacaaggattaaatcctgtacctgaatttaacgaagaaggacattcacttctgtttcatctctctccaaatgatttggtttatgtcccagaagagggagaatctgctagccaagtaaattttggggaaaatgaaatcaaaaattttaataacctatttaagattgttagttttaccggaagtaggctttctgcaataccagtaaatgtagcttctactattgtaaataaaattgaatatactcagctaaacaaaattgaattaaccaaagagaaagaatctatgataaaaatctattgcgatcgtcttggttatatttcattaattcaaaaaggtaattatttgaatacgaaacagggagaaaaagtatctgaaccaaacagtgtctatgaaaaaaaaaagtggacactgaaaatatttaattcattcgaagaagtggaaaacgaccaattgacttattttgcttcattaacacctgaggagttgttaaataacctcaaaaaactaactaagtcagcttttggcataagtgacgaacagagtttaaataatcctgatagaaaaataaaatttcgttaaggctatgaatattttttataaggaacatagggtactattggaagcactgctaaaaaatcgtgttgaatttattctcataggaggctatgccgtaaattattatggttacaacagagtaaccggagatatggatatttggattaaacccgacaatgaaaataaagaacgcttacttcaatctctttcaaatcttaattttgatgaagagggaatttcaattatacgctcctgggattttacaaaacctcaaatatttcaaatcggtaaggaaaatcaacctgacaaaactgaatttatgacacatatatcaggaatcggatatgacgaagctgataaacaaaaaatatctgccgtactggaggatttgaaactgccgattatttattaccatcacctcattcaaaacaagaaagccaccggaagactaaaagatgaaaatgatgttgcttatttagaaaaaattaagcggctgaaaaaaggcagtaatgattaaacgcaccctctatttcggtaatcccgcctatctgagtttaaacaacggacaattgttggtgcgcctgcccgaagtagaaaggaactatcaacttgacagcaatttcaaaaaacaggctcaggctaccattcctgttgaagacattggagtggtggtgttagacaacaaacaaattaccattacacacgggctgatggatgcgttgatggaaaacaatgtggctgtaattacctgcaacagcacccgccatccaacagggcttctgctacccttacaaagtaatacccttcaacatgaacgatacagcgaccaactgaatgcaagtgagccactgcgcaaacaactatggcaacaaactattattcagaaaataaaaaatcaggctgccgtattgcgttcacaaaaaatagatgcatcttatctttatcctgtttataataatgtaaaaagtggcgacaatgaaaatgctgaagctacagcagcagcattttactggcagcgcattttcagtaaccttccacatccgcaagacagtagtttgaaaaacggattcagaaggcatcgtggtggtgagcctcccaatcattatctcaattacggctatgcattgctgcgagctactatggcacgaagtattgttgcggcagggctgttgcctacacttggtattcatcatgccaaccgatacaatgcgtattgtctggctgacgacctgatggagccctaccgccctgtagtagataaaatagtcattcaggtaatcattcaacacggaatcatagatgatttaaacaaagacatcaaagcttcactgttaaaaattcctgttgcagatgtaattcttgatggagaatccagtccgttgatgattgcaacacaacgaacagcagtaagccttgtgaaatgttttgccggagagcaacgcaaacttctttatccggacttgttggattaatccattttctatgaaattcagggtcaatctgtcataaaagcaccaaacacaattagaatcagtttttgactttgcttatcaaccgtaactttgtaaccctttactttcgaataaatacttacaaacaaccatcatgtcatctacccgatttaatgcatatagaatcatgtggacactcgttatgtatgatttacctactgagtcaaaaaaacaacggaaactggcagctcaatttcgtaaagatttgctgcaggatggttttcagatgtttcaattcagtatgtatgtacgccacagcagcagcagcgaaaatgcagaagttcatctcaaccgggtaaaacgctcactgccctcggaaggcaaggtggggattctacagattacagacaaacaattcgggcaaatggtcatattttatggtaaaaaagaacaacccagagagggagtgcctcagcaattagaactcttctgattcaaaaaaccgcgcgcctacagaaaataaaaaatcccgtcttttggacgggattcgttcttttcctgttgatttttttattctgattagcttctaacaccttctgcctcaactctaaacattcaaagtattgaaagaacttaatcaaagatagaaattcgaaagtaaatcacaaccgcggccatcagacatagattcaagcactattgaaagaacttaatcaaagatagaaattcgaaagtaaatcacaacgcattggctgatgatgtttcaggaattggattgaaagaacttaatcaaagatagaaattcgaaagtaaatcacaacgatttactgttaaatttgattgctaaccgtattgaaagaacttaatcaaagatagaaattcgaaagtaaatcacaacagttacatatttagttgtattggccggaacattgaaagaacttaatcaaagatagaaattcgaaagtaaatcacaacctttgggcatgctgtattcactggcgaatgattgaaagaacttaatcaaagatagaaattcgaaagtaaatcacaacgttcatttatttaacgttttacaaaaataaattgaaagaacttaatcaaagatagaaattcgaaagtaaatcacaacggaatggtggaataaccaatgggataatcgattgaaagaacttaatcaaagatagaaattcgaaagtaaatcacaacgctgaagatggtgtaaatgtatattacataattgaaagaacttaatcaaagatagaaattcgaaagtaaatcacaacggtatgttctccatatttaatttgtttttaattgaaagaacttaatcaaagatagaaattcgaaagtaaatcacaaccgccagtttcttattttgcaactattgcaaattgaaagaacttaatcaaagatagaaattcgaaagtaaatcacaacgttgtgttacaaggaaagcagcagactgaattgaaagaacttaatcaaagatagaaattcgaaagtaaatcacaaccgggtttcgtttcacttctttttcttataattgaaagaacttaatcaaagatagaaattcgaaagtaaatcacaacataaaacattatttgttttttttaagtatcattgaaagaacttaatcaaagatagaaattcgaaagtaaatcacaacaaaaagcaatgaggtatctacttaaaaaaattgaaagaacttaatcaaagatagaaattcgaaagtaaatcacaacaacaaagtataggcaaaagagcggggttacattgaaagaacttaatcaaagatagaaattcgaaagtaaatcacaacatcgtaaaacaaagaaaagcataggatttgattgaaagaacttaatcaaagatagaaattcgaaagtaaatcacaactttgaattgtgagaccgtattccttaacaaattgaaagaacttaatcaaagatagaaattcgaaagtaaatcacaacaacaatgatgttctcctgcacccgctgttattgaaagaacttaatcaaagatagaaattcgaaagtaaatcacaacaccaaagggcttcgtattccaaatcccaatattgaaagaacttaatcaaagatagaaattcgaaagtaaatcacaactctcatcgtctgtctgtcggtcagtcgccattgaaagaacttaatcaaagatagaaattcgaaagtaaatcacaaccgatggcggggataaaaagcacccaactgtattgaaagaacttaatcaaagatagaaattcgaaagtaaatcacaacattggcggtgaaccgattaaacctactatattgaaagaacttaatcaaagatagaaattcgaaagtaaatcacaacaaacggtataagaagatgtgtgtccaaatcattgaaagaacttaatcaaagatagaaattcgaaagtaaatcacaacctttttcatctttttgtaatttattaaatattgaaagaacttaatcaaagatagaaattcgaaagtaaatcacaactgcatataccttcatcatcagctttgcccaattgaaagaacttaatcaaagatagaaattcgaaagtaaatcacaacaaacactttagggtctactttagcttgaagattgaaagaacttaatcaaagatagaaattcgaaagtaaatcacaacatatttgtatctattaatatatacaaacaaattgaaagaacttaatcaaagatagaaattcgaaagtaaatcacaacacagggtattgggtagcaaagaacggaaagattgaaagaacttaatcaaagatagaaattcgaaagtaaatcacaactaaaacggaacattacaccgtgaaacagtaattgaaagaacttaatcaaagatagaaattcgaaagtaaatcacaacaagatttcgtcagccaactacgaatattttattgaaagaacttaatcaaagattcccgatgtgtcgggatcgaaagtaaatcacaactctaaagctaaagattgtgcggtctttgatattgaaagaacttaatcaaagattcccgatgtgtcgggatcgaaagtaaatcacaacacttccctcttttcagtaatattcaaaaaattgaaagaacttaatcaaagatagaaattcgaaagtaaatcacaacacggtgcgaacgtgtattccatttgtattaattgaaagaacttaatcaaagattcccgatgtgtcgggatcgaaagtaaatcacaactactctatcaaatcatcttcagggggtgttattgaaagaacttaatcaaagattcccgatgtgtcgggatcgaaagtaaatcacaacttcttcaactttacttcctgtgccgaaccgattgaaagaacttaatcaaagatagaaattcgaaagtaaatcacaacagtaacaggagatgcgagcggcatggcacgattgaaagaacttaatcaaagattcccgatgtgtcgggatcgaaagtaaatcacaaccaataattcaatctcttttttcgctgattcattgaaagaacttaatcaaagattcccgatgtgtcgggatcgaaagtaaatcacaactatctgatgctgaaagaatcaaatttcaaaattgaaagaacttaatcaaagattcccgatacatcgggatagaaagtaaatcacaactcttgttcacatattccgcattcatgaacgttcgttttggcatattgatattggtgctatgctcttgagtaattatttgacccttctttttggtatgcctcacataaatacgatgaatgacaccaccctcgttgtgtatttttgcataaggtttgtcagtaactacacgcgctgtgtcatacgttggctttttgtgcaatgaagccttcaatcggggtggtttacccatgaggattctaccgttgctgtttttgccaaacacacgcgatttcttaccacttttggtagctttccaggggatgaatacacttccaacattcatataaccttgtttgcggaagttgtctttgaattcattcaatgccatgaggctggtatcatcagccaacgtgcgcctcattttaaggtacaaaggtaacttttgtttccaaatattaataaatttaccacttgtcatttatttgttatatatttgtcctggaaaacgggtaaacctgcagggcaatagatacgaaataaaaacgtggtctctgccaaatcaatacagggtttatccgtttttctttttataaatcaatgccccctttctatcagcatctggtccctccatcttataccaagttgaacgtttcttaaactcacgaaaatctttggtctccttaaatgcctgattaagttcgagtatcaattgaaagaacttaatcaaagattcccgacacatcgggattcgaaagtaaattgaataatttttgaaagatcagaacaggataagtttgctctctgacttaaaaaccttcccgtaaaaaacaaatttcagttggtaaccaactgttacttcagtttggccagactttcttttattctgcggatggcttctttgagtaagtcgtcaccggtggcatacgaaaaacggatgcagcggttgtcaccaaaagcttcgcctgttaccagtgctaccttggcatcctgcagcaaatacatacacaggtctgaaggtgttctgattattttttgtccgtcagtttttccaaagtaatagctgatgtcaggaaacacataaaaagctccctcaggtttgttggttttccatccgggaatatccttcatcaggtcgagaaccatatcacgtcttttgtgaaatgtgtccaccattttttttctgtcgtcagtagttacgctgatggctgtctttgcagctttttgtgcaatgctgcatgctgctgatgtaaactgtccctgcattttatcacatgcagtagcgatatcctgcggtgcagccatgtagccaatacgccaccctgtcatggcataacccttactcacaccattcaccacaatcacattgttttttatctcttcaaactgggctatgctttcgtgtttgcccacaaagttgatatgctcataaatttcgtcagacaatacgataatctgccggtgttttgcaaatactgcagcaagtgccttcagttcgtcacggccatacactgttcctgtaggattgcatggcgatgaaaaaataaacatttttgtttttgaagtgatggccttctctacttcttgtggtgtaactttaaaatcggattcaatagttgtgttgagacataccggtatgcctcctgccagttcaattatctgagaataactcacccaatagggtgccggcagcagtacttcttctcccggatttacacaacatagcacagcattggcaatacactgtttggcaccggtgctcactactatctgtgaaggtttaaaatcaaggttgttgtctttcttaaatttttgtgcaatagcttcgcgcacatctccataacctgatataggaggatacttcgtaaatccgtcatcaatggcctgtttggcagcattgcctatatattcaggagtattaaaatcgggttcaccaaggctcaggctgatgacgttatgtccctgctcctgtaattcgcggctgatgcgcgccatggctatggtttgcgactcttctaaattttctacacggtctgctaactttctcattgcagtttttataaataagaaatgcaaagctaaaaaaggttgtcatccaaaacagtaaaaacaattgcttaattaacgactacctgtgaattgctcagcaatgcattttcaaaaaattaaagttgatctgatgtttcatttttcccggcttacaggcgtatcgctgtaggcgtttttatcaatattgtgtccacgggttccgcgaaaacgtttccagaaaccttctctctcgggcaatgcggtaaaattttcgacctttaaagcagaaaaatccagtacagggtctgtcatggtaggttgcatagcccttaaagtatcagcaataaaaggaataatccctacttcgcggcttacttttcgttttataaacgacttcagcaatttgctctgaaaagggtctgatgcaagtgcaacggtgttgaagccgagtttttttgctttcttataactgtagtaaatattttcagtgctgtgttcggctttggtttcggtaaaaatatgttcggcaggtattccgattgctttggcatacatggccatcacttctccttccttatacggagtataaacagaactgccgctgtacatgatgttgcgtgcaattcctttgtcgaaaagatatttagaccaataaacacgcgctttcatcacatcactccattgcccgttgacaagtggcacaccgggcactacaatgatatcgtaggttttcttttctgcatctttaagcaagccggcagccttgcgtgaattgaaataacatgaactgaaaaacaagagcattgttgcagaagccatggcaactgttagtttatttggcataaatattctgatttaatgaaggtgtgtcagaacaacaaatgtactttacaaaagtttcttaaaccattacaattccgcttacatcctgctctttatccactgattcatatcttcttcaaaaatatcgagtggcaggcatccattttccagaatatgattatgaaactcttttatgctgaatttatctttcagctcctgctccgctttatgccgaagctccagaattttcatctgtccgattttatacgacagtgcttgcgcaggatatgccatatacctttcaatctctgctgtaatatcagcttcgctttccatttcattgtctaacgaaaactgtatagcctgctcgcgggtccatcctttgaggtgcatacctacatccactaccagtcgtatggcgcgatgcatctcttctgacaagcaaccaaaatattgataagggtcggtatataatccaagttctttgcccagcgattcgcaatacaatgcccagccttcgccattggcaccataccaaccaaatcgtctgaagtcgggcagcgaagtattttcctgctgcaatgaaatctgatagtgatgtcccggaattgcttcgtgcaaaaacaaatcttccatacctacttcactgtatttggcggggtttaatataggaacataaaacactccgggtcgtgttccatcgggtgaaccctgcatatactctgcactggcagatgctgcacgaaatgcttctgtctgtcttacttcaaatggcgatttaggtgttttgtcaaaaagttttttcagttgcggctgcatacgtttttcaatatcgaggtatgcattaagcacatctgaatcttttttgaaaggataaaatttaggatcggtatgcaggtagtgaaagaattctttcattgttcctttatatcctgtttcctcttttactttttccatttctttttgcaatcgggcaacttccttttgtccgatttcaaaaatttcgttaggagtaaggttggtggttgtccataagcgggcaagatgagcgtagtattcttttccctgcggaacattggaaatacctactgcttcaggacatgcaggaatatattctttctcaataaaatcgtacatacgctgaaagcatgggttcagctcttcggtaatagctttggcataagcatctttcagtcgttgcttatcagcatcactgaaagagtcaggcatatctttaacaggattataaaaaatactttcttctgcttttgcagcaatgagtcctttgtactgtggcaatgtacgctgcatcaaaatgcgagcaggcataataccttctttcattcctctgcgcatgtttacgatagctgtatcctcatacactacgaaggcagtaattcgtttcagaaaattgtcatagtcttttactgttttgaaaggttgattgccgctgcctgagccaagcaccggaaaagccagttgcaatcctgtaaactgattcaccggcatcaggttaaaatgaaaagaaagttcttccagttgaattttcatttcacgcaccagcactttataactgattaaatcctgtcctgtaagttcaggttcgttgatggtttcgagttgcttctgatagcgggtataaaaattacgaagtgtatcacggtaactttcactgatgtcgttaggaagtaaatcgttgtaacggttatcgttaatggcagtagcttccaaagggtaatacttcagccgctcctgataataattatttgccaactcctttaattcatccgacatggaacgaactgttttctgttcggggttgttgcaggctgcaactgttccgattaacaccagtgcaagtaatatgtttctcataaattaagaatttatggttcaaaggtaacggagaaaataaactttacaaacctcaggcgaaatttaatctttgttaacatctgatttattcctaatctgatttcaggatataattatcttcgtatttctataaataaatcgtctctatcagaaatgagcaagaagaaaaaactgccggagccaaatcctgagcagaaatcatttgacgaactaaaac

SEQ ID NO: 1038 - DNA, 24860 bp, synthetic construct
  misc_feature 1..24860: note = Synthetic
  source 1..24860: mol_type = other DNA
gtagttgtcccagcccggcatttcgtcgagggtgataatgcgttcgtcggcgaggttcttctgccatacgcttgctgcggtctggcttacgtagcctgctgaccaggaatcgtaccacggcatccaccagctccaggtagcgccatcttcgtacatcttgtcaacgtcaggaatcgggccgttttcgctgagcgagatgatcttgttggtgccggccttgttcgtgaggtcgatgaatgcggagctgttgctctggtgatcgtttgcgttgttgtaaatatcgacgctcaaaatgtcatagtaggtttcgcccggagtccaggacatcgtagcggcgtccttcgggttgaaatcccaaatgaggttgtttacgccgttcgtgaagaccatgcgttcgtagagcaactggtaaagggctgcgaactgcttaccggtgtgggtgctccaccagaaccagttaccgccggattcatggagcgggcggaagatggcggcgacgccttctttctggaggtcaaggaaaatcttggagacgaggtcgatatcggagacgattgccttgtatgctgtagaaagtgtatcccaggtggtcgtgcccgtgacgaatgcttcggtgaagtcgaattcggtgtaggtgtcgtgagcgcccttgacgtagaattccacttcgtcacccggacgccagtgccatgtgaatgctggaataccgcccttcttccaggtggtctttgcgatgtcgatggccttttcggtgtattcctggaaccagccgtcgttcttgtttgcgccggtggcgttcatgaggtcggagccgacgagtgccgggtacttgccgccagccttgaatacggcctggacgtcttcgtgctgggtgaagtcgcccttggtgtaggcgtccatgttgccggtcatcacgccggaaatggtcttcttgccaaagttattgacgaggaagttgtagagcttgacggcggacggggttgccgttttggtgatcggggcgttgcagaggttgaatgccttggcttcgtatcccttgacttctatgtagtcgaggtcaatccagccccagctattggtgatggcgatggtgttctcgccggctgcgaggttcatgaccgtttcgacgtcggcaaatttgcccttatcggtcacgtcgaatgtcacggcggaggaggctccgccagcttcgacgttgttaatcttggatccaccgtaattgttcatgtagtggagaacgatggtgtatttgcctgctttttcgaccgtcaccttggaaaaagtgatgtcgccgccgttcatcttgacatatttaccgccagaagctgcggtgcttgaggcgacggctgcgtctttggtgatggttgcgtcttcggcttcatacggggccgcgaaggcggtgcaggcgactgaaaggccacatgcgaggaaaactttcttaaaatccatgttctctccttaagaaacgtgttctcaaaatatattgaaaaaagcaaaaatgcaatagcatttttgcttgaaaggaaaaaatatgtttacgggtgttttagagtgccggttttacccgttttttagcgtttttggaactttgccccgaaagtgaatgtgcggctttcgcccggcttgatgatgattaagtcacggtgatggtttaaagtatcgggttctgcggtcatcggttcgatggcgatgctcatacggtcaggcggtgtgtaaatctggatggcgttatattgctcgtcgccggctttctgccaaatctggagcgatttggtgtcgcttttgagttctacagtggctaaaatgttctcaaaatttttcttgtttttgagaacgtatggattttcaccctgattcaagcagaaacagtcgttgatgaactcgttattgatgaggcgcccgctcacgaaacgggtatctggcttgaattcgcccgtcgggatgtctgccttgtcgagaattgcgaggtttgattccgggagggtcatctggatgccgttgattttttcaccgagcgtgtaataggggtgccagccttcggaataagggagatcgcccttgccgatgtttgtgacggtcgattcgacggtgtagctttcgcctgtgaacgtgatcttgttaatggcacggaagggaaacgggaatcctgtaaatgcacccggccagtcgataccgaatgtcgcgacgcatttttcgctatcgctttcgaagctcaggaggttccattccttgttctgcaaaaagccgtggagggcgtgcggtgcccagctcacattgttcacgagctggtaatcgctcccgttccagttgaacttggcgtaggctacgcgtcccgggaacggggcgagtctgcaacccgcgttggtatcgggacccattttgaaaatgtcgtcgccctcgcggtagccgaaaaggaggtcctggagtttgccgttattgtcaggaaggcgccaagcgttgaggcctgcgccataaccgctcaaaatttcgaattcagcgccgtcgtcacgctgcaaaacaaagcactgcacagtgcccaaaggacgggaaataagtttgaagttgctcatatcgttgttgctagttgatagttattagttattagagaatttagtaattagacgagagaacgctcgcaggcttgctacagacgggagcctgtttaaattactgcatttttctcttgattttgatttttgcctttttttacgtcaaaatgatgggaaaatttcgttttttgacgtaaaattatgtgcaaactaatcaattttgactaataaagcccgattttggtagcgtcgggctgcttttcccttcaaaaaattgcctgtttcgtcagtttttttgaaaaatttgcctccaatatctcgcaaatttctcaaaatattacagacaacgttgaaattttacgtcaatttctttgaaaattcaccttttttgacgtaaattttgaccttttttcaatttcgccccattttagattgctgaactcaaagttctgccgactgcggcgaagtcgcgattattatcaaacgactaaagactaataaccaatgaccaactgctaattactatctttttccccatggattctcagacgattgttgctccgatgacgcctgcgggcgtgagtgccgttgccgccatccgcgtgagtggctcgaaggtgcgcgaagtggtgcgcctcttgttcggcgaatcggcgatcaagaatttgaagcctcgcgaagcaaagcttgcgaccgcaagggattaccgtacgatggtcggtgaagaccgcgcgacagctcttgtcatcgatagcctcctctacatcttttttgaaggtccgaattcctataccggcgaagacgtgctggaactttacccgcacgggaacccgattatcgtccgcgaactcattcaggttatcaagagcgtcgatggcgtacgcttggcggagccgggtgaatacacgcgccgcgctttcttgaacggtcgcatggacttggtgcaggcggaatccgtcgccgatgtgatccacagcgctaaccgtgacgaactcaggaacgcccatcgcttgctcggcggtgcgctctcgaaaaaagtcaagacgcttacggaacaggtcatggatatctcggcccgcctcgaactggatgtcgatttctccgaagaagaagctgacccggattatgcgacttggggcgtgaaaatctctgcgattcgcgaaagcgtagaatccattttgaaaagttttaagggcaaggctgccgtcagccgtttgccgcttgcggttttgtacggcgctccgaatgcgggcaagtcgagcctcgtgaatgcgctcctcggtgaagacagaatcctcgtgagcaatatccccggcacgacccgcgactttgttgaagtccgcctgttcttggacgggggcgaaatccgcctggtcgatactgccggtatcgcggataaggcgaccgatgctctcgatgcgcttagcatggaaaagagcaaggaaatcctcgccgaagcggacatgaagattctggtcctcgacggatcggatgagcgcggcgcatcttgttattctgagaatataaaaccggattttgtcgtcatctcgaagagcgacttgggtgcatctcggcagggcggcgcatcttgccaaggcggaaatcttcacatttcctccaagacaggcgagggtcttgcggatctcaaacgcgctatgaacgcagcccttttcaagaaaactgaaaattccgaagacctctggatcacgagcgagcgcgaaaagacctgcctcgaagaggcccttgcgggcatcgatcgtgcgctgaaccttatccgcacgaatccggcggtggaacttttggctttcgaaatgcagctggtgcgccgttcgctccagagcataacgggcgaaatctcgtccgaagacgttttacaacaaatatttgcggggttctgcattgggaaatagttacgttggtctcgttcttgccgtctttgcgttcggcacttacatggtccctctcaaggcttggtccaagttctcgtcgtgggcgtacctctcctgcatggccttgggcatgttcatcgggcagctttgcatctcttttgcgacggactcgttccgctttttgccggtaggcatcctttgcggtttcctttgggttattgctggggctttctgcttctgggcggtcaaggccgagcaggacttgacgggtgccggcgtacgctcgatgggcgtgagcatccttgcttcgtttgtgagcggtgtacttgtattctcggaatccacgctgctttatttttcgatcccggcgataatcctcttgctttttggcttgagcaggcttgcccctccgcaagggaacattttcagaaattggcgctcccttctgggcggtctcatttttgggttgttcctcatcccctacaagtttgccgaagtccccatactcgaatttatgggttcgtttgccttaggtatttttgtatccgcagaacttttggttgcaattttgagtataaagcgccgtgctctttttgaatatggccttgctccgtctgtgacgtccatgtttatgggtgtcctctgggtcatcggacagcatggctgcttctgggcaatcgattcgaatggcgctttgggttatgccgttggttacccgctcacgcaattgaatcttttggtgaacttgctctggggcgtagtcgtcttccatgaatacccgaccaagccggaacggattaagcttgccattgcggtttttgttattctttgcggcggtgccttgcttgcactgtcgaaaatgtaaagtgctgtaactttttgtagcggttgctaatgccgttggcgttctgtcaacggaaaacatgtaaaaaacacattgcttttttgcacatccccgattctgaatatatgtttatagtatgagttggtggaagtgcatattgattgggtctttagtcggttccgcgtccgtgtgggccgttaaagcagcaccgtttttaatcaattcgacgcagccggatggttctgtcgtgcagattcgaaaggtcggaaacgaacactttaattacacgctgactggtgaagatagtgtgcttgtggttcgtgattccgccggttattggaactatgccgacgaacatggcaaaaagacgggtatgagggttcatgccaagtccaaacgtggtgcaaaagagaaaaacttcctcaaaaaacgcgattctcacgaaatcttgagaaagttccgcgaaaaacgcctgaaaaaactccaggaacagcaggcggactcctctttaggacccatgatgctccagtcttctgtgggcgctccccagatggctaatgagtggggatggggcggcaggggcgaaacgacccaaagtacaggcgtcccgacacgtccggcattgaattctgtccgaaaagagggcgaagttcgtggccttgttgttctggtccaatttagcgatgtcaagttcaagcgggataatgccgccgaagaatatttgaattacctcaatcaggagggatattccaatttttatatgagcggcagcgtgagggatttctttatttcaaattccaacggcaagtaccagccgacatttgatgttgctgggccgattactctgaaaggtactcgcgattcgtacggctctcaagtgaacccgaataacatggcggccggtgccgtcaaggctattagcgaagcgatggactcgcttgttgcgagcaatgtagatttttcgccttacgatagcgatggtgatcgggttgttgactttgtctatatgatctatgccggtgtcggctctgcggatacagatgtgcaatctgcgatttggccccattcatacaatgttgcaaagcgtcttacgcgtaacatgtcgatgaaccgttacgcttgctctccagaacttgatggccagtcgtatatgtataataaaaatacgaccgcattgaatggcatcgggacattctgccatgagtttagccatgtgcttggactccaggaccattacgatgtgcaggtcaacgacacgagaacgaaagtccgttatacgcctggtcaatgggacctgatggatgccgggtcatacaactgcccgcaaaacagatcgtatacgacgtcttgctctcccgcaaacatgtcctcgtttgaacgctttagcttgggctggcttgatccaaggtatctagaaatttcggatacaacatttgttctaaagtcgattcaggaaaatgacgggcttgtgctgacgtctaaaaaagataatgaatattactttgtcgatttccgtttgctgacgggctttgataagggacttcccaataaaggcgtcttgatttggcatataaactatgaccggtattcatggacgtataacgaagtcaacacatcggacccgatgaaggtggatttgatcgaagccgatggcaaagcggatatgtattcggtatctggtgacgcattcccgacgaatcgagtcaatagctttaacggctttgtgacgtggagcggcgatagcctcgggcttgaagtttatgatatcaagatcgttgatgaccatgccgaatttaaaaccagggggaatcgtaccccgcgcgtgacggtatcttctagttcggcaaaggtttcttcttcgagtgttgcagtctcgtcgtcgagtaaaaatgtttcgtcttcgagccggatcgcttcgtcgtcaagccggatcgcttcgtcatcaagtcggattgtttcctcttcaagtcaaatagcgtcgtcctcaagtctttttgaaaagaactcctctattgccgaggccacttcgagttcatcggaaacgatgagcagttcttctgatgcatcctcggttttggaaagctcaaaatctagctcttcgaagggtactattgccttggataaaaagaattcgaccatgccgaatgtccgcatctctgtaatggatggcgttttgatggtgcattccaagattgcaggccgtaagacggtcaaccttttcgatgccaacggaacgctccttaaaacggaaatgttctatggcgaatcctgtgaaattcgtttgggcgaaattcgcggaaaatcgtttgtcatcgcgacggttgaaaacgaaggacggataataaaatcatataaagttcgaaagaactagaaactggggcgaaagccccttttttacaatatgtcatcctcgccatggtaaaatgtcattcccgcctccgagcgggaatctccttttttagaaaatatctaaattgtctaacatgaaaaaacttttcgctagaattgctatgagctgcgcgcttgtcccggcacttttgacggggacgtctagggccgcagtaaacttgcccgtgcataaggaagtccttgataacgggcttaccgtacttttgtacccgaacaagcaggctccgacagtgagcttccgcctgttttacgtgaccggctccgtccacgaagttcccggcaagtctggacttgcgcatattctggaacatgaactcttcaagggcacaaagaaggtcggcatctccgatagcgttgccgatgtcaggttcatggcaacccaggattccttgcaggctttgatccgctcggcaagacttgctgacgataccgcccgcgtgaaagagctgactgtagaacacgattccgtgctgaatgagcaccgcaagattttcatcaaggatgaactgtggggcgcctaccaggctgctggcggaacaggtctcaacgcctttacgagcgacttggtcacggcttacaccgtaacgctccccaagaacaaaacggaactctttatgtggctagaatcggaccgcatgcagaacgccgtgttgcgcgagttctattcggaacgctctgttgtccgtgaagaacgccgtatgcgctacgatgaccgcccgacgggccgcttttacgaaacgctgaattccatgatttacgaagcgttcccgtaccgtgtgccgaccatcggctggccaagcgatatcgaaaacctgacacgcgaacaggccgaagagcattaccgcaagtattacaaaccgcgcaatgcaattctcgtgatggcaggcgatttggacacgcttgaaacgatgaagcttgtcaagaagtattttgcaccgatcccggccggcgaagcattccctccgcttaccgtgcgtgaccccgaacaggctggcgaaaagcgtttgaccgtcaagcgcaaggatgccccgaacctttacacgcttatcttcaagactcctgccgtgggcgacagcaccctctacgcacttgacattgccgaaggcgtgttgaacggacgttccggccgcctctacaagcgccttgtcgaagaagaaaaaatcgccgtcggcgtgagcgcaagcaacagcccgaacaagtacatctccgagttttctgtccgcgtgaatctgcgccccgatgccaatcgcgagaaggtcgaaaaaatcgtctgggaagaacttgaaaagttgaaatcgcagcaggtcagcgaacgcgaattccagaaagtcaagaaccgcgcttatgcaggactcgtccgtagcttgaccgatatggaaaatgtcgcgaccatgcttggctggtacgaagtctatggcgattaccgcatcttcctcaactgggcggataatttggacaaggtaaatgtcgctgacgtgcagaacgtcgcaaagaaaacatttgtccgcgaaaagtccattgccggattcctcgtgaaagaataaaatgagcgacgctaatgcgtcgcttttttgtattgtcatactctcttcgaaacatgactgctgcggatatcaaatgcgagtccacaagtgacctctcgcttgatacccttgcatgtcattcccggcttgaccgggaatctccttacaaagcttcgatttcctctttggtgaaccctgtgaattcgatgatttcttctatgggccttttcttcaagagcatcttctttgctattgttttcaacactttctcatcgtgttttttgaacgcatctgaatcgtgctgttcaatgtagtccagcactacttcgttatcccatctggcgttcttcatcataagatactcctcaagtttgtctcccttcaaattagatatttgagagaccgaagtcaagtgcttgaattttttgttttggagaggaggaggaaaaaaaagaggacgatgctttcgcaccgccctaaatgttttcacaacggaataatccttattgtgaattgctttcagattatgcaatgaatatagacaattattttatgctggtcaagagatttgtttgaaaaaatagtgaattgatgctttgaaaaaagaaaaatgagaaaaattttggtttgacaattaatgacatggaaatgaagttatatttatatgaatatactttcgccaaaaaagtagaaaaatgcggaaatttgcgtaaaaacggcttttttgagctgaaagaacgtatatttgtaatatcttgttagaaaaagtttggagtaatcctttttatgaagaaaattcttggtcttgatttgggaacgaacagtatcggttgggctgtggtgaatgctgaagagcaaattcgcgaagacggctcaacttatttaaaacctaatgggatatctgctgctggtagtcgtattattccgatgtcagctgatatacttggtgattttgaaaaaggcaactctatttctcaaacagccgaacgtactcgaatgaggatggctcgtcgtttgcacgaacgcgctatactccgtcgagaaagacttcttcggactctaaaccttatgggtttcctaccaaagcattttttaactaaaattgatcgttatggtaagtttactgacgatagtgaacccaaattggcttggtataaaaatttagaggggaaatctgaattttttttccaagatgcatttaacgaaatgctagagaattttaaggaaaagcaacctgaatttgtttctattaatgaaaaaggaaaacagcgaaaaattccctacgattggactatctactatcttcgtaaaaaagctctagagaaaccaatcacgaaagaagaattatcttggttactgcttcagttcaaccaaaaacgcggatattatcaattaagaggtgaagaagaggatgagaaaaaagacaaacaggtagaatatcgcgctcttaaggtgataaaagttgaagctactaatgaaaagaaaggcgatgaaacttggtataatgtttatcttgatgacaacatggtttatcgccgtacaagcaagattcctttggactgggaaggaaaaattaaggaattcattataacaactgaattagaaagtgatggcgaaacgccgaaaaaggataaagatggaaaaattaggcgtttcttccgcgctcccaaagaagatgattggactttattaaagaagaaaacggaagctgacattgatgcttgtaaaaaaacagttggttgctacatttacgattcgttattaaacaatcctaagcaaaaaatcatcggaaaactggttcgtacagttgaacgaaaattttataaagatgaattaacaaaaattcttaagaaacaagtcgagttcattcctgaattacagaatgaaagtctatacaagaagtgcattgaagagctttatccaattaatgaagctcacagaaacaacatagcaaaacctgattttgtaaatttctttattaacgatattttattctatcagcgtccattaaagagtaagaactcgctaatagacaactgcccttatgaggaacgcgtttacattgattccaaaacaggtgaaaagaaaaaagttcctgttaaatgtattgcaaaatcaaatccgtggttccaagaatttaggctttggcagtttgttcaaaatattagaatttatcaacgagaaagagaagatggtggaaaacttttaactgatgtcgatattacaaatgaatgtttaaagtctgaggatgattacgtaaagctttttgagtggttaaatgataaagaaaccatcaatcaagatgaactgttgaagcatctttttaacacaaaaaaatctaaaaacaaagaaattccttatcgatggaattatgttgaagataaagattatccttgtaatgaaacccgtgctgcaattttgaagggcctttcaaaatgcggtatcgattcttctattctttcgccagaaatggaaaatgccttatggcatattctttattctattgaggataaaactgaaattacaaaagcattaaaaaagtttgctgaaaaatatagacttgatgattgttttgtaaatgttttttcaaagattaaaccatttgataaagaatatggatcatattcagaaaaggctataaaaaaactattgcctcttatgagaatgggtaagttctggaatcggaacaatattgatgcaaatactttagaccgaattgataaaatcgttaatggtgtttatgatcaaaaaatttctaacagggttcgtgataatgctgtaaatctaaaggaactcgatcaatttagaggcttgcctgtatggttggcatgctacatcgtatataaccgtcattcggaagcgaaggaatgtactaaatggaaaaagcctgaagatattgatgaatatttgaagtccttcaaacagcattctctacgcaatcctattgttgaacaagtcgttacagaaacattgcgcacagttcgcgatatttggaagcaagaaggacaaattgatgaaattcatctggaacttgggcgagatttaaagaattctgcggacaaacgtaagaaaatgtccgaaaacattctcaaaaatgagaatgcaaacttacgaatcaaggctatgttgatggaattcaaaaatccagacatgggcattgaaaatgttcgtccccattcgccaagtcaacaagacattttgcgaatttatgaagaatatgccttaaattcaagtgaaaaatacgatgagtcaaagggtgaattcgttcctgatacagaagaaattcctgattatgtaacaaaggttgtgttgggacttggttgtatggacaaaaagaaacaaccttcaagaaaagaaattgaaaaatataagtgctggttagaacagcgatatcgttctccttatacgggaaaaatgattcctcttgcaaaattatttacaacagcatatgaaatagaacatattattccccagtcacgatattttgatgattctttcagtaacaaggttatttgcgaagccgaagtcaataaacttaaagatcgtcagttgggatatgagttcatagcggaacatcatggagagaaagttcaactaagccaaggtggagtcgttgaaatattttctgttgatgcctatgaaaagtttgttaaagaaaactatgcgaccaatcgcataaagatgaaaaaactattaatggaaaacatccctgatgaatttatagaacgccagctaaacgacagtcgatacattagcagggttgttaaaggcttgttatctaacatagttcgagaaaagattgatgatgaaaactacgaacaggaagtgacttcaaagaatcttatttcttgcatcggttcagttacagatcgcttgaaaaaagattggggtatgaatgatgtttggaatagcattattcttcctagatttattcgaatgaataatttaactaaaaaaataagcaatattgaacttgcaaatgaattcaaacgtttgtttgaatcagaactgttgaacgtagcaagggccgaaagacttgatatttctgtatcgtaccttgacttttataaaacattgaatccgaagctgcaaaagaatgttatagataatattatgaatcaattgcctataacagattctttcttatccgtcaataatgaaggacatgtaattcccaacatgcctttagaacttcaaaagggatttaacaagaaaagaattgatcaccgccatcatgctatggatgctattgtcgtcgcctgcacaacacgggatcacgttaatctattgaataatgaatcggcgcattcaaaatacaatgctaataggtatcagctgcaacgcaaacttcgtcgatttgaaaagacgataattgacggtaaggaacgtaacgttgctaaggaattcttaaagccctgggattcattctcttcggactctaagaaagttcttgaaaatattattgtaagtttcaagcaaaacctgcgtgtgattaataaaacgacaaacgcctatcaacattttgatcacgacagtaaaaaaacatttgtcaaacaggaaaaaggtgatagctgggctattcgtaaaccaatgcataaggataccgtatttggtgaaatcaatcttcgtaaaacaaaaagtgtttccttaagcgaggcgataaagattccggatagagttttaaacaaaaaaattaaagaaaaaattttagagttaaaaaacaataagatcgatgcaaagaacatcaaaaaatacatcgaagactatcatataggaggttatggaattaatacgtcaaaaattgatgttttctatttcactaaagaaacaaaggaacgattcttcgccacaagaaaaactcttgacacatcttttaaccaagctaaaattgaagatagtatcgcggattcaggaataaaaaaaattttattagctcatttgaaacgaaagaagggagatgctgagcaagcgttttctcctgatggcattgatgaaatgaataaaaatattgttgaactaaacaatggtaaatttcatcagccgattttaaaggttcgtgtttatgaaaaggcagataagtttgctgttgggcaaaaaggtaataagccgaaaaaatttgttgaagcagcgaagggaacaaatttattctttgccttttttgaaaaggatggaaaacgctcttatttgacaattcctctaaatgtgatgattgattgtcaaaagagatatggtaatcaatggaaaaatagtattgagttttatttaaaagatagcgggcttgttgagaatgatgttaaactcttgtttattctttcaccaaacgatttggtgtatttgccaactgctgaagaattgaatgatgggatcaaatctgtaaacaaagaaagattatacaagtttattgatcccaatagcgacaaaggaaattttgttccttattcctctgcaaatgttattttctcaattaatttctcagatcaaaaaaagagaggcgtatcatatccaattcaggatgaatttggagttggctcacaggcgtcaaaaaatccacgagctatcaccggtgaaatgattaaagaaacatgcatccctataaaagtggatcgacttggaaatataatcgaatttaatggattacgattatgattaaacggacactgtattttgggagtcaggcttatttaagcctgaaggacaaccagcttgtcgtcaaaaagcgtgagggcgatatcgtcactgctgctattgaagacattgcatacattgtccttgattcgccccaaattacagtgactaatgcgttactcggaaccctacttgaaaataattgtgcaataatcaactgcgacaagactcatttgccatcaggattattgcttccgctttcagggaatactttacaaagcgaacgctttcaagctcaaatagaagcgtcgttgccgctgaaaaaacaattgtggcagcaaacgatccaacagaaaattttaaaccaagctgcgattctaaaaagttcaagaaatatagaaattggcaacatgaccgcttgggcgaattccgtgcgtagtggagatgcggataatcgcgaagctgttgctgctgcttattattggaaagagatttttcctgaaattccggattttgttcgtgaccgcaatggcgtaccgccgaataatatgttgaattatggttatgctatattgcgtggcgttgttgctagagctttggtttcaagtggtttattgcccacattaggtattcatcaccataatcgttacaatgcttattgtttggctgatgatattatggagccttatcgtcctgttgtagataaattagttttagaaattttggcggaaactgacgaatgtcctacagatctttctactgaaataaaagcaaagcttttaagtattcctgtacttgattgtgttatagatggaaatcgaagcccgttgatgaatgctgtttcgacaactacggcttcgcttgccaagtgttatttaggaacgacaaggaaattgctctatccggaggtgtaggatggatcgatttagcgagtacagaattatgtggatcatgtgtttctttgatttgccgacggaaactaaaattgagcggcagcgacacagtgaatttcgtaaaaatctgttgaaagatggattctcgagattccaattgtccatatacattcgacattgtgcttctgtggaaaatgcggaggttcatattgctcgtgtaaagagctttatgccacccgatggttcggtgagtattctttgtattacggataagcaatttgggaaaattcaggttttttatggtcgtaaggagaaaccaaagcctaaatcaacgggacaattggagctttttttgtagaaaaaagtggctcaaaaaaagaaaaaatcggctcaaaagggccgatttttctttttgcaatatctcatctaactcgtttatagctgtatagttacaacaagtcagttgttattgctctagtaaaactagaaaatctgaaagcaattcacaacttaccatagcacaagcgcaaaatttattttgttgttattgctctagtaaaactagaaaatctgaaagcaattcacaacttcattttatccttaaagtcaatcattttcgttgttattgctctagtaaaactagaaaatctgaaagcaattcacaacgcacgtagtaatagcatttgatggcgttaagttgttattgctctagtaaaactagaaaatctgaaagcaattcacaacacgacaatgcgctataagggatagcttgcagttgttattgctctagtaaaactagaaaatctgaaagcaattcacaacagagtgtcggacgcagcaaaaatctagctggttgttattgctctagtaaaactagaaaatctgaaagcaattcacaacagaaagtcctgtcggtgaggcatacggaatgttgttattgctctagtaaaactagaaaatctgaaagcaattcacaacgcaccttgttcgcggttgtctcgttagagagttgttattgctctagtaaaactagaaaatctgaaagcaattcacaacaacatcttgagtgcattcttatcaccagatgttgttattgctctagtaaaactagaaaatctgaaagcaattcacaacaggggagtgctttgtctggcgctgatgccggttgttattgctctagtaaaactagaaaatctgaaagcaattcacaacttcctttgcccttgaatggtgttgcatatagttgttattgctctagtaaaactagaaaatctgaaagcaattcacaactagcgccttgagcgcttcgcgcacagcctcgttgttattgctctagtaaaactagaaaatctgaaagcaattcacaacagatggacgagcagacgcaggcagagttcagttgttattgctctagtaaaactagaaaatctgaaagcaattcacaactcgattcgctgttgagtgagcttcatttggttgttattgctctagtaaaactagaaaatctgaaagcaattcacaacaaattgacaaaaggcatattgatgcgataggttgttattgctctagtaaaactagaaaatctgaaagcaattcacaactcctggactccacaatacgcggaacgggtgttgttattgctctagtaaaactagaaaatctgaaagcaattcacaacacaggggggatgtttagcaggatcaactttgttgttattgctctagtaaaactagaaaatctgaaagcaattcacaacagatgggatggacaaaggaatattcctactgttgttattgctctagtaaaactagaaaatctgaaagcaattcacaactgaccgcgaacttttcaggcaattcattggttgttattgctctagtaaaactagaaaatctgaaagcaattcacagctcatgatgccgtacattccgtacattttctgttgctattgctctatcgaaggtagaaattttgaaagcgattctcaattaccaactgaactaacgtcccaaataatgggctactatcgcactagcaataacaaaaaattcccgctttctcgggaatgacattacatcccttcaatttcttcgatctgcttgccaagttcgcttgcttgctgtgaatcttcgttgtagatggcgttgattcgcttgcagctgagttcgagcagattgcgggcttcgatggaatcgctctgcttgcggagttcgcgcaatgccttgtcgattctctcgatgtccttctggtcggggtagcccttcatgaaggcgtagaaaagcttaatttgtgtgttgtattcgctgtcggattcgcaggcgagcaagaacggtatcacgcgcacgttgaggagcttcgagaggtcgcccatgaacgtattgagcgtgagacccttcgggaaaagttcttccgtgtctttctggatgtcttcggtgttcacgaaatcgccttcttcgaactgcaagagcatttcgttgagcatgtccatttcgttgcgcttagcttgttcgcgatactttgcctggtagtaaatcggcagtgtcgtgaggcaatagtgtgcctggtttgcaccgataaattcaccgatgtaatagatgtcggcgtcttccttgagaatgtcttcttcgttgttgaagttcccgatgcgggcgggtatggggatcacttccatgttcgaaagttcatggaggcgttcgcgcatggcgtcaacgtccacattttcggggagttccacgccgttttcttccatcgtcttgagaaagttgttgaactttgcatcgacggcgcggttgacttctcttcggcttggcttgtgctcgaactgacgaaagtcgccttccaacgtcaaaagcccatttttaatcatatcaccaaacggtgtttcgttgggttcagcgtcgggagagggcaaaatacgtgcgtaggcaatcatcctgccgcacaactgatcgtcatttccttttttctgttcgattccaagcatgtcctaaaattaacaaaatctagcggacatggaccattttttgttgggtataaccttgcgctgaggtctttacgacgtagattccggggataaggccgttcaaattggcgattccctttgcgctgcgaacgagtttcccgttcgtgtcgtagatgcgggtttcgctaacggttgcgtttacgcgggctgttttcacgaaggcgacgcctcccttgtctacgtttttttcggtgagcttgatctggtctaggttcgggccgtcattgccgttaacgatggagaacgtgatgtagcttgcgcctttggggagtgtaatggttgattcttttgtctggtatgtggtccacttgtcggtggcttcgaacgagatgacttcggcgctcttgcatccgtcaacgcctgcggtacatgtgccgggggctgcgaaggcgaggttgcgagctttgccgctgccgtttgcgtatgtcatttccatcgtgtattcgccggggaattctacatagacggggacttggacggtcgatttcccggtgccgaagttgatgtagccggtgccagcaaagcctgcgtttgtgttttcgttgatggcgttgtcgatgatgccgtcttcggcctggaacgtagttgtgcccttggcttcaaagatggcgccgagttcgatgtccttggtcatcgtggtttcccaagtgctttcgctgccggcatcgcttgcgctcttgccggtccagcctgcgaatttccagccgctagctggttctgcggtaaatgtgattgcggttccttcggcgattttttcgcgattcggggaggtcacaacggagccgccaatagaagaattaattgttaagttgtagtaagtgacatttgcttcgagaacggtaatctcgttagagcttgcgccgagaccgcccatggaatttgcggcacgtaccgtaactttggagccggcggcaatgcttccgacgtcaatggaatttgtggtagtattgctgtggtacttgccgtttacaaagatggcccagcaaatggcgttgtcgtcatcgttccagatgatattggcgccatcctgtgaaatcttcggggcggaaacctgtgccgtgaacttggtcgggtcccagttgtcgctgccgccaaggacgttctggagcgtgtatttggcggcatcgcttgcattcaagacggtcttgagcgaagttgctgtcgatccgtccttgcccccgtcaaagtatgttttgcgctggcttgtgttgatggcgccgccactcccgttcttgctgttgtattcgccgaaaattacgggggcagaattcatgtcgggtccccagccttcggctttgggttctgcgcgcatgattgtgtttaaaaagacaacttttgcgcggccccaggaacgcccgagatagaatgtcttgttgaatccagaattgctgacttcgatgatcgcgttgttgaaaacgtaaccccaggtgtcagggttttgcgatgccgtgatgtagccgccgttgcgcgtcatcacgagcttggtgccttcgaaaaatacgtcaccgccgccgcagataaagtctacagttccatcaatttcgccgccttcccaatacgtgcggcctttcttggtgtaatatgtgtcttgaccgctcaaaagacgcacgttcttgtagatgaacttgtcgcctgcgttttgttgcaaggccacttggcgcgctgcatttgaagaactgacggaacttctgttttgcagggtgatatcctgcatgtacatatttttgttgctggggaagtacagcgttgcagttgtgctgatgccttcggtatcggttgtattccagataatcgtcttgtcaacggattctccgatgatggagatattcgatccgctgaaagtcgatttaccgtgttcgtcaccggtgaccttggtgatgttgtattcaccatttggcacaaagagaatgaatcgcttggactcggtggcgcccgaagaagatgccttggcgatagccgccttgaagtctccatcgacgccaagcacaaagtcaaacccgtgcttcgcaattgcggatgcactcaccgccattgcaagcggcatacaaactgcaaacctgtaaacccaactattcaacataaaacctcttccttatttgtcattcccctaacggggcttgactgctgcggttatccaatacgcacacaagcgttcgtgctgtctaaccttgcatgtcattcccgcctccgagcgggaatctccttcttgaacagaaacaggagatgcccgatcaagtcgggcatgacaatattgttaatattccctaatcgttttcccgttcacgcggtacgtttttccgtttcctcgcataaagtaaacacctgcgccgtttgcgttgcggttgaagtctacgaagtagcggttgccttgctgcgttttgcgctcagtgtgcatcgcttcaatggacgtgcgcggaatttcaacttcgccagctttcaagtcttcgctcatccagccgatgtaatcgatgtttgccatgccatctttcgaaaggcttgtgaacttgagttcgctatagccttgtggcaattcgatttcgatggattgcactttccatgttgtccacgctgcggtagattccatgctgccgtctgcaagtagcgtcttgtcgcctgcggaaacgctgtaaccgcgcgcggagccgccgccgtttgcaaagctgatgaacagtgtgtatttgccttccttgaatgcagtgacgccgtaagtcacgtagcttccggtggagttgtctacgttggcatagccttcgccgacgaatcccgcgttgtttgcttccttgactccctgaatgtcgatgaagtttacgccgtcaatgtatgttgtgcaggtatcgctttcgcacattgccgaaggtggtggaggcggaacgtagctgtcgtccatcttggcaagtgcttcgaggtaagatttttcggtgctgatgagggccgtgccgtaatcgcctgcccactggtatcccgtgcggcgttcttcgctaatttttgtgaagtcctgcgtcttggtgcttgcgccatcgcggtcgcagaaaaagtagttgtcgttgttgacttcgtagaatcggtaccagagaacattgccttcgcgctcttcgaagcggccttgtttcttgttgaagtagagcccagtgacgcgcgttttcttgtaccattcaatggcgcccttgatggatttctggatggcttcggtttgttcgggccagttcatcaagaaccacacggcacctgcggattcgctaccggacttgctggcaagttcgtatgcgcgtgcgccgaccggggcaaggctgttggtgtcatgctgggcacaccagacggtgagtttcccgtcgttcacaatttgcgccttgagcaagtaatcgatcgctttgtcgagagcggatttcatcttgctgcgggtattgtcgtcaatgatgtccgagtcaaatggacttgtcttgttggcaatatccatcatcgtgaccatcgcgcggatcatggcgttgtcgttcagcgtaatttggtcggaatagttaccgcgcttgggccagacttgcgggaggccgcctttggagcgctgcatggtcaaaaggaaattgacggccttgttgaaacttgtcttaaatgcggatttgtaattgctgttcgttgtcgccttgtagcgcacggcgagcaaccgcatttcttgaacagtcgcgttgttgtcgatggtaccgaggtcaccgccgccttttgccgtccaggaggattttgcgccgccggtgtatgcgctcttgtacttgtcggcgtgggccttgtcaaaaccgccatttgcgatttgccatgtggtcatgttataggtgtactggtcaatgtccatgccggatgccgcgtcggtaagttccgaatagcctcggtagctgttgattttcgaaaccgccgttgatggaggcgcgtagcttgccgcaaatgaaaaagacgcgacagacattgccgctacaaaaaacttgtagttaccaaacccaaaattcttcataaaaaacctatagaagagttcttaaccccacaccacttctataatctacattataataggctgatttttgttaagaatttcttttaagtgttgtccatggacaatgggagcggtcgcattattttgattgtctatttgattcttgtcattcagagcggtgaaaccgcgaagacaactctgaaggcgagtgttgcaaaaatgagtggattcatttttataactgagccaaagggttggggctaagcccaatccagtggattatgccctggatccttcgggcgaatgccctcaggatgacggaagtctttttataatacacgttgtataatacttttctaaaaatttttagaaaaattaaaaatcttcaaaatttcttcaaaaatcttaattttgtatagtaaaatttattgcagaactataccgcaaaatctaatttataggaatgaaaccaatcaccgaatatcaaaactaccgagaatacatgcgggacttctacgaagaacgcaaacgcagttctttgttctcatggcgcgaattctccaaactggcggggtttgcttcgccaaactttatgcagctcgtttgcgacggaaaaagtcgcttgagcaaaacgggcgtcgaaaaagtggccgatgccatggggcttgcgggcgctgaccgcgactatttctttgcgatggagcgttttggtgatgccaggagtgattcgatgaaactccaggcgtttaacgaaatgcagaaaatcgcaaaggaaaatcgtttgcgagtcgtcgatgccgaggcgttcaagtatttcgaatcgtgggtgaacccggtgttgcgtgaacttgcaccgatcatgccgggtgcaaaaccgctggaactggcgcgccaatgcattccggtcgtgagtgccgccgaagttcgccattcgcttgactttatgtgccatgcggaattcctcaagaaaatcggcgaagatacctacgtgcagactgagaaggttgtgacgggatcttccgaggcaattcctttggctctgcgctcgatgaaccgccagatgtcaaaattcgcaacggaggcaattgacgaaatcccgcccgaaaaacgccatatcacgggtgtgacgtttggtatttccgaagagacttaccaatggcttgtgcagaagcttgaaacactcaggcagcaggtggttgccatggctgctaaggaaaaagaatacgataaagtttatcgactgaatttacaactattcccgttaactaaagggagagaggcatagtatgaaaaagttgtataaaataatcgctatggcatggacgggacttttgctgtcttgttctggtgatcagtctagtggtcgcgatcttgccggtgcaactacggaaccgaactccacgcaacgcgcagaattgacggaagaacagaaggccctgctggaaaaatctctggtcgtattggttggagggacgattgaaaattcaaatgatattagtgtagatcccgatcagagtgttgccattgattcttccgtatttggaaagttgatgttcccgtttgactcggtaccggatacgtcattctatacttcgagcttggatggctctaggtcgtgtcaggtttctgttcaagcgaaagagtccggtgtagaactcgaacagtcgatgtacacgcaagaccgatacggtcaatattacagctctagtattattgccgtcaaggttgtagatgtcgagggtactcctgttttgctgaaaactgttggacatacggattattggggctatggaacgtcttgctctgaatttttgaatgaattcaagcagtcgtgcgaagcgtctaacggaattttcaaggattacgaagacggttgtcgcaattattttttgagcttggtgtgctctatgctgatgccggaaggaaaaacggcggaggacatcgtgcgttcctatacgaaggaatacaggaatacctgtaaggaagattctatcaaatatgctcctgttgatactaaagttgatcccttgcaaggttgtcatatcacaaacgatgaaaacggcgatcattattttggggattgtcctttgatcgatgatggtgttgataaggatgtatggcgcagggacagtg

SEQ ID NO: 1039 - DNA, 24776 bp, synthetic construct
  source 1..24776: mol_type = other DNA
  misc_feature 1..24776: note = Synthetic
tagcaccgatgctgcagtatgggtaaaatcttcattgcccaatagcattggcaacctggctttcctcgattatgtgctgtataatgaggcgctgtacgggttaggctatttcaggggaaatatagagcagtatatctttaagcctgaaatttattgtagcagggatatgcgtacctggcagttgctatcccgtaccagcaatttgcctcaacgttttttttaccatccttttgtatttgaaaataaaatatggattattggcggcgaagaccaggataaacagtatgatgatatatggtgctctgccgatgccgttacctgggtaaaacaaaaaagcaaagccaccccgggcaaacagagcggtagccaggtgctgcagtttaagggaaaactgtacctgctcaacaatgatgtgtggacttcggccgacggcattaaatgggaaaagttaacatctgaaatactacaggacaccaggctatctggttatacggctgtagtatttgatgataaaatctggctgttgggttgtacccgtaaccagcagtttaccagcaaaacattgtacagcgaagatggtaccaattggaaggaagctgatgcaccctggtcggcaagaggaggggtagcggcctgtgtttttaaagggaaattatatatgacgggtggaaaatacgggggtacatcaggcagcccggaatttgtgtacagcaatgatttgtgggtgatggaaaaatcagaatgagtttttggataaaaacttttttggaaatattcttaccctgcacctacctttgcagcagttcttattacaagcttatccagaaaggcagagggtaatggcccgatgatgccttgacaacctctttcgccaatggtgaaaaaaggtgccaactccatccgccggaaggcgggcagataagtcagatgcacagctttaatgtactttctatacaagcccatctgacccagatgggttttttgttgcccacctgcctttgtataagcttactttttttaatttaaactgttttgaatggcagacaataaacttacgattgggctttttgggtttggtgtagtaggcaagggtttgtatgatgtgttgcattatacgccggcactgcaatcatctataaaaaaaatctgtatccataaccctgataagccaagggctatagccgcccaccactttactacacaggccgatgaattgctgaatgatgacagcatcaacgtgattgtggaattgatagatgatgccgatgctgcctaccatattgttaaaacagcgctgcaaaaagggaaagcagtagtgagtgccaacaaaaaaatgattgctgcacattttgaagaattactgcaattgcagcagcagcacaataccccttttttgtacgaagcggcctgctgcgccagtatacccatcatccgcaacctggaggagtattacgataacgacctgctccacagcatcaggggtattataaatggcagtaccaattatatccttacgcaaatttttgagcagcagctttcttttgataaggctttgttgctggcacagcaggcaggctttgccgaaagtaatccaaagctggatgtgggtgggtatgatgctgccaataagctgtctattttgctggcacatgcttttggtataattgccggtacggatacttttatttttaacggtattgaaaatatcagcctgcaggatgctgcagtggcaagggccaagggctataaaataaaattgattgccaatgcccaaaaacttaaaagtggcggattggccgcatttgtactgccccagtttttaacacagcatgatgatttgtatcatgtgcaggatgagtttaacgggttgattaccgaaagcagctttgccgataagcaattttttaaaggtaaaggcgccggcgcttttcctactgcatcagcggtactcagtgatatatccgccttgcgatatgattatcgctacgagtataaaaaactgcatcagcaaattgctgtaccgcttaccacaaactattatttgaaagtgtttgtaagtgccgatgctattgaaaaaattaaccgggatgcatttgaatggattgaggaatggcacaatgagtataagcacaactggctgatagggattattcatgcctcgaagctgctggccgacgactggtggaaacagcctggtgtatcgctgattgtgtgcccggatgctattgcagaaaatgtggagtatcgtgaaataagcaaacgcagcctgcagttagccggggtggtaaatgcattgtgatactgccacttaacctttgatagccgatgctgtgaaagcaagtttgactttttcaatgatcagtattagggaaaatccggcgatataggcgatgatatcttcccaggcaaaagaggttccaatcaccgtacaggcaagcgttgaattttgccagccaagccggttaacgatgttgaaatactgcagcagctctataaaaaaagcaaaaagcaaaacagcggttgcggtaggaatcacggggaaattaaaaaaagattgtatgaagcaatatatcaatgctactaccagcacatcgccaaaatagggccttataaacctgtcgtgtacaaacactgcaatacaaacttccacaaccagcaggagcagggtaaaaataaaataattgcgtttgaattgtaggtgtgcaggcatgcgctataaaacaattaggggcataaaaaatccgtgacagccatcacggatttttttatgcctggtatttttattgggatatatagttcttgagctggtcgatggtttcccgttgcatgtcgatgatagctgtaactacatcgccaatcgaaatcatgccgattacaacgccgtcttttaccacgggcaggtggcggatttttttgctgctcataatactcatgcaggtttcaatactatcatcagcacccactacaaaaggggcttcggtcataatttcctttacccttgtatcgctggagttttttcctttaagcaccactttacgggcataatctctttcggaaactatgccggttaatacagcattatctattaccgggagggcgccaatatttttttcgcccatcagcttcagggcatctaatacggtggcatcactgccaatagcatatacattactgcctttgttttgtaaaatttttgaaactgtcataagcattcatatatgtggtgagcaaatcgatactgaagataacaaactggcggcacttttaatttataataagggctaattattaacgcttaacgcacaagggcagttattgccccaggagcgattatgtaaattaaccaggctgcctatcatgctgcagccttgtttaatttttaaattgctgtatccagttgagcatgccgcctgcaaggtttttggtattggtaaagcctgcggcatccagtatcagtgctgcctgcccgctgcgattgccgctgcggcaatacaatatcacttcttcttctttcaggtcttcaatatcatctatttgcatcgcctggattttgccgaggggtatcaactgcccgccaatattgaactcagcattttcgtgtggttctcttacatctacgaggtgtagtttttcccctgcatccagcctggcttttacttcatctgctgtaataattgtcatgttgtatttatttaagtttgttggtggtatcggttaggttaatcattaccggcgataaaaacagatccatcaccatgcctggctttatatacataagccttttattttcgtcgaaatgaggaggattttgtttgtaaatataagcgttcatggtgtcctttacatctggtgtggttactaatgttaccagtacattcatgctatccagttcggcctttgcttcggcataggtcatacctaccaggtcgggcactataatatttgtctcgtctaatcctttacttactataagcgttattttactgccccattgtattttatcacccggtaaaattcttacgcccctgtattgctgttcaatcaccgagcctttcataaaatcggtacggaagatggtatcacccagtttaaggtggctgcgttccattatttgcagggcaaagtttagtggtttgccttccagcgaaggcatatttatcatgggaggtatgtaacggttaaccgtgataaaaacggtgcggttaatttttacggtggcattagggtcgggtaattgttttatcacaattcctttggccagtgtatcggtatatactgaatcctgtatggctacttcaaagccctggctttccaggagttttatggcttcgtccattggcttgccttttacaaggggtacggtgtggtattcgccgtgttttgtcatccagcccagcaattgcagtatcagcagcaccagcaaaaaaaacaatgttgctgcagccagcatgtttacccacaatggtcttttggtaataaaagaaaacataaactgtttatttatgtcggtataagcccgacgaccgaaaggtaatttttattttgaataaatgcccggttaagccagggagccttcaattagggcagtataaaattgttttaaagtccatcccatggcttttacctgttgcggtacaatgctggcttcactttggcctggtacggtatttatttctaacatatatggctggccgcttttttcatcatatataaaatcaatacgcaccacgccattgcagttaaatacgctatatacttttgcagcggtagcccttattttggctgctatggtttgatcaacctgtgctggtgttacttcttcgctggcaccctggtatttggcttcaaaatcaaaaaattcttttttggtaatcacttctgtgatgggcagggtggtaatggtgcccttatttttaaacacaccgatggtaaattcccggccggctataaattcttcaaccagtacctggttgtcttctttaaatgctttgtccaacgccggtgccagtgcttcggcagtgtttactttgctcataccaatactgctgcccccgttgttgggttttacaaatactggtaattgcagttgctgtaagatatcatccggtgtaacactgctgtgtttaaaaaggtgtagcgaacgggcaacaggtatacctgcaaatgcggctacggctaccgtgtaacgcttattaaaagtgagggcagatgtggccgcatcgcatgaagtgtagggcaggccaatacaatcaaaataaccctgcagtttgccatcttcgccgggggtgccatgcagggcaatgagtgctgcatcaaattttattttgcggccatttatggtaatggaaaaatcgtttttatctacagctatattttcggttgctgttctgtaataccagccttcgggatggatatctatggtataaaaattccaacgatcggtatcaatatttttttcgatggtggctgcggttttataggatatcaccgattcgccggagtagccgcccgtaactaatgctatcgttttcttcattgtgtttttgcaggtgttattttggcaaagaaacaaaaataaccggatgcatataaaagagatgcgttaagatgccggtaaataacagccggcgcataaacgcacaatgctgaatatatttactctacaccttcgttgccggaatgcaatacaaatttccaactgccatccggttgttttttccagatggtaacataggtgccgtactcaatactatcagagctgttttctttaagggagtaaataccataggtaaaggctaaatcgccggatgcggcgagggtggcgctccggggctcccaggtcattacaaagccgctgtcgtcgctttggctgataaagtccatcgcattgccctctaccagcggcacgatacccgggcgaagcaaaatgccattgctatcgatatattgggtaaaggcagcccttaatccttttaattcgctgtattttgaaaattccctgtcggtatccatcacttcggctttaattgccgcaatgctgtcggcagcatctttttgtttgtcccggcaggcggtaagcaatagcaggcaaagtaaagccgtaccgaaaagaaagctgtttttcatgtgtactaaaatacttgtatatcgctaaataaaaaaggcgaatatattttgcaatatactcgccaggatgcaggaaatatcacctgcctgtattcatccgctttgcggcggacgtgttaaaaagttagatgtgcagtttttcttttttagccatcagttcatccacagtttcctggtacatttcgtcgggcacacagcaatctacagggcatacggcagcacattgcggctcctcatgaaagccctggcactcggtacatttattgggtgttatgtaataagtatcgctgctaataggtgcatggcgggtatcggcatcggtagcggtaccatccagcagggtaaagctgccttttacagtagtgccatcggccaaagcccactctacaccaccttcataaattgcattgttaggacattcgggttcgcaggccccgcagttgatacattcgtcggtgattttaattgccatctgatttgatttaacaggttggagttacgatttttgcaatacaaattaagattaacgggatgaaattacaaaatcggttgaaattattacaacagcttgcggattatttaaacaaaaacgataccaactggggtgaaactatccttaaagcacagcaattcaatgcctggttcatccccgaatttgttcaactggctgtacataatatccataataattttttgcaaccgcaaatactgcaacaatggatacagcactatcatatagatgataataccggtggtaaaaatgtagggatcgtaatggccggtaatattcctttggttgggtttcatgattttttatgtgtattccttgccggccaccagtgcagcattaagctttcgtcaaaagatgaagtattgatgcagcatatcatcagcttattgcatcaatgggcacccgaactgcagcagcaaattgtagtggcacctatgcttaaaggctgcgatgcctatattgctacaggcagcaataacagcgcccggtattttgattactattttggccagtacccctccatcatccgccgcaaccgtacatcagtggctgtacttagcggcaacgaaagccccgaagaactggaccggctgtctgatgatattcatttgtactttggccttggctgccgcaatgttaccaagctgtatgtaccccggggttacgattttgttccgctgctcaacagctttaaccgctatcaatattttttggagcatcataaatacaaaaacaattacgattactgcctctccattcaaattatgaacaaccgtttttatatgaccaatggcagtactttacttttagagaatgccccggtttttaccccggtaagccaggtgcattacgagtattttaccgatgcggaaacgctgcaggaaactttaaaagcagatcaaaacatacagtgcattgttggcgcaggggtaccctttggtgcagcccaaagccccggtataatggattatgccgatggggtggatacgatgcagtttttgcttgggttgtgatgaatgaaaagtaaaaagtgaaaaattgaaagtgaaaagaatagggaagctgaagtaatctgcgcatctgcggctgtgataaatgaaaagtgaaaagtgaaaaattgaaagtgaaaaaatagggaagctgaagtaatctgcacatctgcggctgtgataaatgaaaagtgaaaagtgaaaaattgaaagtgaaaaaatagggaagctgaagtaatctgcacatctgcggctgtgataaatgaaaaatgaaaagtggaaaatgataaatgttgggtgtgcaacactcagcgcatctgcggctgaaaaaataataatctccgcttctgcagcaagaataaaaacggcctgtttttataacacatcaaaaccgccagcaatgtcgggcccgggcgtataggaaattacggcatattgaaccaccgcttttgctaactttacagtcatctacgaaagtcttactaattatatgttaaacgtggcacccggtaaataccattttgtcagcccggtgttactttgtgtcatcaggcacaaaaattgaaaaaccgttacaaaacaaaaaactgatagcagatgaaaacaaaacagcttttattcaacattgccatcagcgcccttacggcccttgctgtagtgtggggctatggtaaatttataaacaataaaaatacctatgcaggccagcagcccggcgaagtaccggccaattataaatttgccggtttcagcaatagtgaattaccacccggcgctattgactttacccagccttcagcagcagcattgcctgcggtagtgcatatcaaaacaaaaaccaatgccaagcaggtaagcaacaacctgccccgccgctccaatcccttcagcgactttttcagcgatgattttttcgaccagttttttggcaacaggggtaacagttatatccccgagcagcgggcttccggctcaggcgttatcatcagcgatgatggctatatcgtaaccaacaaccatgtggtggaaaatgctgatgaaataaatgttacccttaacaataagaaaacctacaccgccaaagtggtaggtgccgatcctgcctacgacctggccgtaattaaagtagacagcaaaggcttaccctttttactttacggtaattcagacgatgtgaaaatagggcagtgggtgctggctattggctatccgcttaacctggaaacaactgtaaccgcaggtattgtaagcgccaaagcaaggagcctgggccttaataaaggcacaaaaaacaattcgccggtagaatcatttatacaaaccgatgctgccgtaaaccagggcaatagcggtggtgcattaatcaacaccaacgggcaactgattggtattaactcggccattgcctcacctaccggtttttactccggctactcttacgccataccggtaaacattgtaaaaaaagtagtggacgatttaattaaatacggcaatgtgcagcggggcttcctcggtgtatctaccgtaaataccaacgatattacagaagcacaaaaagataagcttggcctcagctacaccggcgaaggcctggtgattaccgatgtaagtgataatggcgctgccaaagaagcaggccttaaaaaaggcgatatcatcaaaagtgtaaatggtactgccgttaccctgccctccgaactgcaggaactggtaacccggtacaaacccggcgataaagtaacggtgctgtatagccgcaacggtaaagacaatacccttaccgccaccctcaaaaacaaactgggcaattttgatattgtaaaaacagagaacagcgcatcctcaaagctgggtgctgagctgctgaaccttgatgtaaaaaaggctaaagaatatggcatacccggtggcgttattgtaaaaaagattaccgatggcgccctcaaagatcaaacccgtatgcgtgacggctttgtgattgtaaaagttaatgacacagatgtaaaatcaatcgacgacctgaacaaagcggcaggcggcgccaaaaccgtaaccatcaccggcttttatcccggctacgatgccctgtacgattaccccgtatcgctggacggtaaataaaataaatatataaagttgaccttgaagggctggcagtattgccggcctttttttatttatcccggcagttgaagcaggagggaattattttaaaaaatatttatattagtggttggctgaaaagcaaattatagggtaatggaggaatgagggcatgaaaaaaccgacttgcgccggtttaaatgtgttcacaacggaataatccttattgtgatttgctttcagccctaaaactataaaactattacttatgagcaaaaaaattttaggactggatttgggaacgaattcgatagggtggtgcttaattgatcaagattttgaaaataactctggaaagatagaaggtatgggaagtaggattatcccaatgagtcaagatattttgagtgagtttggaaaaggaaattctgtttcacaaacagcagaaaggaccagatatagaagtgcccgtcgactacacgaaagacaattacttcgtagagaaagattacaccgggtactgaatattctaggatttcttcccaaacattacgcaaacgacattgattttgaaagccgtcttgggaaatttaaaaatgaggcagaacctaaattagcatggtttaaaaatgctgaaaataaatttgaatttctttttcaaactgcatttagtgagatgctttccgactttagaaaaaatcaacctgaattattaaaccgaaagaataggaaaggtgaagatgtaaaagtaccatatgattggactatttattacttgcgcaagaaggctttgactgaaaaaatatctaaagaagagttaggatggttgattttgaattttaatcaaaagcgagggtattatcaattgcgtggtgaggtagaagagaataatactgatgttaatgaatatgtaatgctcttgaaggcagtcaaagtagagaagggagaagttgacaaaaaaaatgacaaaagaacttggtacagtattacattcgataatagttgggtttacaatgcaacatttacttcagagccaaagtggcttgatactgagaaggaattcctgataacagaagaacttgacgagtctggaaatattaaaatcgtaaaggataaaaaatcggatactcatggaaaggaaaagcgaaaaataactccattgccatcatttgatgaaattgatttgatgagcaaaaaagatcaggataaaatttataaaaaaattaaggcccgaacagaactatccattcaaaatagtgataaaactgtaggtgcatttatttatgacacattattgaaatccccatcccagaaaatcagaggtaaacttattcgtactattgaacgtaacttctataaagatgaattaaaggcaatcttaaaggcgcaaatcacactgcagcctgaactatttacgagtgatttatataatgattgtgttcgtgagttatacaaaaacaatgaatcacatcaaatgcagctttttatccgagatttcctgcatttatttttagatgatattatcttttatcaacggccgctgcgaagtcaaaaatctacaatcggtaattgcccattagagtccagaccattgagaaatgaaaaaggccaaccaaaactagattcgaatggaaatcagatttggaagttattcaaggttataccaaaatcaaatccgtattaccaggagttcagggtttggaaatggttaagtgatttaaggatttggagtattgaagatggtaatgatgtaacagctaaatttttaggcgaggctggagcctatgataaattgtttgattttttgatgagtaaaaaggaagtaaaccatttggacattttggatttcttcatcaggccagttataaaggataattatccaaatgcaaagcccaagatattaaacgaagaaataaaaagggagattgccaagtatcgttggaactatgtatttgacgaggataaaaatgagtcaaaagaatatccctgcaatgaaaccggatttgaaatttcaagaagatttgaaaaagttaataatgtgccaactggttttttaacaaaagaaattgagtataagttatggcacataatctactcagtaactgataaaaatgagtttaagcagtctttaaaatcatttgctaagaaatacaagttagatgaattatcgtttgttgagaactttataaaattccctccctttacgagtgactttggcccgtattcagaaaaagctataaagaaattattgcccttgttgcgttctggaaaatattgggaatggggactaatcgacacgaaaagtagggaaagaattggaaaactaattactggtgagtttgatgaagacataaaaatcagggtaagagaaaaagtaataaataagaagttggaaactgaaaaagatttccaggctttacctgaatggctggcaaaatatatagtttacaaccgtcactccgaggcagatatagccgggaaatggaactccgttagtgatctaaaggcatacctaaatgattttaaacaacattctttgcgaaatcctattgtagaacaggtaataaccgaaacgcttcgggttgttggtgatatttggacgcattacggcagtggacgaaaagattttttcgatgaaattcatattgaattgggtagagaaatgaaaaatacagctgaggaaagaaaaagaataaccagtacagttgtagataatgaaaataccaaccagcgcatcaaacttttactgatggaactgaataatgataaagccattgaagaagtccgcccttattcgccatctcaactggaacttttaaagatttatgaagatggtattttgtccaattatagtgagcaggatttaaaaaatgaaaaaacaggtttgaagaaggaaaacaaagaaataacaatatatgatatttctaaaactgctaaaccaacacaaacggaactgatacgatataaactttggctggagcaaaaataccgttcaccttacactggtgaagttataccattgagcaaattatttacaacagcatacgaaatagagcatatcattccacaaagtcgctattttgatgacagctttagcaacaaagtaatttgcgaagctgctgtaaacagattgaaaaataaccaactcgggttggaattcatcaagaatcattacggcgaaagaatacaaattggcagtaaatatgtaacaattttcactgaagaagcatacaaaaaatttgctgatgatcattacgctaaaaataaagcaaagcgtggcaaactgctattggaagaaatacctgataaaatgattgccaggcaaatgaacgatacccgctatatcagcaagtttatctcacaggttttatcaaatattgttcgtaaggataataacgatgaaggaataaattcaaaaaatgtgattccttgtaatggaaaaatcactgatcgcttgaagcaggactggggtttaaatgatgtttggaatgaattgattttgccacgctttcaacgaatgaatgaattaacaaaaacaacagtgtttactgcgacaaacaaagaagggcatactattccagtaattcccttcgaattgtcaaaagggtttcaaaaaaagcgtattgaccatcgacatcatgcattagatgctttggtcattgcgtctgccacaagaaatcatattaacttattgaataatcaatctgcgaagtctgataatacaagatttgacttacagtataagcttcgtaatactgaaaaatggaaagatgaagccggaaatgaaagaattaggttcactgagtttaaaaagccttggccaaatttcaccattgatgcccaagaaaaattagaaaatgttgttgttagcttcaagcaaaacttacgagttatcaataaagctacaaacacttatatcaaatttgaaaatggaaagaaagtggagaaaaagcaagagggagtgaattgggcagtaaggaagcctttacataaagcttttgtatttggaaagacaagtttgcaatggataaaagtaccaaaaggaaaaatatgtgttgctattagacgaagtttaactcctagtattgacatttataaaataactgatacgggtattcagaaaattttaaaggctcatcttttagcaaaagacaacaattccgaattagctttttcacctgagggaattgacgaattaaataaaaatattttaagttacacaggaggaaaatatcaccaaccaatttacaaagttagaacctttgaaattggcagtaggtttccattgggacaaatcgctaacaaaaaaaacaaatatgttgaaaccgcagacggaactaatctgtttttcgcaatttactggaacactcaaaagcaaatccgaaattttgagaccatcccattgaatattgttatcgaaagactaaaacaaggtttaagtccagttccagaaattaacggcaaaggagatagtttgttattttatttatctccaaatgatttagtgtatgtgccaaccgaagacgaattagcagatagcttaagtattgattttgaaaaatttacaaatgaaaatagaggacgattttataatgtaaatgatttttcctctacttgttattttactcctaattccattgcaaaggcaattgcacccaaagaagtagatcttgagtttgatgaaaataaaaataaacttactggttcttttgataccaaaacagctagtttaaaccaaagacaaatcaaagatgtttgcatcaaactcaatatcgaccgcctcggcaatatttcacctgtaaaaaaaaagcctggtagttcaagtaccacacaacagcatatgcttgcagagccgggacaacgatataaaaagggaagtttaaaaatattctcctcttttgaagcggcagaagaagcgaatgctgaagcaatggccttgctttcgccggagcaacatttgcaaaatgttaccagccgcataatgaccatatatgaagcggaaatgaaaatgccgatgaacaaaaaaattaaattcaggaactgatatgaatgtatttgtaccggaacaccgccagatgctgctggccctgctcaggcataaagtaaattttatgctgattggtggctatgctgttatccattatggttatgaacgtactaccggcgatatggatatctggctgcaattgggcaacgataacaaaaacaggctgctggctgcacttgccgaatttggtattgatgcggcggatattgtacaattgcagcaaatgaacttcgataatgccctgccggttttttttattggcgaaccgccacgccggatagattttgttaccgcagtgaaccgtgtagtatttgatgatgctataaataatgctacgtattttaaactggataacgagcagatacctgtaatacattacaacgacctggtacagtccaaaatttttacaggcagggccaaggatatggcagatgttgaggaactgaagaaaataaataaatataaaaaggaataggctgttctgctttagcggaggaaatacctgtatcgaattttaatcaatcataattgcccatgaaccgcaccgaatttctccagcgcctgattggcatagccggttatggcagctttaaagtgcaggcactggtgcctaagagaaaaatttacctgctgcagttttttgtagcaggctttcggtttcataaaggcatggaattgttgaaccacatgcaggtaaacgatttgctggagttgagaagggagccggataatgaacacgacgattgtgccattgccctatactggcagcaggaaaaaataggctacataccagcagaagaaaacgagatgctggcaaaattattagatgcacaggccctgccgctgctcggtatgataacgcatttaaaccgggaagtaaaaccctgggaaaatgtggtagccgctgtatattttttgcaggatgaaagtgtggagattccaccctatgccgcctatctcaaacaagtggcacagcccatttacagcagcagccaaaaaagcgaaaaggataaactgtatgaggaactgtttgactacagcaaccgtattgtggaccttagcgccattcccattccagccatcaaaaagcattttgaccacttttttgctcacaacccaaaatatgcagtaatgtaccagggcaggcgctacacacatatacctacagatgatatttacacttacatgtacaatgtgaatcccgtacaatggataacagccgataacggcgaggaatacctgctttttgagtttgtagaaagccagtaaaccgctgtcattccgaggaacgaggaatctgccaggcagcaaaaccaaagctgaacatttacagcactatctgtcagaccttcgcttcgctcaggatgacagcatcagtattactgtcattccgtcccgaaagcattcgggagacgaatttaccaggcagcatactaaagctgaatatttataaagccagggagattattcttataatagctgccgtaacagaagcatagtaaaactatcgttatgatcaaacgcaccatctgcatcgaaaatgcctgttacctgaagtaccgcaacgggcagatggtggtgagctacagccatatcaagggcatggagttaatgccggataaatcagtacctgttgaagacctcggtatgctggtgctggagcaccagcaaattaccctgagccattacctgctcgataaactggtaagcaataatgtggctgttatcacctgcaacgaaagccatcatcccagcggtatgctgctgccgctggagtcgcataccctgcaaagcgaacgctttaaagcacagatagccgccagtgaaccgctcaaaaaacaattgtggcagcaaaccgtaaaagcaaaaatatacaaccagtgtgccgtgctaaaaaaatgggacagcaaatggctgctgcttaaaaacctgggcgatggcgttaagagtggtgatgccgataaccacgaggcacaggcggctgtgcattactggcaaaatttatttccgccggcatggatgttttaccgcaagcgggacggtaccccaccaaataatttgctcaactacggctatgccatcatccgtgccggtatggcccgtgctattgccggtgccggcctgttgcccacgctgggtatttttcaccgcaacaggtacaatgcctattgcctggccgatgatatgatggagccttaccggccatttgtggatacacttgttcgctccattgtagataaaacctcggcggtggaagcgcttacgcaggagctaaaagtggagttgctgaaaataccggcaatggatgtatggcttaatggcgaaaaaagtccgctgatggtggcgatgcaacgtacggccgcatcactggccaaatgctataccggtgagagcaggaaactattgctgccggaaatgcctttgtaaaaagtatattctgaaattgtcatactgaggaacgaggaatcagccaacaatgttctgtcaatccgaggaacgaggaatctgttgattagaatattttaatctgagcattagtactacttcccggcagatccttcgctatgctcaggatgacagcagtaggatggaactgtcattccgaggaacgaggaatcttttgagtagtattattaaagctgagcatttgtattgctttcaggcagatccttcgctatgctcaggatgacagcagtaataataaaatacaattagtacaaccaggtatcaacaacaaccatgcatagctactttgtttacatcaccaccaataaaaataaaacggtattatacaccggcataaccaacgatttgcataggcggttattggaacacaaggaaagtgccggggaatttaacagcaaaacttttgcaggaaagtacaatgcctattacctggtgttttatgaaagatttgatgatgtacactacgccatagcaagagagaaagaaattaaaggctggcgtagggaaaagaaagaagccttaatcaaaaccatgaatcctgcatggcgctttttgaacgatgaagtataatgtaggcatagttctaaatcctgtggagggctttgaacctgtagtacagaatctgtcgatggtacctgtcattccgaggaacgaggaatctgttgaatagaatattttaatctgagcatttggaatacttcccggcagatccttcgttcctcaggatgacagcattagagtggtattgtcattccgaggaacgatgaatctgttgaataatattacttaagctgagcatgtgtactacttccgggcagatccttcgctttgctcaggatgacagcattagagtggtattgtcattccgaggaacgaggaatcttttgaatagtaaatcttaagctgagcatgtgtagaacattcaggcagattcttcgcttcgctcaggatgacaaacggaacaaacgtgtacaaccgtcttaatgcatatcgtattatgtgggtactagtattttacgacctgccaaccgaaaccaaaaaggagcggaaggtagccagcgacttccgtaaaaaaattatggccgatggctttgccatgttccagttcagcctctacctgcggcattgcgccagtatggaaaatgcacaggtacatgtgcaacgggtaaaaaagatacttcccgaaaaaggtaaaattggtataatgacgataaccgataagcagtttggcaatatggaaatctatcatggtaaaaaattggccgagccggacaatgtgccacagcagttagagttgttttagccatacaaaaacagcccttcaaaactggttttgaagggctgtgtaagcatttttttgatcctgttttcttcgtaaacgcttcagcaacaacggttttagcttaagctgttgtttccgaagttaataagatctaaagttgaaagcaaatcacaacgccacagttgattaggatttctccgatcttgttgtttccgaagttaataagatctaaagttgaaagcaaatcacaaccttcaggctgattgatgaaggtaacgggccgttgtttccgaagttaataagatctaaagttgaaagcaaatcacaactttgtgtctatgttcccatttatatatgtgttgtttccgaagttaataagatctaaagttgaaagcaaatcacaactttcaaaaggccggaatggcaggagctcgagttgtttccgaagttaataagatctaaagttgaaagcaaatcacaactgattaaggatgcgtttgtttaaccaggctgttgtttccgaagttaataagatctaaagttgaaagcaaatcacaactaatcctgtctacatataagtgtagcggtagttgtttccgaagttaataagatctaaagttgaaagcaaatcacaacaatgccaagtatgacgtttcttcttctttgttgtttccgaagttaataagatctaaagttgaaagcaaatcacaacattctattgagcttttatttgttattgaagttgtttccgaagttaataagatctaaagttgaaagcaaatcacaactgccgaaacaaaggatgaatttattgaacagttgtttccgaagttaataagatctaaagttgaaagcaaatcacaactatcttggtatctcaataaggctttttgaagttgtttccgaagttaataagatctaaagttgaaagcaaatcacaacagcctacccagtgatttgagaaaaggcatcgttgtttccgaagttaataagatctaaagttgaaagcaaatcacaacaaaatacgaacaagaccattacagcaatggttgtttccgaagttaataagatctaaagttgaaagcaaatcacaactaactgtcttaaaaaaagaaaccacacctggttgtttccgaagttaataagatctaaagttgaaagcaaatcacaactttcaatacttttaagtccgttaattggatgttgtttccgaagttaataagatctaaagttgaaagcaaatcacaaccatcacgaaagcatttttttaatcaaatttgttgtttccgaagttaataagatctaaagttgaaagcaaatcacaacaccgcccccgatggtgtcgtttagcaggaggttgtttccgaagttaataagatctaaagttgaaagcaaatcacaacccccgacccagttaatgaatttatggccgagttgtttccgaagttaataagatctaaagttgaaagcaaatcacaacctctgatgtctgtgaatggtacagctcttagttgtttccgaagttaataagatctaaagttgaaagcaaatcacaactgctgtcgcctaacggccgccgaacggtgtgttgtttccgaagttaataagatctaaagttgaaagcaaatcacaaccaacgatatactacgtgaacaatcagagccgttgtttccgaagttaataagatctaaagttgaaagcaaatcacaactctttcgtattgttcttgctcccaactcttgttgtttccgaagttaataagatctaaagttgaaagcaaatcacaacgccgtgctgcaagtggataaatttggcaaagttgtttccgaagttaataagatctaaagttgaaagcaaatcacaacaatagcactcattaccacatataacttcgtgttgtttccgaagttaataagatctaaagttgaaagcaaatcacaacctttgaatctgttgtatttcattccgtaagttgtttccgaagttaataagatctaaagttgaaagcaaatcactgctccattatagcacatagcggtattgtataaacgcagtagcgtaatgtgccgctttccgtacttgtatcacagcgttgatttagttatgctttttgttcagcaacagatgtattaatatctcttgtaagccagccccgcttacctgcagtgataattgcaaagggagttatccaaaaaagtgcaaaagtgtaaaataaattgtacgtaaaaatccatacagaattgcgtttgccgtgtttgatgccgtaatacaccgccggtataattgaaaatacggcaatgctgataatggttgaactcaaaaataaccgggggtatgcaacaatcatcagcagcatagcaatcaggcagggataggctgaaaaaattgtaagcgactggttgaacagtaaaacccttgctccaaacttgttttcctgcctgaattttgtaaacacaaatcttgccatcataatattttccctaacattgcttcgctcccaacgggtaaacatttttcttaatgtcctgtacgtttcaggtatattggtatatacaagggcattgcgctgaaacaaactgttgtagccctgttttaaaatcatattggtcatcgccctgtcttcgccaatatcagtttttacacctaaaaaagtttggttagcccattcttcaaggcaattcaatacagcttcccggcgataggccgaaagtgcacccggagtgcagagcactgttttcattgagctttgtgccgaacggataaagccgaaactaaatgcaaaacttacattgagcattttaggaattattgcttttttttgattgtgtattttaacgtttccggctaccgcaccacagttttggtccattacaaatggagacaccagatttcttaatgtatctgtttcaataaccgaatcgctgtcgatggtaacaaatacctcaccggtagccagcttaaatcctttataaagggcctccctttttcctgcattttgtggctgcctgtaaatgattaaaaaagcacccagcttttcctttgcctgttctatccagtgccaggtatcatctttactgccatcgtctattgcaataagctgaattttgtgcgaagggtaatcgctctttgcaatactcattaaagtatcgtacacaaaccggccctcattatatgccggaacaattaccgtacaatagggcaacgcagcatcgcttaccggctctattgctttgtaccgtaaataatggtataatacgtacagtaaaaaagcaattttgaatacaagcaaaaacatgctgaaataaaaaaatatactgcccaatacggtgttgagcagcatttcccttatttcgagaaactgatattgaaactggtaaaacacaaagcctgcaccaataatcagtaaaaatgtgttgatctgaatgatataatcaacaaaggataaaaactttttcgttttttcgtatgctgtctttttgcctttcataatttcttttattaaaattttatgatgcattacaatgccacctgcactttattataagagtgcagcagtttagcttttcagtttatgatgctattaattaaggcagggttgagtgggtattcactgccttgcaattactgttccaattttttaattgtgggtaattgaatataattttttggggttgaggcaaagctgcaatacattttatgctttagtagtatgggctgtaatccttgctggaacttattttcaggatgtgctgtttgttgtattgaattttgtttttacattctttattttttggctgctggctgtactcaaaaaaatccccggtacacaccggggattttttaatatcaatttttctgtcgtttatttattctttgtaccgtcgccgggagtagtactgtttatgataggctggggcacttctacagccggctttgcaaggtactcctgctccatattttccatatagcgtaaaaactggtaggccctttcggcatcatcgtatacagggcgtagcttacggcttagggtagacgtaaaattatctctctcctgctggtaccgtatttgcatactgcggctaatgccctgctccaattcctgcaccggcatatcgcctaatttggcatagtagcttagttgctgctgcaaatctttttttacactcctgcttactttggcagcaagggtggtatcaccggctttatagcaggcatctaaaaactggatggaaatataattgtgctgctggtaccgggataccatgccgtatgcaaagttttcgtccagcatatttttatcacatttttccagtagttttttagcttcttcttttttgccatagcccgccaggttagctgctgccgtagcgtaggccaggcggatggtattcaggtggcggcggttttcttcatcgaagtacacgccgggtttatcgcagttgccaaaggcaaatttgttcatcatcacatctgctacccttggtcggtttacatcatcattttctaccggcaccaggcgataggtgagcccgtcctgccttacaaaacggtcaaagcccagccctgctctttccgaagtaaagtatatgggccttttccatttattggcagcaataatattcagtatggccgattcatttttttgcagcatgtttttaggaatgtcgatgagtaactggcttaccactacatcatcgggatttaccgtaccgttgctgcgtaccagtaacgtatctaccggtatacttacttttttggtaggataagtgtgtatcgtatagccatcccttgtttgttctaccttatcggggtcgctgctgccggcataatctttcatcatgctgtaaaggtccatcggctggttggggtctatgccgggtttttgtacaaaataaataccatctcttttggcaccttcaatttgttcggcactccatatcgggtctatcgggtcgctttgatttaatttgtaacgcagttgattgatgtaccagtctatacccagcaggctggaattgattacccttatatccctgcgcaccccttctacttcctgcgcataccacagggggtaagtgtcgttatcgccaaatgaaatcacaatggcgttgggggcacagctttccaggtaattcacggcaaggtcacgggccagggttttgttactgcggtcgtggtcgtcccattcctgggccgccattaataccggcacggccagggtgcatacagcggcggatgcgtaacctgcaaggctgctgcttaaaaaacgggatagtaaactctgcacagccagcacaccaagcccaatccagatggcaaaggcatagaaagaacccacaaaagcataatctctttccctgggcatggggccgggcatattcaggtaaataacaatggccaggccggtaaagaaaaacagtaagccggcaattagcgtatcctgccggttgcgcttgtactggaacaaaaagcccagcaggccaaggataaagggcaggccgtaaagtgcattattggctttattgtgtttcatgctatcgggcatatactgctggtcgcccagcatccacttgtctataaagccaatgccggttttccagttgccatcccgtacattattcatttgtacaccttgtatatcattttgcttgcctacaaagttccacataaaataacgcaggtacatccagcctacctggtattgggtaaaaaagcggatgttgtcgcccatagtgggtttatccgaccaggcgccggttttagggtctttactgatgcctgcaaagccggcataataatctgcatggccctgctcattgcctgcatcccacatgcgtggaaacacatgcacatcttcaggattataatgaacatcctgcttgcgtcctttcttttcgtagccattagccgttttgatatacacttcttcggtggtataatccggctggtattcttcgccggccacattgctggcggtaaagtctggccccgtaactaagggtaccacgccatattgctcacggctcaggtagcccacaaggctcaccgggttatctacattgtacatatccacagcagggtcggcattgctacgcatcagcgttgtaaagtaagatgtgtaccccagcagcataaatgctacactccataaggcaaggcgaagaaagttccagttcttttttgccgccgtttttaaaccataccagataagtgcagccaccagtacaaagaaaaaggcaaaccctacaa

SEQ ID NO: 1040 - DNA, 24767 bp, synthetic construct
  source 1..24767: mol_type = other DNA
  misc_feature 1..24767: note = Synthetic
aatagcttctaaaatgacccaggcatctttaccacaagatgtccagttgagactttatgccttttataaacaggctactttgggaactttagatctaaaacaaacctcaaattaccatttaagggatgctttcaaaacaaatgcttggatgcaaattagtcatcttactgcagatgaagcaaaagaacagtatatcgaaatcatcaattctattttgaaaaaataatgttagtcatgaaaaagtttaatttttgtatcccttgtttagtattagtaaccctcttactctcatgcaataacaaaaaactcaccgaagttgtagaggttccgctaccaacggctcaagaaaaaatatccttaggagttccagatgatgtaaaagcaaatgaaggagcttttcaactggaaaaattactttatccatatgatgcattagcaccaaatatttcggctgctacgctagaaatgcattattctaaacattacctgacctatactaataatttgaacaaggcgctagcaggaacagtattggaaaacctaacgattgaggaagtattgtcaaaattagatttgaatgatgctaacattagaaacaatgcaggcggttattacaatcacactttatactggcaatgtatggctcctaaagctggtggactgcctcaagatattttagccgaaactattacaacagattttggttcatttgaaaactttgcgacattattcaaaaatgaagctacaaaacaatttggttccggctgggtatggcttgtggtagataaaaccggaaaacttcaagtgaccagtactcaaaatcaggataatcccttgatgcaaaatgcacttattcccggaactccaatattagctttagatgtttgggaacacgcttattatttggattaccaatacagaagaaaaagttatatagatgccttttttaacgtaatcaattggaaaaaagtaggtgaaaattacgatgcagcgataaaaaaataattttatcgcttttaattcaaaaacaaaaaaatgctgatacgaacttatatcagcatttttttgtttttgaatagtatccatttacaagattaccataaaactaaatgagcttatgtaaactaaaatggctgcttcattttctataattgataaataaacgattctgaaggcgcaatactaatttgggcttttccttcaccattcaaaacctttaaatgaatggaacttttagtatacaattgatcttttatagtataattaccgtctttcaaattccattttttaataatatccgaaggaatttttaactcgaaattactccttgtaagccaagaaaaattagtgactattattaatttttgagtatcggaccaacgggtgaatgcataaattcccgaatcatactttttagttccctgacgattaatggtttgaatttcttgaaattttcccattaaagcagaactattgagagagaaattcagtaatctcttataaaaatcgcgtaagtctttctcgctttgagttagttgaccaccgtcaaattttcctccgttcatccatcgctgatgatttggaactccaacataatcaaaaattgaagttctggaatgggtcccaaaacctccattttcatttcctgcctcacccacttcctgaccaaaataaatcattgtaggcgaagtgctaatagtggttgaaactaccattaatggtttccctttttgagcagttcctgcaaattcaggacttgccaaacgttgttcatcatgattgtccagaaaatgcaacatatgatgctcaatatctgtcattccgttttttatgtttgataatccgtcaggcaacgattttccacgaatgatatctttcaatttatcatacgtttctaccttatcatataaataatccattttaccaagatgaatataatttctatattcttttggattatacacttcggctaataaaaaagcattcggattatttatttttattgccgaattcatatagctccaaaattcatacggcaccatttcggccatatcatatcgaaatccatcaacccctttggcagtccaatacaaggctatatctttgaattttttccaagaatccggaacctcttttcctttccaaaaatcgaaatgttcttgatatgattttgtatcaaaaccaacgggaagttctggaaaatccttggaaccatcaggacgaattccgtaatttacttttaccgtttcataccaatcattacggtcgggctttgccatacgagaaccgttaccagtccattttgcaggactttcttcgaattttccatcaactaatggattcttttctccatttaatggtttatccgtatctggtacttcaaagtgagtatttggaatataatagaagttattatctcttttatattcaacagaaacatcatcatcagctccaaaatctttaactccttccggattattttttccttcgtatttacgtgcaatatgattgggaacaatatctataatgacctttaatcctgctttatgcgttcgagcaattaaagcatcaaattcttgcagacgattggctggatttacagctaaatcagggtttacattgtaataatcttttactgcataaggagaaccagctcttcctttgactacatcaggatcatcattagaaattccaattgcggtgtaatcccgtatcagagcatgatgcggaactccggtgtaccaaatataagtaactcctaaatcctttatctcctgtaatgccgtatccgtaaaatcgttaaacttccctactccattttcctcaatggttccccaaggtctattattggtatttttatttccgaataatcgggtaaaaacctgatatacaacttcttttttatttgagactgactctttctgttctgtgttcatttttaaatctttcgttttacaagccgttgccaaaagcactaagctaatccctgcaacaatagttgttgtttttatcatataaaatattctgctgattttaatacttttttcgacatcctaaatcaatttttaaatttaatatattttagattaaagaagccaatatcagttaaaattaaaatggatgcgttttttaaaacgcatactacaacgaaagagtaacgctatttgttgataactttaaaaacaatacaaaatggatttctatgtcattttatggaattataaataaatcctaatatagattatggttgtttcctttttcataaatttgacaaaaattaaatccattgaagaaaccgctatttttcattcgttgttgcttgctattgctttgtactaatttgattttggcgcaagcaccaaaaaaaattgttgtagaacattctgattattttgatgttaatcaagttgaaataccagatgctgttttgcttaccggaaacgtacgtgtgaatcatgacggagtagttttaacatgtaataaagcctattactttcaaaaggaaaattacattaaggcttttggaaatgtacaattagttcaaggagatactttatttttaaacagtaaatatgccgaatacaatggaaatgtaaaaaaagcatttgctaccggaaatgcagttatgaattctccggatgctactttggctacagacaccatcaactttgacagaaacaaccaggaagtgttttacaattcgccgggaacaatcgtaaataaggataatactttaaaaagcaaatcaggaaaatactatgttgccgaaaaaaaattccaatttcttacggcagttactatcactaatccaacgtacgtaataaaaacaaatcatttggattattttagtaattcggggcattcctatctttttggaccttccacaattaccagtaaagctaattatatttatactgaaaaaggtttttatgataccaaaaaaaatcttgcccattttctcaataaatcctatataagatatgatgatcgggttataaagggcgatagtttgtattatgaccgaaacagggaatttgcatcggcaacacgaaatgtcaaaataacggattctatcaatcgcggaattgttaaaggaaattatgccgaaatatataaaaaacaagattctatgtttgtaaccaaaagagctgttgctgtaaactttgtcgaaaatgactcggtttatattcatggcaaaaaattaatggttaccggtaaagaagggaatcgtattattcgggcgttcaacaatgttcgattttataaaacagacatgagtggcaaatgtgattcgattcattcgagttcaaaaacagccttaacaaaactgataggaaatccgatactttggaatggcgaaaaccaaattacaggcgacgttatgcaccttattggaaataacaacacccaagaactcgattcgctcaaagtcctcaataatactttcctggtctcgaaagatacgctgggaacgggctataatcaagtgaaaggacaaaacctctatggtaagtttatagaaggaaaattgcacgaggtagatattgtaaaaaatgcggaggtcatctattacatgcgaaacgatgctaaagaactcattggaatcaacaaaaatgtgagcagtaaaatcaatatcatttttgataaaaatgcgatagaaaccatcaccttttttaagcaagtggatggtgatatttatcctgaaaaagatttacctgaaaatgcacgaaaacttcgaggtttagtctggcgtggcgatgaaagaataaaatccaaagacgatatttttcctccggaggagaatgaaggcaacgaagaaatagccaaagaaaccaaagctgaagatgataagaaaggtgttccgatgaaaatccgaaaggaaacattgaattatgataagaaaaaaagcaaaaaatagtgttcagatcgcaaattttagcttgcagtgtcttattatcatgaagattaattaaaaataggacacggattatttcggttggtgcagtacacttcgtcgccattagctattccttgcttttttggtacatcaaaaaaaaaattaaccaataattctataaaaagccaagcgaacaatcctcaaacactagttttatcggctaatttagcttctcatcgatttcttttttttctggttatttaatgttctatcttggttagtgaaaccattaaatactttctattatgaaaaaatttacctcctttttcacttactttatacgtgatttcaaacatgaattccccattttattacaaagattgactaatttttaatctatccttagaaaaaaattagtattttaaaacgtagctttttggggtaaaatgattataccccccatccaattaatactaaaccaatcaagtagctttgaaggaaataattacaaattcaaacgtatcaactaaatcaactaactaaaccactatggactaaaagtccatagatttggttggcagactgaaagtctgcaagaatgaaaaatgtaatacttaaacacgaatttcactaattttcacaaattaattcgtggtaatttgtgaaattcgtgtttgattttttttagaagctaaaagcgaaatacactaaagtgcatagttttaaactatgcttgtgaccaataaaagttaatttattctaaattttacaaaccaccccattttagaatcaaaatggggtggttttattgtttaaaagaaatatttttgtagctcaaaattaaactcacaaaaccgtgaataccgatttcctaaaataccaagcacaaacatctccttatccattaggtatggaagtatcgcatgctgtaggttcttatatttacgattccaacaataaaaaatacttggattttgtagccggagtttccgcttgcgcattgggacatcaacatccgagagttaatcaggccatcaaagatcagttagacaaatattcgcacgtaatggtatatggcgaatattcacaaagtcccgccgttcagtattgcaagctattggcctcactcctgcccgcacctttagacaaaacctatttggtgaattcaggaacagaagccattgaaggtgctttaaaactcgccagacgaactaccggaagaagccaactgatttcgtgtcacaatgcctatcacgggaacaccatgggttctatgagcgtcatgggatttgaagaacgcaaacaaatttttcgtccgttgattcccgatgttgatttcattacgttcaacaacgaagaagatttacaaaaaataacgaccaaaactgcaggaattattctggaaaccattcaaggtggtgctgggtttatacaaccgcataacgatttcctccaaaaagtacgtcaacgatgtaccgaagtgggtgctataatgatcttggatgaaattcagcctggcttcgggagaacgggaaaacttttcggattccaaaattatgatgtcgttcctgatattgtggttatgggaaaaggaatgggcggcggcatgcctgtaggtgcttttacggcttcatcagccatgatggatttgttgagtcatgacccaaaactgggacacatcacgacttttgggggtcaccctgtcattgcgtcagcctgtttggcgactttgcaggaaataactgagaccaacctcatggccgaagcaatggagaaagaaaagctattcagaacacttttggtacatcctttgatagaagaaataagaggaaaaggattaatgctggctgcaatgacagaaagtgccgatataacaaacgaagtgattctcaaatgtcaagacaaaggactcattttattctggctgctatttgaaggatgcgcaattagaattacaccgccactaaccatttccaatgaggaaatacgtgaaggctgttccataatgcttgaagtaatgaatgaaattttgaacaagaatatttaaaaatatcgcaattgggagctatttacttcgtcagttcgcttcgctcgtgtcctgctatccgttgcaaatgaaattcactgaactccaataaaaacaagagtattgtgaagtaatctttcctgccctgaacgagtttcaggaacctgaaaacaagttcaggtcaggaaaggatttccactcttatcagggctatggcatcagtattaaaccaaagctatttttgttaattaaattgttcacaacaattctaactttccctcacattacaagcacgattacctaaatttatttaggccaaattaaaaacacacagtatgcaattaagcaacgaagaagaagactataacttatcattgtctaaatttgagtccatgttgaaaaccaacaaagtgctcttttttgactccgaagaatttgaagaaattattcttcattatctcgatatgggtaaggccgctttggcaaaaaaagcgctcaaactggcattggaacaacatccaaaatctaccggactaaaactggtccaagtggaaatgcttgtctatgatgacaaactcgaattagccgaaaagctattgaatgagttgtacgccattgaaccaaccaatgaagaaatttacattcaaaaagctaatatttgttctaaaagagaccaacacgaaaaggcggttgaattactaaacatagcgttacaatataccgatgattatgctgatgtctataatttaatgggcatggaatatctttttatggataatcttgaaatggccaaagaaagctttatcaagtgtttagaagaagatttggaagaccaatcagcgttatataacgtagtgtattgttttgaatttttagatcaaaatcaagaggctataacctatttgaataaatatattgacaaaaacccatacagcgaaatcgcctggcatcaactgggtcgtttgcattatggagttaaagaatatgaaaatgcaattcgcgcctttgattatgctactttaatcgacgatgaattccttggtgctttcatggaaaaagcaaaagcttacgaacgtttaaaaaaatacgcagaagccatagaaagttatagcagaaccatagaattagatgatgcgacttcgtatgctttacttcgaatggggaaatgctatgaaaaattaggaaacaaagttttagcattaaaatatttcaacaaaactgttcatgaagacccccttttagacaagggatggattgccattactgatttttatgtacgccaaaaaaactatcagaaagcattattttatgtcaacaaagcattagcaattgacaatcaaaatcggttgtattggaaacgctttgcaaccattaataaacaaatgaacttctttgaagaagccgaatttggatatagaaaagcagtcgaatttggtgattatcaattagacacttggttattttgggttgatattcttcagtttttgggggaattcgaaagcgctattcaaactttattacaagcatctgaatattttccggaagaaaatgaagttgaataccgtttggctggattgtatttcatgatatcacaaaacaccaaagcaaaattccatttgagcaatgccatgcgattgaattttgacaattatattcttattgaagacttattcccagtggtttgggcaaaaaaaatggttcagaattatattgcaaaacataaaaaattataatggttgatacagttaaaaaacgctttggattattaggacgcaacattaattattctttttcgaaaggatattttaccgataaattcaataatgaaaacttcacaggttgtacctatgaaaatttcgatattcaagaaataactgcttttccagagataattaaaaatacatcggatttaaaaggattgaatgttaccattccgtacaaggaaacggtaattccatttctggataaattatcaaaaaaagcggagcaaataggggctgtaaataccattaaaattaccaaaaaaggaaaattaaaagggtacaatacagactattatggtttcaagaaatcattacaacccttattgcagccacaccataaaaaagccttgattttaggcacaggaggcgcttctaaaggggttgcttttgcgttggatgaactggacattccttacacttttgtttccagagaagccaaagaaaatgctatcgattatgaccgaatcaacgcgacaacattcgataattaccaaatcataattaactccactccggtaggaacaagtcctaatgtggatgcatttccattaatcccgtatgagtttttcaccgataagcatattgcttatgatttgatttataatcctgccgaaacgcaattccttaaaaaagccgcagcacaaggagcccaaataaaaaacggactggatatgcttatttttcaagcagagaaagcctggaagatttggaataaatagttaagaagtttatttcttgtcaaatcgagcgcagtctcattacgattaaacagtcttgaccgtcacatcgagtaattttaaacattaatgtgagagctttaatgtttaaaattgtatcgagaggccttaattgtcaaaagattctcgatacttcgtagaaattttctatcgcaaatttctactcaactcgaactgacgaatccctaacttaatgacaataaaatcgagcgcaatcgagatttttgttttataagtataatttgtcgcaatcagttttaactggtacttaaaaaccttatcgctaattaattttctaaattagcattgaaatttttagaaatcgtcttgttttaaaattagcataatgctgttttaaaacaagacgattttttatataaaaaaagcgacaaccgtaaggatgccgctttgaatgttttcacaacggaataatccttattgtgaattgcttcaaaattgtactgcaagtatacaacaaaagttttactattcgattgaggtttcccgtaaaaatagtaatttttttattgttaaatttagagcttaattttagataacgagaaaaatcattataaaaatgaaaaaaatattaggattggatttagggacgaatagtattgggtgggcattgatacatccagaatttaaagataaaaagggagaaatacttggaatgggaagtcgaattattccaatgactcaagatagaaaagatgaatttggaaaaggaaactccatttctcaaactgctgatagaactggatttagaggaactcgaagacttcgagaacgttatttactaagaagagaacggcttcatcgaattttgaatgtattgggatttcttcctgagcattatgcaaatcaaatagattttaaaaagcgtttaggaaaattttcagaagaaaaagaaccgaaaattgcctataaagaagtttggaatcaagaaacagaaaaaaaagaatttaactttgtttttaaagattctttcgaagaaatgttgagagatttcagagaagatcagccacaacttttagaaaatagtaaaaaaattcctttcgactggacaatctactacttacgcaaaaaagctttaactcaaaaaatatctaaagaagaactggcgtggattattttaaattttaatcaaaaacgtggttattatcaattacgtggtgaggaagatgaatattctaccaatgtgaatgaatttgttatacagttaaaaattgttcaaattgacaaaggagatagagataaaaaaaatgataaaaaatattggtttaatatgactttagaaaacggttgggtatattcagctacatttagtactgaaccgcaatggctaaatactgaaaaagagtttttaataattgaagagattgatgatgaaggaaatatcaaaatagtaaaagacaaaagaaaagatgttgatggaagagaaaaaagaagaatcactcctttaccaacttttgaagaaattgacttaatgagtaaaaaagaccaagataaaatctacaaaaaaatcaaagccaaaacagaaattacgattactaatagcggtaaaaccgtaggaacatatatttacaatacgctacttaaaaagcccaatcaaaaaatcaacggaaaattaattagaaccattgaacgcaaattttataaagaggagttaaaaactattttagaatatcaattaaaagaacatccagaacttcaaaatacagatttatttagtgattgtataagagaattatatcgtaacaatgaggctcatcaaaccacattgagtaaaaaagattttgtgcatttgtttctgaatgacatcattttttatcagcgtccacttaaaagccaaaaatcatcaatcggaaattgctctttagaatacaggaaatttaaagatgctgatggaaatgaaaaaacagaatacttgaaagtaatatcaaaatccaatcctatatatcaggagtttagaatttggcaatggttgtacaatctaaagatatacagaaaagaagatgatactgatgtcacagagcaattcataaaatctaccaaagatttagaaaacttatttgagtttttgatgactcaaaaagaagttaatcataaagacattttaaattacttcatatctataataatgaaggaaaaatttccaaatgcaaagcctaaaattttaaaagacgaaattgaaaaagagatagctaaatatcgttggaattatgtttttgacgattcaaaagaaaaagaagatgaaaaatctaaaagatatccgtgcaacgaaactggttatgaaataagacgaagattagcaaaagttgaaaatattcctgatggtttcctaacttcagaaattgaacaacaactttggcatattatctattctgtaacggatataaagcaatatgaaactaccattgaaaattttataaacagatataatgagaaacatcaaaaaaacatcaatgaagaaggatttaaaaaagaatttataaaattcccacctttcaaaagtgaatacggttcattttcagaaaaagctatcaaaaagttattaccattactgcgtttaggaaaatattggagttggaatactattgatgtaaaaacaaaagaaagaataacaaaaattattacaggtgaatacgatgaaaaactcaaaactcgtgtccgtgaaaaagctattcatctaacaacagaaaacgattttcaaggattacaattatggttggctcaatatgtcatttacgaccgacattcagaggcaagtattgctggtaagtggaattctgtagctgatttagaaaactatttagaaggatttaagcaacattcacttcgtaatcctattgtagaacaagtgataacagaaacccttcgtgtagttaaagatatttggaataagtatggtaacggagctaaagatttctttgatgaaattcatatagaattaggtcgtgaaatgaaaaatacagctgatgatagaaaacgattaactaatatggtttctgacaatgaagctactaatttgagaattaaatcattattgattgaactaaaagataattctgatggtaaattacaagtagaagaagttcgccctttttcaccaccacaacaagaaattttaaaaatttatgaagatggagttttaaattctaatgtagaaatacctgaagatattttaaaaattagtaaaacagcacaaccaagtaaatcagaattacagcgttacaaactatggttggagcaaaaatatcgttcgccatatactggtcaacttattccgatgagtaaattatttactcacgaatatgaaattgaacacataattccacagagccgtttttttgacgatagttttagtaataaagtaatctgtgaatctgccgtaaacaagttaaaagacaaacaacttggattggaatttataaaaaatcatcaaggaaccattctagaaacgggatttggtaaaaacattgaaattttctctgaagaaacatacaaagaatttattaaagaacattatggtaaaaatcgttcaaagaaaaacaaattattattagaagaaattccggacaaaatggttgaacgacaattaaatgacacgagatacattagtaaatttatttcaaatgtgttatccaatattgtacgtgcagacaataatgatgacggagtgaattctaaaaacattttacctggaaatggaaaaatcacatctgatttaaaacaagattggggactaaatgatgtttggaacgagttgattttaccacgttttgaacgaatgaatcaattaacaaatagcaagacatttacaacttggaataaaaatcatcaaaaatttcttccaacgattcctttagaattttcaaaaggatttcaaaagaaacgtattgaccaccgccaccacgctatggatgctttggtaattgcttgtgcaacgagggatcatatcaattttatgaataatgaatacgcaacaagaaagggcaagtctaaagaagaaaaacaaaatattagatatgatttaaggtctaacctttgttttaaaaaatacaatgagggttctgacaaaaattataaatggatttttaacaaaccttgggataattttacaaaagacaccaaagatgaattggataaaattgtaattagcttcaagcaaaatctccgtgttattaacaaaaccacgaacaaatatgaaagctataaagatgaaaatagtaatttaagaatcggaaaagacggaaaacctaaaaaagattttgttacacaaactaaaggtgatagttgggcgattcgtaaaccaatacataaagataccgtttcaggtctagtgtcattgagaaagaaaaaagaagtttcattaagtgttgctttagataattataatgagattgtagataaagatttaagaaaagaaattttgtcattagtaaaactaaaatacgataagaaactattggtaaaattcttcaaagactcacaaaacaaatggaataacaaagatatttcaagaattgaaacctattattgggaaaatgacaatgttgcttcacgagtaagtttagacacttcattcaatgaaaaacgaattgttgaaactataacagatacagggattcagaagatcctattagcccatttaaaaaaccataaaaatagatttgacgaaaaaggaaaagaaatcgctcccgaaacattagcctttactcctgaaggaattgatgaaatgaataaaaatatagtggaattaaataacggaaaatctcatcaaccaatcttaaaagtaagaacttacgaaccaaaagggaataagtttaaagtaggtcaaacaggaaataaaaaagacaaatttgttgaagctgcaaaaggaactaatttattcttcgccatctaccaagatgaaaatggtaaaaaaagttatgaaactattcctttaaatattattattgaacgtcaaaaacaaggattggattcagttccagaaactaatgacaaaggaaactccttgttattttatctttctcctaatgatttagtttatgtgccaacagaagatgaaaaagaaaacataaatcgaattgactttgaaaatttgaataaggaacagtttaaaagaatttacaaagtcgagaaaacatcaggagttgagtgttattttattagacaagatatagcttatttgataaaacaatatgatgccaagactaaaattggagaattagaaagccaaaacaaactgcaaactactatgtctaatgacagattgaaaatatcagaatcttgtattaaactaaaaataaatagactcggaagtatttcaaaagcttaattcaatgataaaacgcacccttttctatggaaaccccgcttatttgagtaccaaaaacgagcaaattgtaatctcatatcctgactctaaattcaataggattgggctttagcccattcgaaaaaataaggataaataaaaaaggctttagccaaaaacatttcggctaaagcctaattagagataaattttatatcccctccatttgaaaatggaggcaattcataaaatggagacaattgataaaacagataaaattcaaaaattataagcaatttaaacaataaattatgccttatatcaaaacctatatacattttgtttggagtacaaaaaatagaattccatttttgaacagtagagaattaagacaaaaagtttggcaacatatcaaagaaaatgccaaagagaaaggaatttttgttgattttgttaatggacattcagatcattgtcattgtttggtttctttaggagctgatcaaagtattcaaaaaataatgcaactcataaaaggggaatcttcgttttggattaacaaaaacaaattgtgtttagaaaaatttgaatggcaagatgaatattttgcagtttctgtttcggaatctatgcttgataaagttagaaattacattagaaaccaagaagaacatcatagcaaacaaacatttcaagaagaatacaacgaatttattgctaaatataaatttcaaaaagaatagaatttggctaaagccatttacattattatcattttttcccctccagctaaagctggaggcaattcaaaagctggaggcaattcaaaagctggaggcaattcaaaagctggaggattcaatagaatcgggctttagtacattcaataatagaataattccaaaatcaataggattgggctttagcccattcaacaaaaaaattgagtttaaaaggctttagccaaaaaaatttgttaagcattttttaaagaaattgatcataaatttgtaaatccaaaaaaaatgataaaacgcacccttttcttcggtaatcccgcttatttgagtactaaaaacgagcaaattgtaatctcttatcccagcccctcgccaaccctccccgaaggagagggagcaaaaaaacaagagaccaaaaccgtggctattgaagatattggtgttatcgttctggaaaaccaacaaatcacaattactaatggtttgctagaaaaactaattcataacaatgtagcattaatcaattgcgaccaataccatttacctattggtttgttgatgcctttgaacggtcatacagaacaatctgaacggttcaaaaaccaaattaatgcatctgccccactcaaaaagaatttgtggcaacaaaccattagttccaaaattatgaatcaagcgggaatattgaaagaaaaaggaatcccaatgcgtaaaatggaactttgggcaaaagaagtcacatcaggagacgcactcaatcacgaatcaagagcggcagtatattattggcagaacctcattcaaatagaaaattttactcggggacaaaaaggaattccacccaataatttgttgaattatggctacgccattctacgggctattacggcacgagctattgttagttcggggatgctgcccactttaggtatatttcatcgtaacaaatataatgcgtattgtcttgccgatgatattatggagccgtatcgcccgtatgtcgatttaatagtatgccacatcatggaaaccgaagatacttttgaagaattgaccattgacatcaaaaaacaattattgagtattgccagtatagatgtttttattgacggaaaaaatagtccgttgatggttgccatgagtagaacaacacattccttacacgaatgttttgagggaacgacaaggaaaattttataccctgtttatgtatgatgaacattacacccgtttaaaccaatatagaagtttgtggatattagtattttttgatctgcccaccgaaacacgcaaagagcgcaaaatagccagtacatttcgtaagaaattattagacgatggcttttccatgtttcaattttcgatctatatgcgcttttgtgcaagtagagaaaatgccgaagtacacaccaaaagaataaaaaacaacttacccgaacacggcaaaattggagtcatgcaaataaccgataaacaatttgggatgatggaacttttttatggaaaaaaattggtagaaacagacaaaccttcacaacaattagaattattttagtcttacaggattagaaaaaagactaacgtcctctattacaacatataaacatctccttttttcgatttcaaaataagctcataactaccaacatatcaaacgattgaatcgcggtatgttgggaattataagctaaaatacaattttgaaagcaattcacaacgtcagaatggtagcaatcaaaatacctttggttgggaattataagctaaaatacaattttgaaagcaattcacaacaagtatgttcgtttgaatcaacaaaaaatagttgggaattataagctaaaatacaattttgaaagcaattcacaacgacaatctgacataaatataacttttgcaagttgggaattataagctaaaatacaattttgaaagcaattcacaacgagccatccctgcaaaagcttgtccagaatgttgggaattataagctaaaatacaattttgaaagcaattcacaacaaacttctaacagttcgcttggattttctagttgggaattataagctaaaatacaattttgaaagcaattcacaacgtgttgtccttgaataatacaattttacctgttgggaattataagctaaaatacaattttgaaagcaattcacaacaacattctgaattttacgaacttgaatttgttgggaattataagctaaaatacaattttgaaagcaattcacaacgtaagtccatttaaaacctgccctccctgcgttgggaattataagctaaaatacaattttgaaagcaattcacaacataatattcttaatttttctttgaatgatagttgggaattataagctaaaatacaattttgaaagcaattcacaacgaaaaggctttgtttcctgcttttgccattgttgggaattataagctaaaatacaattttgaaagcaattcacaaccctcgccttttatcattgatatgtttccaggttgggaattataagctaaaatacaattttgaaagcaattcacaacccagtggtgaacaaatgtccgttaaagtctgttgggaattataagctaaaatacaattttgaaagcaattcacaactgatcttatagaactaagcacgtccttagagttgggaattataagctaaaatacaattttgaaagcaattcacaacaaaatataagcaacacggagcctgaaacgggttgggaattataagctaaaatacaattttgaaagcaattcacaacgttctgaaagcataaatgtaatatccggtagttgggaattataagctaaaatacaattttgaaagcaattcacaacgcgcagagtctgcttctgggaaatactttagttgggaattataagctaaaatacaattttgaaagcaattcacaactttcgtaacgtaaatacgttattgcggtatgttgggaattataagctaaaatacaattttgaaagcaattcacaacgttgtgatcttttaccgtgttctggcggacgttgggaattataagctaaaatacaattttgaaagcaattcacaactgtttgttggattcacctctaaatcactttgttgggaattataagctaaaatacaattttgaaagcaattcacaactattggctaatagttcacaatcttctcttggttgggaattataagctaaaatacaattttgaaagcaattcacaacttcaataccacaacccctttcttaccattagttgggaattataagctaaaatacaattttgaaagcaattcacaacatcaacacaacaggcaaaccagatatatttgttgggaattataagctaaaatacaattttgaaagcaattcacaacttgtttattgtccattatctcattgcaagagttgggaattataagctaaaatacaattttgaaagcaattcacaacccgtttcagtggatgattgacaatgacaatgttgggaattataagctaaaatacaattttgaaagcaattcacaactcgttagtggttgtttctttcatttttgatgttgggaattataagctaaaatacaattttgaaagcaattcacaactataacacgtttcttttgtttgagaatttcgttgggaattataagctaaaatacaattcgtattataaacaacaaacgtctaatttaaatcccaaaaccctagccctgattacttcactaaacatttgttttcatagaagttcagtgaatttcatttgcagtggcatccttttttattcgccttttcggcgaacaaaaaagatacagcgaatagcaggaaattgcttcaaaaaaaacttttttttaacataaaacgactataaataaaggatttattttgtaatttcatgctcctttactatctttcgtgttcgataaaaaaatagaaaccttacacattgaaaaaatgttagaagaaaagaatgataacctgctggaagcagatggaaatttagaaaacaattccgttgaatcaagtcaatccaacactgaagttttggaaaaaacagcattgtctgagcctattgatgtgcctgcagaagaaaatgttgttatcccttctaatgaagaattgccagaaactgcacctattgcagaaactgaaaatcaaactgcactcgatgcaattgccgaaacaaatgccgccgaaagtgaagatgaaacgctaaaagagcgtcacgacattccgatgcaggattatgacacactgtctcttgaaacactggtagaggaactgaagagtttagtttccagtgaaaaagtgatgtctgtaaaagatcatattgaagaaattaaaaaagcattcttagccaaatacaatcatcttattgaagagaaaaaagaagaatttcttgcagaaaatcaagatccaaatgaagaatttcaatatcactctccattaaaaacacaatttgacaaatattactctctttttagagatactaaaaatacacatttcaaaagcttacaaacgaatctaaaaaccaatttagaaaatcgattggtgattgttgaggaactaaaagagttaatcaatccgcaggaaaacatcaaggacaccttaaaacattttaatgatttaagagagcgatggaaaaatgcaggaccaattcctaaagacaaatacaatcacgtttggaataatttccattttcatgtagaaaatttctatgactatttgcatcttgacagagaagcaagagacttggatttcaaacataatttagagcaaaaacaaaaaattgtcgcacgtgttgaagaattggtaaaagaagccgatgtcaacaaagcgttcagagaattacaagatttacatagaatctggaaagaagacattgggcctgtttctagagaacatcgtgatgccatttggaacaagtttagtgatttgaccaaacaaatgcatgataaacgcgaagttttattcgaaaatcaaagaggaacggaacttgaaaatttagaaaagaaaaaagaaattatttctaaaattgaagttttagcaactgagaaagtgaatgctcattcgcaatggctgactcaaatagaaaaagtagaagcgttacgtactgctttcttctctgccggaaaagtaccatcggatgtaaatgaggaaacttgggctagtttcaaaactgctgtcagaaattttaattctttcaaaaattcgttttacaaagacattaagaaagatcaaaacgacaacttatgcaaaaaaacggcccttgttgcaaaagccaaagaattacaggaaagtactgattttgctgcgactactcccatcatgaaacaaattcaggatgagtggaaacagattggacatgtgcctagaaaatactcagataaaatctggaaagagtttaaagatgcctgtaatcattattttgacaaattaaaagagcaaaaaaatgaagaaaacagtgaagaagtagaagcttttgacaataaaaaaacctacttagaaacgttgagagaataccaattgactggtgatcacaagacagatctcgatgctataaaattacacatcgaaacctggaaaaactttggaaaagttcctttcccaagaagacatattgaaggaaaattcaataaaattctggatgctctttttgaaaaattgagtttgagtaaaaaagacactgatatgatacgttttgccaatagaatggacaatttatcagaaagtaatgatactcgcaaactggataacgagaagatattcttaatgcgtaaaattgatgaagtgcagaatgaaattttccaattagaaaataacattcagttttttaccaacaccagaaatgcaaaaaaagaaaattccattgtattagaagttcgtaaaaacatcgctatccataaagaaagccttgatgtttggaaagaaaaactaaaacaattgagaaatttgaaaatagaataattttcaacaatagttaaaaattagaaacctcgttcttaaatagttcgaggtttttttatgaaaataaagtaacgatatgataattatcattttaaatatttagccgtaatgttacttttggttattgctaaatgactttaccatgaaaaattccttaattcaaaagtacaatgttccagggcccagatacaccagttatccaacagttccatattgggatgaaactgatttttcggataaaatttggaccgaaacgctgaaaaaattatttgcagcaagtaatagttcagaggggatcagtctttatattcatttgcctttttgcgaaagcttatgcactttttgtggctgtaacaagcgtatcacaaaaaatcatgccgttgaaaatccttatattgatgcagttttgaaagaatggactttctattgtaaaatccttggtgaaaaaccaaccatcaaagaaattcatttaggcggcgggaccccaacatttttctctcctaaaaatttagaggatttaataaacggtattttttcccatgccaataaagccaaagactatgaatttagttttgaaggccaccctaacaatacctcacacgaacatttgcaaaagctctacgatttaggttttagaagagtgagttttggcgttcaggactattcagaaaaagttcaaaaagcaattcatagagagcagccttttcacaatgtcgcaaaagttactttttgggcaagagaaattggttatacttcgattggtcacgatattatttttggattgccgtttcaggaaattgaagatgttattgataccattgagaaaacaaaatcattacagcccgaccgattggcattttatagttacgcccatgttccttggattaaagggaatggacaacgcggatttaatgatgaagatattccaaaggatgagaaaaagcgaatattgtatgaaacaggtaaaaaattattgtatgaaaacgggtatcgcgaaataggaatggatcattttgcattaaaaacagacagtttgtatgacgcttttcaaaatggtaaattgcatcgtaattttatgggctacagttcctcaaaaacacaattaatgattggtttaggtgtttcttccatcagtgacagttggtatagctttgctcaaaatgtaaaaaacttggaagattattatcaagtattagaatggaataaattaccggttttcagagggcatttattgacgaatgaagacctcatcatcagaaaacacattctgaatttaatgtgccaatttgaaacttcctggaaaaacaaagagggttatttcaatgaaattccagacgttatacttcagttgaaagaaatggaaaacgatggattagtaatccttaaagactataacattgaggttacagaaaaagggaaaccttatgttcgtaatatttgtatggcattcgatttacgtttgaaaagaaaagcaccggaaaccgaattgttttcgatgacaatctaataatccctaatcttacaaaataaaaaagcacgctgaatagcgtgctttttatatactaaactatgaaaaaattagtgacaattcgggtcggcttgaataaacaaactcatattagatggagaaatgtaaggaattcccaatcccaatcctcttaaaataaataaacaaccaatgcataccgccacataaggaatcgctttttggattcggtttcgaataggcaccgttaaaaacgaatttatatacacgacgctgctcatcaaaggaacggttcctaatccgaataaaatcatatacagaacccccagactttcactttgcatggcaatggcaccaaacaaggcgacataaaccattccgcaaggtaaaaaaccgttgagtaaaccaatagtgaataatgatttgtaactcttgtttttaaactgacttcctaatgctgtttttattttagatatcaattcaaaaacaggttttgaaaaattatatttagcaaaaagtttattcggagttaaaactacaataatcatggctacgccaatgaatatggataatttctgttgtaaaccagccataaaaaatccttttccaaccagcccaaaaacaaatccaatggtggcatacgccgttaatcttcctaaatgataggtaataatttgggtgacttttttagtctggttatttctatcaacgggtaacatcatagcaataggaccacacataccaatgcagtgaaaactacttattaaaccgaaaataaaggcagtgtaaagcatttttttagtctaatgtcataaagtcaaaagtcttaaagtcaaacgatggactttatgacttttgactttatgactaattgatatatatcgtttctttggacaaataggattttccctcatattgccattccatattaatgtcccaacgaccgcctgccaaactttttttaggaatgagcaaagtaggattagacaacgaaattggaatttcaaaatctaattttttgttagacggtctgtaaagggacacttttcctttaatgtttttcggaatgaatacatctggaaatacaattagaattccctctgaagtagtcgttatttttggcttttgagccaaattttgtacgttttgaatccgtcccatttcatctccaaaatgagcatcatgcttgtaatattcttctacaaccagctcattatcatattttgaatcggattgaactgtaaaaacaaaatacaaaatgaaggtcataaacaaaccaaaagcaataacgattcctgttccccaattaatccccctggcccccgaagggggaactgctgttagagtatttaaatcttttatattattattttccatgttttgtacaaattaaaattctattcccattttcctttcctattagagttcccccatcatgggttaggagatttaatcaaaacttcgagggcttaaaaaacttgttgtgctggtttcaatttttttatccccattataaacctcgattttcaattttgttttatcgctgtccaatacattttgattgatttcaacaaacagtgttcctccattcatcccttgtttcggtacttttaaagcttgtttaccaactacttttaaagctccttttatacccactaatttgaaattaatatcattaaaatcagtattggttttattgataattttaaaagtataaacattactgatattatcccctttgtgttgaaacaattgtcctggcaacctcaaaatactggcttcgacatcggaacgtaaaaacaataatccaattaaaatt

SEQ ID NO: 1041 - DNA, 24746 bp, synthetic construct
  source 1..24746: mol_type = other DNA
  misc_feature 1..24746: note = Synthetic
ccctaacaacattgatttcgttatccctgctaacgacgatgcaacaaaggctatcgatgtaatccttggcgcagtatgcgaggctatcaaagagggtctcgaggagcgcaaagtagagaaagcagacgagagcgctgcagaggagcaggctaacaccgaggctccggcaccgaaagagcgtcgtcagcgtatccgcaaagctgccccgaaagcagaggctgagaaagtagctcaggctgctgctccgaaagaggctgcagaataaattgaaagtttgtttatcggttgatgggtggataagtttatacgtgattaaccctttaaacaggttgaccagtttaactacccattaaccaataaactcattaacccattaacaaaatcagagatttttatggctgtaacattagcagatatcaaaaaactgcgcgatattaccggcgcaggtatgatggacgtaaaaaaggctctcgaagaggcaaacggcgattttgaggttgcgaaggacttgctccgcaaacgtggacaggctatcgcagctaaacgtagcgaccgtgaagcatcggagggttgcgttctcgctaaagtaaaaggtaacttcggcgctatcgttggcgtgaagtgcgagaccgacttcgtggctaagaacgaggacttcgttggcatggttaaactgattctcgatgctgctttggataacaaagtacagagcaaagaggatctggctgctcttaagatcggcaatttcaccgttgctgagatcatcaccgagcgttccggcgttactggtgagaagatggagttggcagactatgcatgcttggaagctcctgtagtagatgcatacaaccaccttggtaacaagctcagctcgctcgttgcagcagaggctggcgcagaccaagagaccgttcacggcatctctatgcaggtagcagctatgagcccgatcgctcttgacgctgatcacgtagctgaggaggttaagaagcatgagctcgaagtagctattgagaagaccaaacaggacgagatcaataaagctatcgagaatgctatccgcaaagcaggtatcaacccggctcacgtagacagcgacgatcacatcgagtctaaccaagctaaaggctggattaccgctgagcaggcacagcaggctcgcgagattaaagctacggttgctaaggaggcagaggctaacctcgctaaccaagctaagaagatcgagatgatcgctcaaggtcgtcttggtaagttcctcaaagagaatactctcgttgagcaggcttatatcatgagcgagtcgaaagagctcgttaaagatgtcctcaaagcaaaaggtgtggttatcagcgacttccgtcgtattacattggctgctgaataattcgctccaattcacgacaaacatcgcagtgcccgcaaggcactgcgtttttttctccaaaatacgctaacagcacttgctcgcggcagaactgtgtctggtcagcatattcgagcatggcgcgcagtttggagatgaatcgttcttgacgctcctcaaagatagcaggcgataggtagatatccgtctgacgctccatcgtcatagtaaggctgcatcccacagaacgaggaatgtacgttattattcctctttgtgccaaagagactaataactcatggtttgagggctcatccgcttcgcggacgtattgtagatcggtgtagataccggtataggaacgcatcagcagatccagtaactcggcttgttcgtgtgaaaggttatattcgcctaactgatgacgaggcactttgatttgcacacgcggctgtgtctcgtgctcctcttcaaaatcaatatatccggcgtgtgtgagaatatgcaaggcggaataagtctgtatgaccggcagatgcatcacttggcaaagctggtctatatgcagcatgaaacgatgccctaaaccgcttccggctcctatttggagaaaatccatggtcttgtgatagaccgattccacaaactctttcggtgggtacgtatctacagcgcgttttttcagtttcgcttgatcttccgcttcgttatacagaagcacggcatatgctgtttgtccatctcgtccggcacgacctgcctcctgataataactctctaaatgcgatggcagatcataatgaatgaccaagcggacatcgggtttgtcaatacccataccaaaagcatttgttgccacgatgatgcgtgtcttgccttccgtccatgcctgttgacgctcattcctttctttggttgtcaatcccgcatgataataatctactgaggtgatatcctcccttcctttcggggaaggatcggagttatgtctctttaaccactgggtgagttcttgggcacgtttacggttgcggacataaacaatagcggaacccggaacgcgtgagagtatatgtgctacttgttcctctttcttatccgttcggcgaacgacatagatgaggttctcgcggtggaatgacttgcggagcacgttcttggacgcaaagcccagttgggcttgtatatcatcgatggtctccggcgtagccgtagcagttagcgctaagacgggaactcccggtagttgctcacggatcgcggcaatatggagataagaaggtcggaaatcgtatccccattgcgatatacaatgcgcctcatcaacagcaatcaaaccaatgggcaagtcagcaagacgttttttaaactcctcactctcaagtctttccggagagcaatagagaaaatggtaaggtccgtagagacagttatccaacgccacacgctgcttgtcccaactcataccggtatagacagccgcggcatgaataccacgcgcttgaaggttcgccacttggtcacgcatgagtgcgataagcggcgtaataacgagacagaggcgtttgtccggattctcatgccctttgacgagagtgggcacctgaaaacagatactcttaccgccaccggtgggcatcagagcgagggtgtctttgccggacagcacagactcaatgatctctgcctgcaacggacggaaatcatcgtaaccgaaatatgtcttcagtgcttcgcgtgctgtcatcgtcttctaaaaaaaatttgcgctgcaaaattactgcttttttatgacatatgcaaaaaaatgcataaaaaaattactgaaattcttgcatatgtcgaaaaatagtagtacctttgcactccgaaaagaaaatgtctaacattctaaaatatataaaactatgatttctaaacgtttagaggacgctattaacgcccaaatcaatgccgaaatgtggtcggcttatttatatctgagtatgtctgcttattgccaagacaaaggctatgccggcatggctaattggtttgctatccagttcaaagaggagcaagaccatgcccagattttctataactacctcatcagccgtggcggacgtgtgctgctcaaggcaatcgatgcagtggagaccgagtgggcttcgcctttagctgcttttgagcagacttacgagcatgagcaacacgttacttcgctcattaacaatctgatgcacattgctgtagaggagaaagactacgctgcacagagccgcctccagtggttcatcgacgagcaggtagaggaggaagagaacgctgtggagattatcaacaaactgaagatgttggacggcaacggttatggtctctatatgcttgatcaggaactcgccgcacgcgtttatgctacgccttcgcctcttgcagctaaagcataagacggatgaagcgatataaagcgatatttctcgattgggatgatacgataggtgattggacgaacgccgagcatttggctttgcgtgatatttacaccacgtatcatcttaatcatttatacgcctcttttgacgattatttagcagcgtacaagccgtataacttggagttgtggggcaagtatgggcgtggagaaatcaccaagagttacctgcattttgagcgtttctaccgtccgctgctgatccaagacgaaccggagctgtgcgggcaacggaaagatgagttggcgcatcggataggggatgagtttctccgcctgacgaatacctatttccgtctcatgcccgatgccgacagggtcgttcggtatcttgcttccaaatatccgctgacgattgtcagcaacggattcaaagaagtgcagtattataagttcgaacattccggtttgtcggactgcctcactcacacgctcgtcagcgatgagataggtatcaacaaaccacaaccggaaatcttccgcattgccttggagcgcaacggtgtgaaggctgacgaagcgatcatgatcggtgacagttacagttccgatatagccggtgctaaagccgcaggcattgatcagatctggttgcatgagggcgagacatccgagactgccaccttcatcgttccgcgattaacagatataatgaatatcctctgaatatgaaaaacaagctatttcttttcctcgcttgctgcctgttgtgcagctgttatcaccgcacggacgctccgcgcggctcttgggcaaaaggagctgacatcagttggctcagtgagatggagcacgactccgttttccatgacgattgtatcgctacgatgcgtgcgatgggtatgaacgccgtgcgtctgcgcgtgtgggtcaatcatacaacgggttggagcaataaaccagatatgttatcgcttgccaaacgtgccgctgagcaggggcagcgtatcatgatcgatattcattactcggatttctttgccgatccaagtcatcagactatccctgccgcttggcaaaaatacgactatccgacgatgttagaggcggtgcgtgaacacacgctggacgtgctctatacgctcaaggaagccggtatcaaacccgaatgggtacaaataggcaacgagacgcccaacggcatgttgtggccgatgggaaaagtgaataaagaagaaggcgagtgggagcactatgccggttttacggcgatgggctatgaggctgccaaggaagcttttccggatatcacggtcatcgtacatgtcgataatgcgtacgagcaacgcgattggttctggacgcagatggcagctcatggtggcaaatgggatatgatcggtctgagccattatccgatgatgagtgcttggaatggtggtaagacttggcaggaaatgaatgagttagcggagacgaacattcgccgtctcatcagtcagtggcattgtccggtgatgattgccgagatcggtatgttcgctaacgacactacttctgcaaccgtcatggcggattttgtgcagcgcgcacaagctatcgactcctgtgcaggtatcttctattgggaacccgaagtgtttggaggttggagaccggcggagtatattccgttaggatggggtagttatgacatgggcgcattcacacaggaaggtcaaccctccgaggtaatgaaaatcctattagaaagccatcaataaaacgcttgattacttaccggaaatcttcgtgatacccacatatgccaagaggatgagattcatcatcagcgcgtagataatagcgggtattgctatcacttcattattgaaaatcaatggactacaagctatcgtaatggcttgagctgcgttctgcatacctatctcgatcactaatgtgcgacgctctttggtactcaaacgggcaatccaagacagaagtgctccgctacttgtgcaggctaagattagaacggtcatcgtcaaacccaacgatgcaaactcattcacgatagtctgcttgtgctggaagaaaaagacggttactaagagtaccaaagccggcatcgcaatccgcttgagcacattgtgtattttctctgccgctttctcgcggaacatatttacgataaaacccacagcaatcggaataaccatcagcacgatgttctgcatcagcaacttgcctatgggcaactgaatactgaaatctggattctgaacgctgtaatctgaattctgaatacttccaaccacccaagccatgatcagcggcaaggtgaatagcgtgatcagactactgaaagccgtcagcgtgaccgacagagctacatcgcctttcgccaacatggagaacacattgcttgaactgcctccggggctacatgctacaagcattattccgatgatgaataaggcggaaagcggaagttcaaaagcagaaagacattggataatcccccatgcaatcagcggtaatagcactatctgtccgaaaagaccgataagaacgggtttgggacgttgcgcgatgagtttaaaatcagcaggtttgagcgtcagtcctaaatcgaacatcagcagcgtcagtatgggtagtacaataaaaatagcattcatattcattttattaaaaacggctacaaaattactgcttttttgtcaaatatccaaataaaatttgcatatctcagttttttgtagtacttttgcacacaaaaaggacgaaagatggatatagtactcttggttttagctttctttatgatgctgatcggtctgattggctgtatagtacccggtttgccgggaacaccgattgcgtatatcggtttgtggatagcacaagcgacggaaaagatccatttctcatggcagttcctcctcatttggggcattgtggtggtgatcatctctgtgctcgattatgtagtaccggcttggggaaccaaacactatggtggtacgaaatggggagtatggggaagtacaataggtgtttttgttggattgttcttcggagcaatgggtgttatttttggtccgctggtaggagccgttatcggcgaactgatcagcggtaaagccctcaacgacgccctcaaagcaggctggggtagtttcgtgggcatcctctttggcacgattctcaaactcatcgcctgcggtctcatgactgttgccctgatacaggctatcaggtaattctctttgttcccgccacatttaacgaaaaaataacattttttttcatatttatttgcatatatcagaaaaatgcagtacctttgcaactgcaaaggttttgacacatggcacaggaagaagtaatccgattatttgactccgcgcagattcgcgtagtatgggatagcgaaacagagaagtactatttctctgtggtggatgttatccaagtattaacagatagtgaaaaccctcaaacttattggagagttctaaaaaagcgcttgaaagatgagggaaatgaaaccgttacaaattgtaacgctttgaaattaaccgcagcagatggtaagaaacgtctcaccgatgtggtcgatacagagcaagttctgcgtctcatccagtctatcccttccaaaaaggcagagccattcaaattatggcttgcgcatgtagggcaagagcgtctaaatcagttgcaagatccggaaaggagcattgaacaagctattcaggattatagacgtcttggctattccgagaactggatcaaccaacgtatcaaaacgattgaaatccgtaaaggtttgacggacgaatggaaacgaagtggggtagaaagcgaaactcagtatgcctcgttaacggatatcatgtatcgcgcgtggtcgggcatgaatacacgcgagtataaggaatttaaaggcctgcggaaagagagtttgcgggataacatgaccaacgtggaactgatgctcaacggtttagcagaagccgctgccacagaaatctcgcaagaacgcaatccattaggttattcggaaaccgcttctattgcgcaagaaggaggagaggtagccgatgcagcacgccaaaacttagagaaacgtcttggacgaagcgtcatctcttcaagacgtgcagtgcattttaccaacccgcaagatgaattgccactccccaagcccaaggatgaattagacgatctgatgagtattgatgagtaaaatgctttatctcattactcctccatattccactatattatattaatccgcatcgcaagagcggattttttttatttatttataaaattcatacatttttcttgcatatatcagaaaaatgtagtacctttgcaaccgaaaaattgttttatcgcaatgacaactttatcacatagcgaaaaagaggctattatgaaagacatgaagtctttcgatgagccgatgccggcagttggtatcttttggtacgatcctcaagagcacgacttttggggcatatacaagaaagaactgacacctaaaatggtagaagaagcaaaagcaaatgggtgagagttcttatccacaagggaacgattattgcttagcaatagacaagtcccctatactccacaaaaaaagatatatgaccgaaaaaacgaaaaatacgttataccgcatagaccggacggccggtcttgtgttgaatatagatgtttataccatcctctttcttgttgtcgtatgtggaatttacaaacttttatcatcctacggtattcatcttaacacctattcggtttggtctgctcttttctttttatatacttatgcagggtacgcgtgtgcacttgtttttgcagcctgtatcctatgccgaatcatactcagtccttttgtaaaaagcgaagaagaggaaatctttgaacagaaaattgagtatgtgctgcaaaataagttgcagaaaccggccgaaccatcgacctattctccgctttgtgacctgacccaagagcaagaagaacaagtccggcaagtcctgcgcgatttaccttctcatccgaacaaaccggattatatcaatttggccgtcatcgcgcagtatctgaccgcgctggagaaaatgggaaaagccaagcttatagacaaacacaatctgcgtctttgggtcgcacaaatcactgacaaaaatgtgccggcatccagccaattcaatgaggctgttcccagtactgctccttccaaagtgagcaaggcacaaaaagagttggagcgtcttcttcaataattcgattttttcgataaaacccatcgaacttttggcatttcccgccgaaagtactacctttgtgcccgaaattttaaattttccgatatttatgaaacagaaatttttatttatggcatttgttgccgctttgatcatcggttgtaaaaaagaagagccggagataaatccgcaagctaagttctcttacacaactgacgaattgaaaatctccttcacaaaccattctactaatgccacatcttacgaatgggattttggcaatggaaaaacatctcagttggtaaatcctactattacatatgagaaggagggcacataccatgtgagtttgaaggcatggaataatggtaaatctcattctaccgaacagtcggtaacggtgtcttacaaaaaaccaacagcacaatttacctataaaattgaacaacctctcaaggttgtattaaccaacacttcttctgatgctacttcttatgagtggaattttggtgatggaacgtcatctactatcaaaaatcccattcatacctataaaaattttggagtgtataagattactctcaccgcaaaaaacggtactaagacagacacctatcaacaaacagtaacaatagaagcccctacggtttgctatttttccgggtttgaggtaacaaaaattccgtctaataacgtgtattaccaaatacaattgaccgatgactacgttctgtctaaaaccacctacgtatggacgaattggttcttgctatcttcggcaaatttgccctatacatatatgttcaactcaccggtacaacttaacatatctaatacatatatcgcaagattgtacaaacgttccagtaaaccgtccggtcaagctgacggtaaaggggattattccgtatctatcacatcagcacaactcaagtcatatcccgagcagcttacatggactactacaaatataggaataaaattctatttcaaatggaaatgatctcaagcacccgtggtaaatacctcgggtgctttttgtttttatacagtttagagcgatttttcttgcatatgtcaaaaaaatgtagtacctttgcagtcgcaaaggttaacaatgagtattctatgaaaaaacacattcttggattagatttaggaaccaacagtattggttgggctgttgttgctgaagaaggtagtcaaaaacgcatttcttgtgcgggtagtcgtattattcccatggatgcaaagataatgggtgattttgaaagcggcaatagtatttcccagacgaaagatcgtacacaagcgcgtggaatacgccgtttgtatgaacgtcatgcattacgtcgtgaacgtcttaaccgagtactgacaattcttggtttcttgccggatcattataccaaagaactgaatcgttatggtcagttaaataaaggagcagaacccaaattagcgtgggatattgttgaggggaaatattcgttcttgttcaaagattcattccttgaaatggtaaatgattttggaaacgtacatccggaattgctggtaaacggacgaaacattgcctatgattggacgatttattatctgcgtaaaaaagcattaactcaacctattaccaaacaggaattggcatggatattacaccaattcaatcaaaaacgcggttataatcaagctcgcggagaggaagaagagcagaaagagaataaacgtcaagaattcataacacaaaaagttatttctgttcgcgataccggcgaaaagtcaaaaggaaaatcggtatatgaagtatgtcttgaaaatggatggatttttaccaaagaaagcaaatatcctttagattgggaaggtaaaactaaaaacttcattgtttcaaccactcttaattccgatggaacagatgcaatagataaagatggtaaaatcagaagaacatttagagcaccggcagatgatgactggggacttttaaaactaaagacccaacacgatattgatgcaagccacaaaactgtcggagaatttatctacgatgctttgctacaaaatccggatcaaaagattatcggtcagttagtacgtgtcgttgaccgtaaatactataaagacgagctaaaacgcatacttgatacgcaaaaacagtttattcccgaattgcggaacggagatttgtataatgagtgtattcatgcgctttatccgcaaaatgaagcttatagaaatagtatagcgggcaaggattttacgtatttgttgctaaatgatataatcttctatcaacgtcctctgaaaagcaaaaagtcattaatcaacgaatgtccgtacgaatatcatgtatataaagacaaagatggtaaatggcaaagacaatacttgaaatgcatctccaaatctcatcctatttatgaagagttccgtttatggcagtttgtggaaaacttacatatctatagagaggctgcaaatggaatcggcaaggaagattgtaccgcagagtatattaataataaatcggaattgatttcttggcttctgacaaagaaagaagtaacagaagattcattactcacacatgtcgcgggaaaacaaaagaaaggtctgtcgtggaattatgtttccgaaaaagggaaaacataccccgcttctcctgtatcttctactataattgctactattaaagaagccggaggagacatcagcaccttggtagatccctttgaaatccgcaaaaataagcatcatagaaaattatcagctaaaaaacaagacgagaaagctaaagagaataatagaattatcaataatttagagcaaatatggcacatgctctattcaatatctgataagtctcaactgctcgctgcgctcaaacattatgctgaaacaaaccatttgtccgatgtgtttgtagagaaattgggtaagatgaagccattttccgactacggagcatatagcgaaaaggctacgcgcaagttgctgaatttaatgcgtagtggagagtattggagcgaagatgcaatagatgcccaaacaaaatctcgcattgagcatattagaaccggagaagtggatgattcagttagtgaacgtgttcgcgagaaattagacacaatgaatgaagtgaaagattttcagggacttccattgtggctcgcggaatatgtagcttacgatgtgcgcaagaatgataccaaatgggagaaaccggaagatatagataagtatctgcaatcattccgtttacattcgctcaataatcctattgtagagcaagtagtcatggaaagcctaagaacggttcgtgatatttggaaacaagaaggacaaattgatgaaatacatatcgaattaggtcgtgatctcaagcaaaatgcagagcaacgcaagaaaaccatgcagcgccagcaagagaatgagaaagcaaatttgcgtgctaaattacttttgcaggaatttatgaatccagagatggatgtggaaggagttcatgcttattctccgagtcagcaagaactattccgtatctatgaagatggggttttatctgctaataaaccggatgatgatacacagcgtattattaatgagttatcgtctctcaaacagccatcgttacaggatattaagaaataccgtttatggcttgatcaaaagtatgtttctccttatactggtgagattattcctttagctaaactctttacaccggcattccaaattgagcacgtcatccctcaatcgcgcttctttgacgattcgatgtccaacaaggttatttgcgaggcagaggtaaatgcgcgtaaagatcgaatgttgggacatgagtttatcgctcaatgtggcggagagaaaattacgctttccggaggaaaagttgtacaagtactttctttgcaagcatatgaagatacaataaaaaagaattttgcaggagatccgcgtaaacaagaaaaactgatgttggatgagattccggagaagtttgtcgctcggcaaatgaatgacagccgctatattagccgactgatgatgcaattactcagcaatattgttcgcgagaaaattagcaatacggaatatgaaccggaaactgttagcaaaaatctgattgtttgcaacggagcaacaaccacacgattgaaaaaagattggggtataaatgatgtgtggaataagattattcttccgcgttttgagagactgaatcggatacaaaacactacagtctttactgccaaaacggcaaacggccatattatcccgaatgtacctttagagctaaaacaaggatttgagaaaaagcgtattgatcatcgtcaccatgctatggatgcgatagttattgcgtttaccacacgaaatcacgtagctctcttgagtaatgaatctgctttagataaagacgaaaaagcacgttatgacctgcaaacattgctgcgcaaacgtgaagtatggagaagcgcagatggaaaagagcactataaatttacagattttatcgctccttatgatggtttccaaaaagatgtgcaagaaacgctgaaaaatatagtggttagcttcaaacagaacttgcgtgttatcaataagagcaataatcgcactgtccgatatgtggacggaaagaaacagatggtacgccaaacgaaaggagacaattggtctatccgtaaatcgcttcataaagcaactgtttttggagaagttaatctacgcaaaaagagatatgttaatttgacctatgcgttgcagcatatagatgatattgctgaaaaagatttgcgcgccaaactgcgggaattattgcaagaaggtaaaaacgaaaagcaaatcaagcaatactttgcctcagagctggatgtttggtcagatgtgaatctaaaacgtattgaagtttactattataccaaggatacaaatgagcattactatgcggtaagaacggctttggatgaatcctttactgaagattacatccgtaataaagtaacttcggaagctatccagaagattcttttggcacatttggagcgttgctataacgatccgaaattagcgttctccccggatggtattgagaaaatgaatgcagacattcaaactctcaataacggagtacctcataaacctatttttaaggtgcgtacatacgagaaagcagaaaaatttgccgttgggcaaattggagcaaagagcaagaaattcgttgaagcagataaaggaaccaaactatttacttttgtatatgagaaaactaatcaagatggtacaaaatcgcgtaaacttattgctctgtctttgttgaatgtgattctaagccagaaacaagaaggcaagcagtggataaaatatatagatgagtcattgcgaagaaatggtgatgttgctaatgatatgcaattctcatttgtgatgtctcctggagatttagtatatgtgccctcgcaaaatgaaatagaaaataaaaactggagttatgatcatagcagaatctacaaagtagtttctttagatggtgagaatcctaattttattcctgcaaatatagcttcgatgattattgatggtacggaatttactcgtcataataaaactagtagagatatagaaggtcgtcttataaaagagatttgtgttcctataaaagttgatcgtttgggtaatattattaagcatgattaagcgtgtactatgttttgagaatcctgcacgcttgagtctcaagttggcgcagatggtggtcgagttgcaagatgtaacccgcacgttgcctatagaagatataggtgtcgtcattctcgatcataagcaaatcacgattactcatgcacttattgatgcgctactggctaaaaatgcctctccggagaagcaagaaaaataatataccctgattggtaagcgaacaatggtggtttcaacaacaagttgtgtatgtcattcaaaaaaagtaaacatatagtccataaacaatgctctgaccttgaccatctcggcgaatgtgttgtgtatgtcattcaaaaaaaataaacatatagtccataaacaatgcctccaaacgcgaacatagcagcagccaagttgtgtatgtcattcaaaaaaagtaaacatatagtccataaacaatgcaagccttccaacaggcaggctccgacgcgttgtgtatgtcattcaaaaaaagtaaacatatagtccataaacaatgaaatgtgcgatatccgtctgccatgggagttgtgtatgtcattcaaaaaaagtaaacatatagtccataaacaatacgggagccaacggcattcattgggatatgttgtgtatgtcattcaaaaaaagtaaacatatagtccataaacaatttttgtaaaatcggatttagcaaaaatagttgtgtatgtcattcaaaaaaagtaaacatatagtccataaacaatagactatttataaattacttaaacacaacaagttaaacattgttttaggattagaaaaagcagcacttgcgagtactgctttttcgctttataagtcactttttgatttctaaaaaagctccaactgttgcacgggttgattgacttgtatctccttgcaacactcgaaaatctgcatatctccgaattgcttatctgttatccgaagtatcccgatcttaccgaatggaggcatccatttcttcacgcgcgcaatatgtacatctgcgttctccgcactcggacaatgccgcagatagatactaaactgaaacatcgtaaagccatccatcaagagtttcttgcgaaatagggcatactccttcctgtctttcttggtatcagtcggaaggtcaaacaaaaccagtacccacataattctatattcactaaaacgggtcataggctgcaaaattacaaaaaaacatgtatttatgcaagaaaaattccaaaatatttgcatatgtcacaaaaaagccgtatctttgcacaacttttttgaatgacatacacaataaggattattccgttgtgaaaacattcagggtgggaggcaactctcgccctaatttttatttacccaccacgggcaaatgatcttttacgtattgtagagaagatttactcttctccaagaatttgcagcatttgtgccggagttaccactcgcggatcaatcggaaaatgcttcaagttaccggtaacaaggaatgagtcttcctctgaaagtgccacttcatagaatacacggtcactttcatcaatgaacaatgtatcaactgacacacgctcaattgcaataccttttttgcggatatggttgaataatgtatttcgctcattttcagtaatgtggaagtgctcgcgcgaaagaacttcttggtattctgccattatttcactattgtatagaggtgtaattttcccagtaacaatgaactcgaccactttagtcgtggcagaatctggtttgcgcgtaaaaagagctgacacaagaacattagtgtcaataacaacgtaaatcataattatgcagtttcaagttgttcttgtttttcacgttcaatgcgttcacgacgttcctgacgtgctttccggatttcttcatcaatttcttccatcgttaaatcaggtctattactgcgatcagttgtatatagcatatccaataaagcctgacttgtcggatccatttttgcgctaatctcaaacggtatagagcgggtacgaacaacggcattgataaacacatttactgccgcatttacactcataccgaattgctcacagagtgcgtcaaattgccgcttaatgttattgtccacacggacggtcattgctgtttgtgccataatttttcctcctatttgatgttaattgatatcaatatgatttcatttcgcctgcaaagatactacaaataatccgaatatgcaagtttttatgcagaaaaatgcaaaaaatttctctttttatctatatacggcaatcaacggacatgcggcaaatagctctaaagccgatgctgtttctgggataagatgttggcgcgcaaagttctttgattgattatcaatcagcacttcgccaagaccctgcatgagcacacgcgaactataactgcgaaccttttccgcacattgctgagcatattcgcttacagagagattagtgcgtattttcacaatctcttcattgatctcagtgcgcttttgcaggaagaaccagacatcatagatgtctcgcggtgtaattcgttcacctaaagcacatagtttgtgcgcaaacatatccggcaaagtcattacgcgaatatcggttccaagcaaggagcgaatctcataatgatttggaaactctcgattactgacttccacttttaacatgcgttctcctttaccgtaattgagtactaaaatcggcccatagaacttaattgcctcgtcatcaatcgtaccgaatttcaaaagcaccttgcgcaactctttatagacatactccgtttgcgaggcatccaataggttgaaatccagatcagtcgagaaacgcgttaaaccgtgaaagagcataagcgacgtaccgcctttgaaggcaagcaacttacttaactcaggatgacgaaagatggcaagtaacacttgcatcatatagtaccgatgtttatttagatccattgagtagcgcctccacacgcttggttaatgtcggtgaattgtacaagggtaatagttgttgcaccttctttttgttcaacggatgcaaattgtcaaaataacattgcccagaactaaggtacatcatgtcgagaaatgcccgttccggagtagcaatggcgatattatctcgctgctcaatgccttgcatatttgtccaaataatcggattgattttgcgaaatgaatatgcgcgcccatccacttcaatagtgcgggtttgataactgatacaagttatttcattgctgtattgaaatgtcactcctgcgcgcgcaagcacatattccatagaaatataggagggcttcaacaaagcacatgccatctcctgctcgttgtatgtcggctttgtgtatatgccatttcggggagagtggagaacgcctgttcgggcatagtaacgcaatgaattgtttaaagactcacgcgttcttgtgctgtccatcatagccaaccactgtgtggtaaatactgttctggaactagataatatggtgttaataatgtccattgtaagctgtaagcgttaattattttcggtttcagcgcacaaaattacaacaaatatttgaaatatgcaagtttttatgcaaaaaaatgcaaataatctctcattttctctacatacgcatacatataacgtcacgtagtgaccattttaactatttaacgtcgaacacgttcgaccattttaaccctttaacgaaaaatcattgatttttccatatttacttgcatatatcaaaaatttattgtatctttgcacccaaaatacaaataccactatgactcatacatttgttgcaagccggatttccggcaatgggaatgccattttccctgacaaactgaccatcgatgatgacaaagtgacctattacaaaggcaaaatcatcggctatgatcaatcggttatcatgcgtgaacgcatcggttctgtcaacatctccatgcatctgcttttcggcgacatcgtcattgaaagcaaaggcagccaaactattcatgcagaaggattcacacgctccgacgctaaacagattttggaattattgtcataaattactactgttgcgttatttctttgtgtcttttgcgaataataaaaatctgcttcatctgtgtaatctgtgaacgatcaagatactaatttttgatccatttggggtaattttggacgaatctcattcaaaaataactttttcttacttttttcgcggaaatgtttgcatatatgcgcaaaatgtagtatctttgcgcaaaattacgaacattaatatatcaagttcctatgaaaagagcactattacctaagcatgagagattgcttcgcgagttgggcgagaactatcgtttagcacgcctcagacgtaatttgtcctccgagcaagtagccgaacgcgcaggtattgcgcgcaatacgcttatcaaaatagaaaacggagatgagggtgttgctatcggttattatttgcgagtgcttattgtgcttggattagaggaggatttgcgttccgttgcccaagatgacattctcggtcgcaaacttcaagacgcagggctaacaatctcaaaacgtgcatctaaagcgaaataactatgcaaaccatttacgtctatttcgatgattttcgtgtagattccccaatgcttatggggtgtctgtttgcacaaccatctcgtggaaaagagatcttctctttcgaatttgacaaggaatggttgaaaacgccatattgtcgtttgttagatcctgatttacaactttttacgggacgacaattccttgctgatacgaaaacgaattttggcatttttaccgattcggctcctgatcgatggggtagagtgttgctcgaacgccgcgagtctatccgatccaaagacgagcaacaacctcgcctgacgctcatggagagcgacttccttttgggtgtaaatgacaccacacgcatgggcgctattcgcctgaaaacgaatatagaaggagcttttctggatgatgacaaacaatataccacgccgcctttcacttctctacgtgaattggaacaggccagttggcatctggagaatgacaacgatccgaacatgcgcaaatggttgcaaatactcctaacaccgggctcttctttgggaggcgcacgaccaaaagcgaacgtgttggatcctaatggctcactttggatagccaaatttccaagtcgcagcgaccgacaggacatcggagcgtgggaagccgttgctatgcagttagcacgggcttgtggcatcaatgtttctgattttgacatcgtccgtttcaaccaacatgctactttcttgacgaagcgttttgaccgtactcaggatggtaagcgcattcatttcacttctgcaatgacaatgcttggctattcagatggtaataccgatggatgttcatatctcgaacttgccgaatggattagtcgcaatagttgtcaggttcaggaggatttagaagaactatggaaacgaatcgttttcaatattgcaatcagtaactgtgacgaccatctccgaaatcatggatttctcctgtctgaaaaaggttggaaactgtcacctgcttatgatctgaatccctcatattttggatccggactaagcctcaatatcgacgaacattctaatgcattagactttggtttggctgccgatgtagccccatattttggattaagcgccactaaatctgcgcaaatcatcacactcgttaaacagcacgtttcctcatggcgcacatgggcaaaacaataccacattcctcgtgaagaccaagaaattatgtcgcaagcctttaagataaattaagcttaaaagtcatcaatcgccgcggaaatgaataccgaactgatacgtatcttatcctccaaacttaaatagaaagaaatgtaagctatgagaaagagaacccatattttttcactggtcttaatggcaatcattatgattgccacattcgtcgttgccaataacaagaacaacacctccaatacgtccaatacgtcagaaacggaaatagacactcaggcaccttacgaaatcccgcgcttaaataatcatcagccggaacaagtgattgagcacttgggctataccgtcagttataatccccaatggcttgtgcccaactgggttgcctatgagttaaccaactccgaaacaattggtgagcaggagcgttcgaatcatttcaaaccggatccgttagtaaagggagatcctgtgacgaccggcgattattccaagtccggctatgatcgcggacacatggctcctgcagcagatatgaaatggtcagaacaggcgatgcgtgagagtttctacatgaccaacatctgcccgcaacttcataatctgaatgccggggattggaaagatctggaggagctggcacgtgactgggcacagacttacgggaacatctatatcgcttgcggacctattgtggaagccaactatcaaacgatcgggaagaatcattctattgcagttccttccgctttctataaggtctttcttcgccgaacaggtaaaggctgggcatctatcggctttattatgccgaacaaagcaggcaaccgaccgttgatgacatatatgcataccgtcgatgaggttgaagaacaaacgggcttggatttcttctttcatctgccggacagcatagaatctcaagtcgaaagcacctattccctttccgattggaccctttcccgcaaataaaaccgataaaaagagagttttatttgcatatatcaaaaaaatgtagtacctttgcaccgaaaatacaaaaaacaatcacattaaatacaacatctatggcaaagtacatctgtgacgtttgcgggtacgaatacgaccccaacgtagaaggcaaagcgtttaacgaactcccggaagattgggtttgtcccatctgtggagtggggaaggaccagttctccgaagcataatctacggcaaagtgaagatcgtggactgtttcgaaggcgtaaagaagtaatcaacgaatacacagaaaaaccacgtagcaaatacgtggttttatcgaccaaaatagcatccaaaagggggtgatttcggagtgatttcagggtgattaccgggtgattagggggatatttgcctacagtcaggcgttgaataaaccatagaactgccaaactggcagaaatacatagaatctattatatatactgcaaaaatcgtgccattttatgtcccaagttgagtttattgctcccgtaaaaaacatgcgtggagaatttcaaaaaggtagcggagtgatcttacgtcaaaagaagtacagagctccaaacggaaaagtcctcaaagaaggcgtgcatgaatcgtataagatcgtgcatcctcgtgattatgatgctaatccgccgcaaggagccgaattggctaatatccagtcatttgcggactccaaacgcatctcttcggagatcatcaattccgagaagttcactaacgaagagctggctgctatgacacccgaacaacgggcacacgtcaaggatttgcgccaacaattggaagatttccgcaaacggttctatgcacagttcaaaaatccggatcccgaagcgccgcttgaaaaaaaaccgcgtcccggttcaatcaagctcttacgcaagcaatacgccaaacttgataacttcatccaagctattatacgcgaacgttccaaacgttccaactgacattttggcatattcattctttggtacaataattgtacatcctttcatagtaagaactatacagaatgtaaacctaatcacgattatgtaaaatagcatatttggagaaagaccctattataagcgtatggaagataataaatatattgaagacgtgcaaatcgtgcaagcccagatcgaggaagcaaagatcgatgaggctcagagcgagcacgcaaaagaaacaaaagtgagcgacgccactatctatgacgtgctgccgattaagaacaccgtgttgtttcccggtgtgctgttgcctattgcggtttccaagaaaaacagcttgaaactgatcaaagctgccaacaaggacaaccgtcgtttaatcttgctgacacagaaagatggcaaagtggcagaccccaaagtaaacgacctgtactcgcttggtgtgatggctcgtgtgctgcagatcatccctgttccggaaatgggcaaagacacgatgatggctatttttgagacgtttcatcgtgtgcaagccgttgattttcaagaagtagaaggtcaactcaaggctcatgccatcgagatggatgaacatatgccgctaaggggcgagaaggctgagtttaaggctacgggagataatattcgcgagacaatcgtgaagattttaagtgagcgggacaatgctcctgcgggtttgcagacatctattcagaacatcaaagacaactcaatgatgatcaattatgtctgctctatctaccacatgccgaccgagcaaaaacaaggtcttttggagattcactcgatgatggagcgagccgaagctctgctgacaattttgcagaaagacttagaggagctgaccatcaaagcggatattcgtcgtcgtacggctgagaagattgaccagcggcaacgtgagtatttcctccagcaagagatggagaccatcaaaaaagaccttggtacgaacgatgacaacgagaagacgatccaagagttgcgtgaacgcgccaagaccaaacaatggtcggaaagtatagctgagcggtttgagaaagaactcaaacgccttgagcatatgcatgttttctcgccggactactctacccaactggattatctgaacacgtttttggagctgccttggggcatctattccgaggataactacgacatgcagcacgccaaagaggtgcttgaccgagaccactatggtttggagaaagtgaaggagcgtattgtcgaatacttggctgtacaacgtcaactggcgcttcgcagcaaaaaagagaaagaatcgcatcctgtgaagtcccctattctctgtctgtttggtcctccgggtgttggtaagacaagtctcggaaagagcgtagcggaagcccttggaaggaagtacgcacgtatctcgttgggcggtttgcacgacgaggcggagatccgcggacaccgcagaacatatataggtgcgctgcccggacgaatcatcgataatatcaaaaaatgcggcacgtcgaacccggttttcgtgctcgatgaggtggataagatcggagcggattataagggagacccgacagccgcgttgctcgaagtgctcgatccggagcagaacagcacattccatgacaactacctcgacgtcgattatgacttgagcaaagtgctgttcatcgctactgccaacagtctggagaccgttccgcgtcctctactcgaccgaatggagctgatcgagatgaccggttacctgcaagaagagaaagaggagattgccaaacggcatttgatcccgaaagagctggcgaaccatggtctgaaagcaagccagctgaagttcaagaaagagatccttgcgcatataatagatgattacacgcgtgagtcgggtgtgcggagtttggagagacagattgcgaccatctgccgtaaggtagataccaaactggcactcggcgaggaatacaacgtgaccgtgacgctggacgatctgcgtagttatctgggtcagaaacggttcagccgcgattcttgggaaaccaataaatatgtgggtgtcgttaccggtctggcttggacacaagtcggcggcgagatcttgttcatcgagacgagcctgagtcagagcaaagcgccgtcgcttactttgaccggaaacctcggcgatgtgatgaaggaatctgccaccttagcgctcggctacgtcaaagcgcacgcaaaagagttgggtatcaagccggaagtgtttgagaaaacagcc

SEQ ID NO: 1042 - DNA, 24725 bp, synthetic construct
  source 1..24725: mol_type = other DNA
  misc_feature 1..24725: note = Synthetic
aatatagagggcaggccattgaaaaggtcgttttcgacgcttctcagttgctaaccctttccagtagcggactccggtcagtcatcttcgccaaacagagattaggcaacaaaccggaaatcgtattcgtaaactgcgccaagcagatttatgatacactcaagattatcggcctgaccccctccatcaagttcgtaaaggtggagaataagaggctggtgcgccgacaggaagaccttgacgagtttgccgcaaacaacgacgtggtgtgctatagtatgaagttagggcaagatgaagattgatgaacgtgtcttgatatgagtttatgacccgcttgcatttccagcctatccatggcaagtcactcgacatcattgatgccatcctacagacagaagaggtggcatcgataggtgacaacatgggaataatctttgagacggtcgatgaactggtggctaacattgtcgattattccaattctgactatctcgatatagagatagttcgtgacgacaatagcatcacgctgcgcttccgcgatggcggcataccgttcaacccgctaaagaaagaccctcccgacatctctctgccgatggaggaacgggaaatcggcgggcttggcatcttcctggtcatcaagaaaatggatgtcgtggaatacgagcatactgacggagagaacatattgacagtcaagaaaatgataaaggactaaaccacatgggtaaacttctgaaaatcataaagaataatcttagcctcagcattattatagcagcggcactgatacttgaactggttgtggtagtgatgttttataccagccataacatcatccatgagacagtggagaagttggtggagcgggagatgaacagcatctatctcggcatacgcaacaagttggcaaaggtggaggtgaccatcgacaacatgtcgtgggtgataagaggtgacttgggagaacctgataaaatgtttatgaacacacaccggctgatagagaacaacccagccattctcggtagcagcatcaccttcattcccgactattacccccagaagggacgctggtttgagccgtattctatacgacggtctgacggcaccatcgaggacttgcaattgggctcagccacgcacgattacacgaagagtgaatcctttgcggtgccaatagccaccggcaaaggtcactggtgcgagccttatatggacagagaaggcgcccaaatgacggtaacaacctatgccgtacctgttcatgactctaataataagattgtcgcagtagtcgatgcagacctttctttagactggctcgaagagatattggaagagaacaaggtctataagagcacgcaacgctttcttctgacaggcaagaaccatatattagcgggccaggatggaccgatgttacaaacagtgctcaaacagttatcgaatgagaaggacaagcagggatatcttacaatggaggacgaagaaggggaaacatcacacgtgttcttccatcctgtaggtggcatgacagactggatgctcatcagcgtcttgaatgacaatgaggtattcggcaaacttcgtatggtaaggttttggctgcttctgggaatcaccactggcatactgattcttggatttatcatctaccgtacttcccgtaacttggagagcctgcgcaatataaatgccgaaaaggagcgtatcagttccgaattgcgcgtagccggtgagatacagcaaaacatgctaccaaacaacaactacctgctcttggacaatgtggaactattcggttcactggtacctgcccgcgaggtgggtggcgacctgttcaattacatcatccacgatgagaaacttttcttctgcatcggagatgtatgtggcaagggcactccagcagccatgttaatgactggtattcagtcgttgctgtatgcattcacgctccatgaagacaatcctgcccgcgtcatacaagatatcaacgccgtctcaagtgacggaaatgattcgtgtatgttcttcaccctcttcctcggtgtgctcgacctgccaacaggccgtctgcattactgcaatgcaggtcacaatgcaccatttatattgggaaaagagcccatgatgcttgattgtgattccaacctgcccatcggaccgttcgaagatgcagaattcagtctgcaggaaatgacacttagcccaggtagttctttattcctctataccgatggactgactgaggccgaaaacgcggagggggagcagtttggcgtagaacgcacggaagaagtgctgagagaatgtattgaccaacagttaaacgcgaaagaaattgtcaataaagtcacagagcgggtacaccagtttgtaaaggatgccgaacaaagtgatgacttaaccctgtttgttatccggtcaccacaaaaggcacaggaaaattcctgattggacttttcctgtgccttccagattggcaagaatttgaacggaataccgcttattctatgctgatctgacgagagaccttgactttctcttcaacgaccttaggtagttcgacggtgagcacaccatgttcgaccttggcagagatatcctccttcttcacgtcgtccggcaggatcagcgtctgctcaaactttgagtaagagaactcgcgacgcaggtagcgggtgttcttatcctcatccttcttctcgttcttgctctccatcttgatgatcaggttgccctcatcattgatatgaacgttaaagtcctcctttttcatgcccggtgctgcaagttctacggtgtaggccttgtcactttctttcacattgatagcaggtgccgtacagtttgccttcggcataaagtcggtatcaaacaaatcattgaacacactgggaatccaactgttacttctcattactggcatcataatctttacctcctaattatatttttaatttgttaaactttatccttttgagttcagccctttcggagcctcgcttcaccaaggataaggcaagaaaaatgccaatggggatgactgtgtcaatctgacagaattgcgcgacagattgtcaatgccttctcaactgaggtcacctcagagatcacgatggagcgcttgccattcccctcgcggaagttacagtgacgaggatgctgggccacgtatgcaagcacccgtccaaaggtctcgctctggtaataggggctatcagaattactgacgaagtagaggtacatcttcgtctgcttgagcatgattttctcaataccaagttgtttgcccgctacgcgcaggggcactacattgataagttcctctgcaacagcgggaatctcaccaaagcggtctttcagacgactgcgataagcctccagggccgcactgagatcattgcggttggcgagattatcgagttcgcggtagagcagcatgcgctccgagtcactgggcacatactggtcggggaagtacatctcgatgtcggattcgagggcacagtcatcaacgaatatctgtggaatgttgaatgtggaatgtggagtgggcattccacattccacactccacgatttctcattacgcaactccgccatcgcctggttcagtatcttctgataggtctcgtacccgagatcggagataaagcccgactgttcagagcccagcaggttgccagcgccacggatgtcaaggtcttgcatggcgatgttgatgccagagccgaggtcggagaagttctcgagggcctcaaggcgacggcgcgactccggattaagggctgccagtggtggtgcaagcaggtagcagaacgccttgcggttgccacgccctacccgacctcgcatctgatggagatcggagagcccgaagttctgggcactattgataatgatggtattggcgttggggatgtcgatgccgttctccacaatggtcgtggagagcagcacgtcgtagtcgtagttggagaagtcgagcacgatctgctccagttcctctggcttcatctgtccgtgtcccacggcgatacgggcatccgggatatacttcaggatcatctccttgatgtgctgcaggtcgctgatacggttgttcacgaaatagacctgtccgttgcgcgacatctcgaagttgatggcatccgtaataatctccgccccaaaggtatgaatctccgtctggatgggatagcgattaggcggtggggtctggatgacactcaggtcacgcgctccgacaagcgagaactggagggtacgcggaataggtgtggccgacatcgtcagggtatcgacattcgacttcatctggcgcagtttttccttggtggagacaccgaacttctgttcctcgtcaataataagcaatccgagatccttgaactttacggtctttccgatcagtttatgcgtacctattataatatctatctttccgtcggccaggtctttcaggagagccgtcgtctgtttggccgtacgcgccctggtaaggtaatccacacggacaggcatatccttcagtcgtgaggagaaagtccggaagtgctgataggccagcaccgtggtaggcacgagcacagccacctgcttaccatccgtggcagccttgaaggcagcgcgcacggccacctccgtcttgccgaagcccacatcaccacagaccaggcgatccatcggacgagcccgctccatatcagccttcacatcctgcgtggccttcaactggtctggcgtgtcttcatagaggaaactggcctccagttcatgctgaagataggtgtcgtggctaaaggcgaagcctttctcacgacggcgcttcgcatagagtttgatgaggtcgcgggcgatatccttgatatgcttcttggtgcgctccttcagcctttcccactggccagtgccgagcgtggagagcctgggcccctcaccaccatcctgcgacttgtacttcgacaccttatataacgagtggatcgacacatagatgctgtcgccatgctgataggtgatcttgatcatttcctgatacgcctgctccccctttgcgttggtgacaggcatccgtacaagtccgccaaacttacccacgccatgatcgacatgcacgacgaagtcgccaatctcaaactgctgtatctccttcagcgtaagggccatcttaccgctacgggccttgtcgctcttgaggttgtacttatggaaacggtcgaatatctggtggtcggtaaagacacagatgcgcaggtcgtcgtcggcaaagccttcatgaagggtcttatccactggcgtgaagacgatatccttcgccttctccgcaaagatgtccttcaggcgctcgttctgtttctgactgtcagccaggatatatatctgataaccctgcaggagatagtcctcaaaggatttcgtcagcaggtcgaagttcttgtggaagagcggctggacggtgatatggaattgcagcgtcgcctgacttggcgccgatgggcgatgaccgaactcgatacggcggaaggactctgcctcactcatgaactggctcccagtgatcaactgcgactccctccgcatctggcgctctatctcccgctgctccatctccgtcgccccttccatctgctccatcttcgcctggtcagagaagccttcctgataggcacggtcgatggcatcacggacgtagagatagtctttcgtcaccagcatcatatcctttggcacaaacgagaggaagggcaccttgtcctctgttaccacagccaactccggcacgatctccaccctgttgcgatggtccttcgacaactggtcttccacctcaaacgtgcggatagagtcaatatcatcaccaaagaagtcgatgcgatagggatattcgcaactataggaatagacgtcgaggatggagccgcgcagggcaaactgacctggttcatagacatagtcaacctctcggaagccgaactcgcgcagggtcttctcgatgtccgccacggcaatcgtctggtctttctccaagacgagcacccgtgagtcgaaactcttcttcgacaccaccatctccgccagggcctcaggataggtgacgatatagagttgggagttgagagttgggagttgagggttgagagaggatatccgtgccagcacctccgtgcgcaggatctcactggcagcatcgcgctgggcatacttgatggcacgacggtaacttgacgggaagaacagcacatcctgactgccagagagttgcatcaggtcgtggtagaaatagcctgcctcctcagcatcgttgaggataaaaagcagagacgtcttgctcttcagcgacagacagccaaacagcatcggagccgatgaggccaacaaaccttcgagaagaatcgtcttcactgaggattcttccatctcctttgccaatgccgacacctgtggcaacttggcgtacaatttcactaattcctgtatatgcattagaaacagtgtgcaaaattactaaaaattattcaaatagcatatacttgtcgaagttttttattacctttgcagcgtaaaaacgaaaagccaagatgtacgaaagcgatagcatagtcatcatcccgacctataacgagaaggagaatatcgagaaaatcatccgtgcggtattcgccctggacaaatgtttccatattcttatcatcgatgatggttcccccgacggcacagcggctatcgtgcgaggcatgatggcgacagagttcggcgaccgtctctttatcattgagcggaaagggaaactcggactgggcacagcctatatcactggtttcaagtgggccctggagcacgactatgactacatctttgagatggatgccgacttcagccatgatcccaacgacttgccgaggctctatgccgcctgccatgacgagggctacgacgtggccatcggctcccgctatgtgtcaggcgtcaatgtggtcaactggcccatcggccgtgtgctgatgagttactttgcctccaaatatgtgcgtctggttacgggttttctggtacacgacaccacagcgggctttgtatgctacaagcgtcgcgtgctgcagaccatcgaacttgacaagattcgcttcaagggctacggattccagatagagatgaaatacacggcctataagattggctttaggatcaaggaggtgagcgtcattttcgtgaaccgccgcgaagggaccagcaagatgtcgagtggcatctttggcgaggccttctttggtgtcatgcgcctccgctgggacggatggacacggaagtaccctaagattaatgaggaattaggaatgaagaattaataattatgattaccttattatattgggtttatcagttgttcatcgggttgcccgtactcgtgattgtgaccattatcacagccttggaggtaggtattggcacggccatcggcaacggccatttctggggctactaccctggacggtggtgggcaaagatcatcctcaaggcattcctgatacctgtcaaggtcgaggggcgcgaaaatctcgagaaagacaagagttacgtgtttgtggccaaccaccaaggaattttcgacattttcatcatctacggatatctgggccgcaacttcaagtggatgatgaagtaccagttaggcaagattcccttcatcggctatgcctgcaggcggtcccatcagatattcgttgacaagcgtggtcccaagaagattcagaagacctacgagacggctcgtgagatcctgaaagagggctatagcgtgacggtcttcccagagggagcccgttcgtttactggccacatgggaaagttcaagaaaggtgccttcgcactggccgatgaactgcagttgcccgtagtccccctgaccatcaatggttcttttgacatcttgccacgcacaaaagggtttatcaacttcatcaagtggcatccgctgacactgacgatccatcaggcaatctaccccactggacaggggcctgagaatgtcaatgccaccatgcgccaggcctacgactccgtgatgtcggcactcgtaccagaataccaaggctatgtagaaaacccagaccaatgattgcacgcgaccttatcgttttcctgctactcgtcatcctgcccttcctctatatcgaagtgcgctctgccagaaagagccgttcgtggtggaaatgctgtctgcgatggctgacctgcctggcaatggttgcctacaccgtctatctggcgatggagcccaacttcatccccagcaacgaccgtatcttcatcctctacggctacctgttcctgctgggactgatcatcattcccctatggaccttcatcatctgttctctcctgggcaggggggtaagcgggctataccgacgctgcagaccatcactcctgtcccgtcgccccaagaactatggcaacctgttgggactgctcagcatccctgccgtctggtttgtactctgctggggcagttttgtgggcttcaacaagttggaggtcaggcatacggaatatgtctcaaaggaaatacctgaagccttcgacggctatcggatcgtactcttctccgatgcccatgtgggcagttacatgaagcacaacgaatgggtgctccagcgtgccatcgacagcatcaatgcccagaagccagacatgatcgtcttcgctggcgacctgcagaacatccagcccatggaactttatccacatctcgatgccctggcttcgctgaaagccaaggacgggatatacgccgtactcggcaatcatgactatgcagaatacgtgggtctcgacgaggccatgaaggtggccaactgccgcgagacggccagtatggagcgccagatgggatggacactattgctcaatgaacatcgtaccatcgagcgcaacggttcatatttcatcattgctggcatggagaatgacggcgacggcaggaagttcccacaaaaaggcgatattgccaagacactggaaggcgtgagcgatggcagtttcgtcatcatgctggagcacgacccttctgcctggcgacgtaagatcatccctgacggcagggcacaactcaccctgagcggccacacccacaacatgcagttctccctcttcggcttctctctcatgtcactctctggcaaggaggtcaacgactggtacacccagggccgacagtcgctcttcgtcactgccggtctcggagggctcatccccttccgattcgacgccactggcgagatcgtcgtcatcaccctccacacgacccattgacctgtctggtatttacggcttaccagtgcatcgcagaaaaaatattatttatttgcatacactgcatacactaaccccggaaacccctttgtacatcgatgtttgagcctggtgtatgcaaatggtatttagtgtatgcagtgtatgcaagcaggctttagtgtatgcaccttctgccacttcaaccgtggttttctgattttgtcccaagccttgggacgttttgtggaaacgtactccaatgttgtaatatggtcagaaacttttgcggaaacgtactctatttttgtcccaaggcttgggacaaaataaaatgattaaagaaaccaacggaaggtcgtttgcatacactgcatacaccagattttcgttgcatacaccaggctcaaatgccgatgtacacagggctttccagggttagtgtatgcagtgtatgcaaataaataatattttttctgcgatgcactggcaagcagaagtattgaacttctaaacaacaaaagtccaccgttgaggacgatggactgggacctaatgttttcacaacggaataatccttattgtgatttgctaaaaattagtgatgcaaagataaactttttctacgaatattccaaatgtttcgaaagaaatttgtatttttgtcgcaaattaactaaaaacgcagattatgaaaaagattcttggcctggatttaggcacaaacagtataggatgggcagttgttaacgctgatgaagccacgcgtaaagacaacacgaaatatctgaaaccgaacagtatcagttgtgcgggaagcaggattattcccatatctgcagatatcttgggagatttcgacaaaggcaattctatctcacagactgctgaaaggactcggctaagaatgatgcgccgtttacttgaacgcaaccatttgcgccgtgaacgactattaagagtgcttaaggtcatggattttcttccagaacactataattcgaagatcagtcgatatggcaagtttatagacgacagtgaacccaaactaccttggcgcaagagtaaagacggaaaaatggaattcctattccaagaatcttttgatgagatgttggccgaattcaaacaacatcacccacaactattggcaaatggaaagaaagtaccatacgactggactatctattatcttcgcaagaaggctttaacacaaagaattacaaaagaggaacttgcctggatactattgcagttcaaccaaaagcgaggctattatcaactccgtggtgaggaggaagaagaaaaagccaatgagaccattgaaatcatcagtgcaaagattctgtccgttgaaaagaaagagaaagacaagaaatatgaaaagtattggtacgagatgcatcttgagaatgggatgacctatcgtgccactttctataatgacgtcacaagttgggaaggcgagacaaaagacttcgttctgaaaaggacaacactcaaggacggcacgccaaaaaatgaactttcttttttgccaacccctgaagagattgacctaatggatgcccagcgcaaggcaaaaatgtatgccaaaatcaaactccgcactgaaaaggagattgagaatagccataagaccgtcggaagttatatctatgacagcctattgcaaaatcctaaccagaaaattattggcaaactggtccgcaccgtagaaaggaaattctacaaggatgaactgaagaaaatcttggaagtacagcaggagttgattcctgaactgaaagacgaagccctctatcaaagatgcatagaagaattgtatgcagcaaacgaagcgcacagaaggtctttgtctaaacccgattatgtcaatctgtttttgaatgacatactattctatcaacgcccgctgaaaagcaagaaatcactcattgacgattgtccctacgaatatcatgtgagcaaggacggcgagcaacatcctattaaatgtatcgcgaagtcaaacccatactttcaagagttcaggctatggcaattcgtacaaaacctgcggatttatcaacgtgaaaggactgttacagatggccaattagacctatttacaaacaccacgactaacaaacttcaaactgacgttgatgtcacctctgagattctgaaaacggaggaagactacgtcaaactgttcaactggctcaacgacagaagttccatcaaacaagacaccctacttagttcctatttcaaggccaagaaagaaaagggtaaggacaaatacccctatcgctggaactatgtagaagacaaagattacccttgcaatgaaacgagagccacgatcctctccggactggcgaaatgtaatatcagtgccgacttcctcactcacgagaatgagatgtctttatggcatattctttattccatagaagataaagcagaactatataaagcactgaagaagtttgcccatagacatcaacttgaagagaatttcccagaagtgttgagcaagacgaagccattcaagaaagactatggttcgtattcagaaaaagccattaagaaactgctcccactcatgcgtatgggcaactactggaatgaagagcaaattgatgccaaaactcgcgaacgcattgaaaaaatcatcgacggagagtacgacgagaacatcaagaaccgtgtcagggagaaggctatcagcctaacagacattcaacatttcagaggactgcctgtatggttggcctgctatatagtctatgaccgtcattcagaagccaaggtagttgagaaatgggaaaagccggaagatatagattattatcttaagaacttcaagcaacactcgctgcgaaatccaattgtagaacaagttatcacagagacattgcgcaccgtcagagacatctggaagcaggagggtcagattgatgaaattcatgtggaactgggccgcgaaatgaagaatcctgcagacaagcgcagacagatgactgagcgtattcaacaaaacgaaaacaccaacctgcgcatcaaagcgatgctgatggaatttatgaatcccgatatgggtattgagaatgttcgtccgcactcgcccagccaacaagacattctacgcatctatgaggagaatgcacttgacaatctcagcaaagaagacaaagactacgacttcgtatcgaagatttcaaaggtggctcagccttccaagtcggacatcatcagatacaaatgttggctggagcagaaataccagtctccatatacaggaaagatgatacctctctctaaactgttcacccctgcttacgagatagagcatgtaatacctcaatctcgctacttcgatgattcgttcagcaacaaggtcatctgtgaagcagaggtcaacaaactgaaagaccgccaacttggctttgagttcatcaagaaccatgctggcgagattgtccaactgagccaaggcgggactgtgacgattatgtctgtagaagcctatgagaggttcgtgaaggattattatagcaacaatcggacaaagatgaagaaactactgatggacgacattcccgatggtttcattgaacggcagatgaacgacagccgatacatcagtaaggtggtgaaaggactgctttcaaatatcgttcgtgagaaacaagaagacggtgagtaccagtcgtccagggagtatgaacaagaagcggtttcaaaaaatgtcatatcctgtacaggctctatcactgaccgtctgaagaaagattggggaatgaacgacgtgtggaataacatcgtccttccacgcttcaaacgtttgaacgaagtgactggaaaggattgctttactacatacagccgcgaggggcatgagatcccgaacatgcctttggaactacaaaaaggattcaacaagaagcgtattgaccaccgccaccatgctatggatgccatcgtaatagcatgtgcgactcgcgaccatgtaaacctactgaataacgaggctgcacattctaaacataacgtcaaccgctatcaattacagcataagttaaggcgatttgcaacaatcaaaattaacgggaaagagcgtgagattgctcaagagtttttgaaaccgtgggagtccttcactaccgacgcatggcaggtgctaagcaatatcatcgtcagtttcaagcagaacttgcgtatcatcaataaaacgaccaatcgttatcagcactgtgaagatggaggaaagaagggatttgaaaagcagcacaaaggcgaaagttgggcagtgcgcaagtctatgcacaaagatactgtctttggtgaagtaaaccttcgcctcaaaaagacagtttcgctgaatgaggccatcaagaaacctgagaatattgtcaacaaggagttcaagaagaaggtcattgaactactcgaccatggacgagacgcaaagttcatcaaaaagtatattgatgacaacaaagatgtttggtcagacatcaatcctgctaagattgaaattttctatttcagtaaagatgagaaaaaaagaaatggcgaaccaaaagagcgttattttgccacccgcaagtcactggacacaacctttgatgagaagaagataaaagagagtgttactgacacaggcatacagaagattctgttagcacacttaacaaccaaggaaaataatccagagcaagcattctcacctgacgggattgaagagatgaatcgcaacatcaccgctttaaacaacggcaagttccaccagcctattcttaaagtacgagtttacgagaaagcagataagttcgctgttggacaaactgggaataaaacaaagaagttcgttgaagcagcaaaaggcacaaatctattcttcgcattctttggaacagaaaaggaaattaaatctaatgggagaaaggaaatcgttcgctcatttatgaccattcctcttaatgtcatgatagactgtcaaaagaaatatgggatacagtggcgtaacaacatcgaagattatctaagaggaaaagacatgattgatgcagatgcgaaactgttattcattctttcaccaaacgatttggtatatctgccaagggagaacgatagaaaagaagatataatgcctcttgacaaacagcggatttataagtttattgaccctgctcaagataaaggcaattttgttcaatattctgttgcaaaagcaattttctcagccaaattcacagatcaaaagaaacaaggaatctcctatcctattcaggatgagtttggacttggtagccaacaaacaaaaagcccacgagcgattactggcgaaatgatcaaggagacctgcatccccataaaagttgacaggttaggcaatgtgatagaaataaacggctcaccattataagtcagtaaacctatgattaaaaagacgctctgcttcagcaatcccgcctatctctcactgcgtgatgcccaactggtcatcaaactgcctgaggtggaaaacggtgacaacttgaccgaggctttcaagaaagccaacgaggtgacccgccccattgaggacatcggtgtagtagtgctcgaccataagcagatcaccgtcacacaaggcgcattggaggcactgcttgaaaacaacagtgccgttatcacttgcgactctaatcacatgccagttggcctgctactacctcttgttggtaacactacgcagaacgagcggttccgtgaccagttagacgcttccctcccccttcgcaagcaactctggcaacagaccatgcaatataaaatccgcaatcaggctgtagtgttgagcaagtgttctgatgcagagaccaagtgtatgcaggtatgggctaacgatgtgcgtagtggcgacccagacaaccttgaggcacggaccgccgtctattattggaaatgtctgttcggacatatacccggattcatcagagcacgtgacggagtggctcccaacaacctattgaactatggctatgctatccttcgtgctgtcatagcacgttcattagtagcaagtggaatgctgccaacattaggcatccaccatcacaatcgctataatgcctattgtctggctgatgacatcatggaaccctatcgcccatacgttgaccaactggtttatgacatcacagaacaatacggtgtggatgttgaactctcaaaggacatcaaggcagaacttttgtctatacctactctcgatgtagtggttggtggcaaacgcagtccgctgatggtggctgcacagcaaactaccgcctctctttataagtgtttcagcggtgaacttcgtaagatagcctatccagagatgacatgaaggcagagcgttttagcgaatatagggttatgtggctaatggtgctgttcgacttaccaacggaaacgaagaaggacatcaaggagtacgccaagttccgaaaacgtctcattcaggatgggttcaccatgtttcagttttccatctatgtgcgtcattgcgccagcatggagaatgctgaggtacatcgaaaacgagtgaaagccatcctgcctgagtttggcaaggttggcatcatgtgtattacagacaagcaatttggcaacattgaactattctatggaacaaagcctcaacaaccgaatgctccagggcagcaacttgaacttttttagaaacggagaatcccatcttgttgatggaaccctccgctttctctgcagcattttttcttttctaattttctttgcaacaatctgattattagcacgtttctacaatcgagatgtttctgccactgcaaagatactaattttctagcaaatcacaacagttccctgcttcttcttcttttgagtcccgatgtttctgccactgcaaagatactaattttctagcaaatcacaactacgacgaatttgacgaagaggttaagagggatgtttctgccactgcaaagatactaattttctagcaaatcacaacgtaccgacagtctaaagaagatgagcacccgatgtttctgccactgcaaagatactaattttctagcaaatcacaacagacgatgccactaaagcagcagaactgacgatgtttctgccactgcaaagatactaattttctagcaaatcacaacggtcgtggatgctgacgtttggctctacgagatgtttctgccactgcaaagatactaattttctagcaaatcacaacgatctatggcatcgtggcaccgttaatgcgatgtttctgccactgcaaagatactaattttctagcaaatcacaacattattagtaatttgtcgccgtagccggcgatgtttctgccactgcaaagatactaattttctagcaaatcacaacttagccgttggtctgcctctctcttggccagatgtttctgccactgcaaagatactaattttctagcaaatcacaactatatcgttgcattgtaatggctactactggatgtttctgccactgcaaagatactaattttctagcaaatcacaacattcccctcgtttttgtttgaaaaggattggatgtttctgccactgcaaagatactaattttttagcaaatcacaaccgtttcatcgtgtaaccgaaatccttctcgatgtttctgccactgcaaagatactaattttttagcaaatcacaacaccaagaaagatttgcaaaacctttctcccgatgtttctgccactgcaaagatactatttttttagcaaatcacaaccattcgcccgttatgctgcctggggtttagatgtttctgccactgcaaagatactaatttcttagcaaatcataaccattcctttacaggactataggtttgcagccaggaacttacggcagacttccacgggaaggccgcgccgacgggcatagtcatggagttggtcttctccaatcttgcccagtatgaagtaacgggcttggggatgggccagcatcaagccgctgacactggcatgcggtttcatggctccactctccgtcaggcggataccaatctgcttcatgtcaatcagtgcatcaagcacgaagttcagactggtgtctggcagtgaaggatagccaatggctggacggatgccctgaaacttctccacgagcatgtccgagatggaaagccgctcgtctttcgcatagccccaatactccttgcgtacctgctcgtgcagcctctcagcagcagcctctgccaagcggtctgccagcaactgcaccatcatcttctggtaaggatcggcatcaaagtctgtctccagaccaatatccacagaggtagcaaacacccctaccctgtcctcacggggactgacaaaatcagaaagacaaagataaggtggatttccctgctgttggcgaagaaggggaatgcgatgccgctgtcctataacaatgtcatcaccatcagatttggcatcatataactcaaaaagtgcgtaggcctgatatttccctgccagaagttccaactgggcctctgcttcacggaggaggcgagccttctctgcctcatctctcacttgccaggcaaagaagaaatagggccagttgatatagggtaccaattcggatatgtcgtagatgagtctcatctgaactctacaggctcaccgatatagtctgtatcgacgacaccattattatatacggtatgcccattacaaagcgtatgctctacccgccaaagatacgtatgaccctccatgggactccagccacacttgctctgaatcatgtttttagttaccgtccagcccatattaggacgaacgagcacgatatcggcctgatagccttcacgcaggaaaccacgacgctgtatatcaaagagacgggcagggttatggcacatcagttccaccaggcgctccagcgagaggactccttgatctaccagttccagcatcgtcaccagtgagaactgtatcatcggcataccactggcagccttggcacagccaccttccttttgggatagcagatggggcgcatggtcagtacctatcacagagatacgtccgtcgttcaacgcctcacgcaaagcatcacgatcacgttccgacttaatggcaggattacatttgatacgtgtgccaagggatgcatagtcacgatcgcagaaatagagatggcttaccgtggcttcagcggtaatcagaggatagagaggagagatcaattccaactcgcgggccgtagtgagatgggctatgtggagacgagcatgatgcttctttgccagttcaacagccaagcgggtactttcataacaggcatcctcactgcggatgacaggatggtagataaccttcggatcctcaccatacttctgtttggcttctgccatgttgctgttgatgatattcgtatcctcacaatgcgccataatgggcagattggcggaggagaaaatacgctccaggctctccctacgatccacgagcatatttccagtagaactgcccatgaagagtttaataccagggatacgcttcgcatccagcagcggaaacaaatcgacattgtcgtttgtcgccccaaagaagaaggaataattcacatggcttttccgggcggctgtagaaaacttttcgtccagcgcttccaaggttgtcgtctgcggcactgtgttaggcatgtcgaagtaggtggttacaccacctgctgccgctgcacggctctccgtatcgatatcagccttttccgtcaatccaggctcacggaaatgcacatggtcatcaatgatacctgggagtacgaaacaacccgaagcatccacaatcttatcgtagcagaatgcttcgggtaacttattccctataacgatcttactgatggtctcgtcgtcaatgacaatgtagccgtcgaaggtccgtccctcattgacaatcgtccctccctgtatcagcgtcctcatttctctggaagattgagcgacggcaactgcatggagtctggcatctgaacagagggcgtaggagtctgtcctacaggctgctgaggcgtatcgtcaaccagcccattctgtcgcgcctgaatctcattggctgctcggtaatactccttcacgtaggcatcttccttgaacttcttggtagccttgctcatgatatcttctatctgaggcgtcagtactggatagggatagccactggtcagcatcataaagacaccaggaccgagcacattgtcaaaattctccacgatgaagttggtcaccaggctgtcttcttgctgggccaagcgcgctgcctctgcagatagttgacggttgatgatatcttcgtcgatgccgtcgagcaacatctgactctgcttatgtgacaactcgttaagttcgttgctgatctggtcgtgccgattgataaactggtaaagtttgtcattcagcggagtaccactgacactgcggcccgtattatcaatatgaatctctatctcacccttctccaccacgacaggcatcatcagcggctcatcatccatataaagattagccagtttcactgtatcaagcagtccggcaaagcggaacttcccatgaaccacatcacaggagtccatattcttcaactcctgatcctttaccgttttaaggtacaacttactaccatccagagcagacacagaagacgaaccctgaattgagtaggactcagcacaggatacgagcgtggccaccatgaccaatgagtatagtattttgttcataaataattcgtttcgtggcgcaaatgtacaacgatatattgaagtagaaaaaaaaatttgcgcattttaaaacaaatgcgcactcttttatagtttttttgcctctttctccaactcatggctgattctatgggtagaatagagttgaaggatttctgcaatcaggagggttatgacccatttgttatatacataattaacaaaggtgatatggtcgagtccgaagatgttacccgtattggccaacatcagcagtgcagacagcagaaagaggatatcactgaggatcatgatcctgcgcaggcggcggatgacgaagttggtaccctcatagcgctgaagaaactgcatcgacacaaaagcgagcgttcctaaagcaaagacgtatggggctatgctccaggacaggatactcatacccgcccctacagccatcagaacggcacctatcaggtagatggccgtctggaaactattcagttgtctcatctgttaaaggttttgcctcctgcccgtcgtcactgagcacgaagatatcctcatcatcagccttcatgaaatagcgctcacgggctatcttctccatagcctttggattcttgtcaagttcacgaatctgggcctggtcgcgatgatactgagcattatacttctcagtctcctccgtcagttcactgattcgctgcaggttcttcagatggctccagacgctgttctcatcaaggaatcccacaatggcgactccggcaataaagaccacggcatacttcaggaacatcgagtgccacacacggagcaggaatgtcttaatgcttgtaatgactttcataattctgtaatttgtctgcaaagatacaaaaatctcttaattcttaattcttaattctcaattattttgtatctttgcagaaaaattcatgatatttttatggaatacatcgtttctgccaggaaataccgtccaatgtccttcaacagtgtcgtaggacagacagccctgacaacaacactgaaaaacgccgtcaagagtggtaagttggctcatgcctacttgttctgtggcccacgcggagtgggaaagaccacttgtgcacgcatcttcgctaaggccatcaactgtcagaacccaacgacagagggtgaagcctgcaatgcgtgtgagagttgtcagtccttcaacgaacagcgttccctgaacatctttgaacttgacgctgcctccaacaactccgtggagcatatcaagactctgatggaacagacgcgcatcccaccgcagttgggcaagtacaaggtctttataatcgatgaggtgcacatgctctccacagcagccttcaatgcttttctgaagacgctggaagaaccgcctgcacatgtcatcttcatcctcgccactacggagaagcacaagatcctgcccaccatcctcagccgttgccagatctatgacttcgagcggatgacggttcgtaacacaatagaccacctgaagcacgtggctgaaaaggaaggcatcacctacgaggaacaggcactggcagtcatagccgaaaaggctgatggcggtatgcgtgatgccctctccatcttcgaccaggccgcctcattctgtcaggggaacatcacctacgagaaggtcatcgaagacctgaacgtgttggatgccgaaaactatttccagattgtcgatttggcagtcagcaataaggtcagcgagatcatggtgctgcttaacaatgtcatcaacaaaggtttcaatggtggtcttctcatccagggactggccaagcatgtgcgcaatgtgctgatggcgaaagacccgcagaccctccctttattagaagtcagcgaccagcagcgccagcgttatcaggagcaggccaagaagtgcgagacccgcttcctctaccaagcactgaaactgatgaaccagtgcgacatcaactaccgccagtcgggcaacaagcgcctactggtggaactaacattgatagaaatagcgcagattacccagcctgacgacgatggtgccagcgcggggcgtcgccccagaaaattaaaatccctgtttaagaacctgatacgccagactcagccacagaaagcagccccgcaggtggctgcggctaagcctgtcgtatctaacgagcctaacaacgttagtgcccccacccagccaagtgcacccagccaaccaagtgcccccacacaacctaacctcaggctcggcggtcttggtttctcttggaacaatcttcgcaaccatggaaaaccaagcaagatgagcatcatccccgggactgtatccgcaccaatagaccaacagacaaacagcactttcacgcaggagaacctcgaactacaatggatggcaatgtgcaaccgtatgccacagcaatacagtggcatcgcaacacgcatgaagaatatgaatcctgtcatctctgacttcccaaaggtagaagtcgttgttgacaatgccctcatcaaacaggaaatggataatttcaaggggcgtatcgtgaagacactccagggtgccttgcagaacgatgccatcacccttgacatccgaattgccgaacaacaggagcacgtcaagattctcacccgccgtgagcagtttgaactaatgagcaaagaaaatcctgccgtagaaaaactacgacaggctttcgatcttgaactggcttgacctttatcggcaaccactcagtccctattctcccacaaatttcctgatggttttcaggcactggtcgctactgaccggcttggataggaaatcatcacaccctgcttcaaaggcaagttgacggtcgctgtcaaaggcattggctgtcagggcgattactggcaggtcaggatgcttctccttaattttcttcgtggcctccagaccatccatcacgggcatcttaatgtccatcaggacaatatcatagtcattgccctcaactttctctacggcctcctggccattcttggctcggtcaaacagaaagtacttcttcaagatgtacgacatcaggatgaagttactgtcattgtcctctgctactaaaatctttttcatgacactcaatatatttatacggtagttagtttttcttccagagtttgctcatatcttcgagtgtcttacccttggtctccggcaccaggcgccaaacgaacagggcggcaatcacgcagataataccataaaggccgtaagtaaaccaatgaccgaaatcatctccctccgtcagatgcatgttgaacatcggtacgaatgaactggatacgatgaaattggaaatccactggaaagccacggcgatggccacggcagcacctcggatcgtattcgggaatatctcggcaatgagcacccaggtaatgggaccccaagagaacataaacgaggcggagtagatcagcagcgaagcagcagtcaccagttccaggccagcatgtccgaatgtcagggctacaccgaaggcacccagggccattcccagtgagccacagatgagtagaggcttacggcccagtttctctacggtgaacactgccaccaacgtgaacgagatattgataattcccatgaataccgtcaggatcatcgggttgtccatacccatatcaccaaagatacgcggagcataatagagcactgcgttgattcccacagcctgctggaagacggagagcatgatacccacgaagatacacagggcaccgtatgtcatcagtttctctgtcttcacgaccattgtatccttgatatcctgaaggatctgagcagccttgctgctgccgttgatcttagccaggatgctctcggccttcttgtcctgaccgatgctgacaagataacgcggggtctctggtacgaaacagatcagaagggcaaaaagacctgctggcactgcctcacttccgaacatatagcgccatcctgtagtcaccgtccactgtgctgcgggattgatagcggccaggcccttacccatttcctccacgagtggctggatatgatcgccaaggatgaagaagttcacgaaatagaccaccaactgaccgaagataatggcaaactggttccatgaaacgagcatgccccttatattagaaggtgccacctcaccgatatacatcgggcagatagccgaggccagtcccacaccaacgccaccgattacacggtagaaattgaacatgatcaacagggaataggtaggtgtaccatactcaaagaacaggaattccggatccatagagcccaatgctgatataaagaataagataccagcaatgatcagtgacttcttacgtcccaaattggtggccaggaagcccgagagggcagagccaataatacagccaataagggccgatgcagatgtaaatccatgccatccatctgtataagtgaaatccttggcctccatgaagaaagcctgtaagcccttttctgctcctgagatgacagccgtgtcataaccgaacagaaggccaccgagtacggcgaccataacgattgaaatgagatagcctttgctaccttgttctgcttgttgattcatcatactatgtttttaataattgagttggcaaactaagagtgaaacttgttcccttatccgacgtatagttaagcgt

SEQ ID NO: 1043 - DNA, 24725 bp, synthetic construct
  source 1..24725: mol_type = other DNA
  misc_feature 1..24725: note = Synthetic
gaacttcttctcgtagaggctctgaataagttgcaaggtctgttctgcggaatagccgaacttacggttgcaatccacctgcaaagaagtcaaatcgtagagtcgaggcggtgcttccgttccctttttcttctgaatatcagtcaccgtaaaaggttgcccttcaatagattggagaactgccctaccctcttcttccgtcaagaactctatctgcttgtagatagggcccttactcttgatggtcttgccttcttctgcagcagccttcacttctgcggcatcctctgcttccgcttcctcatcatgagcgatggcggtgaatttggtgtcgcggtagagtgtggagagcacccaactttgtttgggcacaaaactctctatctcctgttgacgacgcacgatcaacgccaatgtaggtgtctgcacacgtccgacagaaagcacctgcttctcctgaccatacttgagcgtgtagagacgtgtggcattcatgccgagtgtccagtcaccgatggcacggcaaagtcctgcctcatagagtgactggtattcaatttggtctttcagattgttgaaaccctcacggatggcttcctctgtcaacgaagaaatccacagacgtttgacaggacattttgccccagccttctgcatcacccaacgctgaatcagttcaccctcttgccctgcatcaccgcagttgatgatactatcagcagcctgcatgagcttctcaatcgtggcaaactgacgcttcaccccgtcatcatccttcagacgaataccgaaacgtgcaggaatcatcggcaggtcccataaattccaacgcttccaacgctcaaaatactcatggggattcttcagctcgcacaaatgtccgaacgtccaagtgacctgatagccattgccctcaatgtagccttgcttcatgtctttggcgcccaacacgttggcaatgtcacgtgccacactcggtttctccgctatacaaacaatcatgagtgtttctgttggtcatgcagttccttcgcctgccgcaagatatcgctggcaaagatgaagtcttccagtttcttgttggtggcatccatgatttccttgttgctgccctgccattcggcacgtccttcgcagatgaaggtgatgttctcaccgatgcccatcacggagttcatgtcgtgagtgttgacgatagtggtgattttatcctcatgcgtgatgccggcaatgagttcgtcaatcacgatgctcgtcttagggtcaagacctgagttcggttcgtcacagaaaagatatttcggttgcagcacaatggcgcgtgctattgccacacgcttctgcataccaccagagagttcgccagggaatttgttctctgcaccctgcaaattgacacgtgccaaacaatagagcgcacgtttcttgcggtcttcgtaagcatcatacgagaacatattgagcgggaacatcacgttgtccaacaccgacatggagtcgaacagcgcagcactctggaaaatcatgcccatctcacggcgaagcaagattttctccttcttcgacaaagacacaaaatcacggtcatcgtagtaaatgcttcccttggtcggtgtgagcagtcccacgatgttcttcatcagcactgtcttaccgctaccgctctgaccaatgatgaggttcacctcaccatcgcggaacgtggcattgatgtcggtgagcacctccctgtcctcaaaacttttatataagtgttctacttttatcatgtcagcatgtttgtcaagaaaatatcagaaaagagtacaagaatactgctggtcaccacagcatcggtgctcgacttacctacttccacactgccgccttccacggtgtaacccttgtaggcagagacgctggtgatgatgaagccataaacaaccgccttgatcataccgcaccagaagaaccattggttgaactgataacggaaaccctcatccagttcaggcacagtggtggttcccatcaacgaggtggcgtatgcacccatgatacccgccgccacactcaatgtaaccaagatgggcatgatggtcatcagccctactatcttaggcagtatgaggtaattagcagaattgacacccatgatgtcaagcgcatcaatctgctgcgtgatgcgcatggtgccaatctccgaagcaatgttcgaccccaccttacccgcaagaatcagacacatgatgctcgatgaaaattccagcaacataatctcacgcgtcgtgtaaccaaccaccatacgtggcatccacggactctgaatgttcaacttgatttgaagacaaatcaccgcaccgatgaagaaggagatgatgagcacgatgccaatcgaattatatcccaattgatacatctccgtgacatattgcttcaagaacattctccatctgtctggctgtgaaagcacacgtcccatcagcatgacatacctacccagatgggttaatccactctttattgaaagcacttctattgtgattttaatgatttataaatggcaaaatcttggcaaaattagtcatttttgttcaaaagaaccgcttttaacatagttttttcttttataaagtgactaatcgccaaactattcgtacttttgtaactaatttgaattgatatggagctaaataaacaatccataaccaccaacgcgggcgatgagaacataccagagttttctgacgaccggaacacactctacactcgtaatcttgtcaagacatatggcaagcgcactgtggcaaacaatgtgtccatcagtgtgcgtcaaggagagattgtaggactgttgggaccgaacggagcaggaaagaccacgtcgttctacatgacgacgggtttggtggtgcccaatagcggacgggtgttcatcaacgatgaggaaatcaccaaagaccccgtttccacccgtgccaagaaaggcgtgggctatttggcgcaagaggcaagcgtgttccgcaccatgagcgtggaagacaacatcatgaccgtgctggagatgaaatacaagtccaccgaagagcagcgggagcatctcgaacggttgctcgacgagttcaacctgcagaaagtgcggaagaaccgcggaaatcagctgtcgggaggtgagcgacgacgttgtgagattgcccgttgtcttgccatcgaccccaaattcatcatgcttgacgagccgttcgccggtgtggaccctatcgcagtggaggacattcagtatgtggtgtggaagttgaaagaccgcaacatcggcatcctcatcaccgaccacaacgtgcaggagaccctctgcatcaccgaccgcgcctatctcctcttcgaagggcgcatcctcttcaaaggcacaccgcccgagctggcaagcaaccccatcgtgaaagagaagtacctcggaagcaattttgtgcttcgtccaaaagacttccagatgattgaagagaaaaagaaaagagagttggaggataattaacacattaatatattaaatgacagaaaccgaaaagttagtgaagtcctgcatcgcaggcatccaagaaaagaagggaaagaaaatacgtgtagtcaacctcgaaggcattgacgatactatcaccaaatatctcgtcatcggcgaaggcaactcgcccagtcaggtggcagccatcacagaatctgtgcgcgatttcgctcgcaaggagcagaatgcgcgtccgtcggcattggacggaacaagaaacaacctctgggttgccatcgactttattgatgtagtggtgcatatcttcgtacccgatgcacgcgagttctacgatgttgacaacctttgggaagacgctgaaatcactgacattccagacattgattgacgaaacatgagtacaaacaacaataacagcaacaacaaactgcaaaagccacgtttcaacttcacgtggctctatatcctgctcattgtaggattggcattcatgatattcacacgccacgacacatcggcttcacgcagtgtcgattacaccaccttcaaggaatttgtgaacaagggatatgtggctgatgtaactgtcaacaaagacaacaacaccctcacccttgccatcgattccaaacacgagaagcaagtctttggtgctgtgagcaagaacaagaaacccgcccgcatcaaggtggagtttggttccattgacaatttagagagttacctcgacgcacagaacaaagagggcaacttcaaaggcaaggttacttacgaacgcgataacgacttctttacgaatctcttgtggaatttcgcgcccctcgtcatcatcatcctcatttggttctttatcatgagaggaatgggtggcggcggcttcatgggaggtgcgggcaacatcttctccgtaggaaagtcgaaagcgcagctcttcgagaaagacgacaagaactctccgcaaatcaccttcaaggacgtggctggacaagctggtgccaagcaggaagtgcaggagattgtcgatttcctgaagaagcccgagaaatacaccaacctcggtggtaagattccaaagggagccctcttggtgggtcctcccggaactggtaagacactgcttgccaaggcagtggcaggcgaagcaggtgtacccttcttctccctgtcaggttccgagtttgtcgagatgttcgtaggtgtgggagccagccgtgtgcgcgacctcttccagcaggcaaaagccaaagcaccctgcatcatcttcatcgacgagattgatgccattggtcgtgctcgcagcaagaccgcagccatgggaggcaacgacgagcgcgaaagcaccctcaaccagctcctcaccgagatggacggcttcggcaccaacagcggcatcatcatcatggcagccaccaaccgtgctgacatcctcgacggtgccttgctccgtgccggtcgcttcgaccgtcagattcatgtggatctgcccgacctcaacgaacgcaaggaaatcttcatggtgcacctgaaaccgctcaagatagacgagaccgtagaagtagcacagctggcacgccagacaccaggtttttctggtgccgacatcgccaacgtctgcaacgaggcagccctcatcgcagcccgcaacaacaaggagtgggtggacaagcagtgtttcctcgatgccgttgaccgcatcatcggtggcttggagaaaaagaccaaactgctcaccgcacaagagaagcgcaccattgcccttcacgaggcaggacacgccaccatctcttggttcctcgaatatgccaacccattggtcaaagtcaccatcgtgccacgtggtcaagcccttggcgcagcatggtatatgcccgaagagcgccagatttccaccaaggaagagatactcgacgacatctgtgcgacactcggtggacgtgctgctgaagaactcttcacgggacgcatctccacaggagccatgaacgacttggagaaagtcaccaagcgcgcctacggcatgattgcctatgcaggtatgggcgacaaactgcccaacctctgctactacgacaatcaggagtaccagttcagcaagccttatagcgacaagactgccgaggccatcgacgaagaagtgcgcaccctcattgcaggcgaatatgaacgtgccaagaaagtgcttttggagcacaaggacggtcatgcacaactggcacaaagactcatagaaaaagaagtcatctttgctgaagacctcgaagacatctttggcaagcgcccatggacctcacgcaccgacgaaatcctcgcatccaatgccgaagacgagcagaaggaaggtgagcaaccctccagcggtaccgaccacaagaaagagaacgaggaaatcatccgtcagaagattgtgcaggcagtccttgagaaggcagagaaagccaaagagagcggacaggattccgacaatcccccctccgacaaaccaaccgaaaccgacaaaccaaaagaaacgtgaaaaatctgattatacgtgccatcacgggtgcactattcgtcatcgtccttgtgggcggaatcgtgttcaacccatactctctcctgattctcttcaccgtcatcacagccatgacggtgtgggaattcactacgattgtcaatcgtcacatgcacctgcatgtcaaccgtttcatcaccaccgttgcggcagcctacctctatgtcgccgtgtgggcattcaacaccaacatcatgggcgcggaggtcttcatcccctacctcatttccatcatctacctgttggtgtctgaaatctacttcgaccgccccgaaaacatccagaactggggcatgaccttcatggcacagctctacatcgctctgccattcgcatcgctgaacaccctttgtttcatcagcacaccagcaggagtgacctactactactggtacgccctgtcgttgttcatcttcctgtgggcaagcgacaccggcgcctacctgttcggttcatggctgggcaagcaccacctcttcccgcgcatctctcccaagaaatcatgggaaggcagcatcggtggaggcatcacagccattgtcgcctcacaaatcattgccagtttcatcccctttgccgagacactctccgacaccacaagccgcctcctgtgggcaggacttgccgtgctcaccgtcattgtcggcacatggggcgacctcgtcgagtcattgctcaagcgccgtctcggcatcaaagactccggcaacatcctaccagggcatggaggcatgctcgatcgctttgatagttcactgctcgccattcccgcagcagtcgtctatgtctatacaattatgcttaatataattcactaaacaactatgactgaaattcagaaccccactgaggaacctgtagtggaacctacagccgaacctgcaaccgaacccgttgcagcagaagaaacagcagccgttgcagaaactgcaaccgagccagtagccgaagaagccgctgagccagtagccgaagacgctgccgaagagcctcaggcagaaacctcaactacttctttcgccacctacgaaaccgaagcagaagtcgtcaaccgtctccgcgagatttcagaaagcgacgaagaggtcactcgccaagaactcgacagcctcaaaagcaacttctaccgcatccatcgccaagaggcagatgccgcctacaagaagttcatcgaagaaggaggtgcagccgaggagtatgctccagaacccgaccccgaagagaccgccttcaaggaattgatggcagccatccgcgagaagcgtgcagccattgctgccgcactggaacaggaacgcgaggcaaactatcagaagaaactcgaaatcatcgacaagataaaagcgctcacggacaatcccgacgagattaaccgtggctacaacgacttcaaggaacttcagcagcagtggaacgacatcaaggaagtgccagcagaacacgccaccaccctctggaaaacctaccagcaggcagtcgaggcattctacgacaccctcaagctgagcaacgaactccgcgcctacgacttcaagaagaacctggagcgcaagaccgccctctgcgaggcagcagagaaactggcagaagagaccgacatcatcgtcgccttccgcaagttgcagcagctccatcaggacttccgcgagacaggcccagtggcaagcgaactacgcgaggaaatctggacacgtttcaaagatgcctccaccgtcatcaacaagcgccatcaggaatacttcgaagcccgcaagcagaaggaagaggagaacctcgaaaagaagaccgccatctgcgaaaccatcgaaggcttcgacatcgaaggactgaaaacctttgctgaatggaacgccatctcagagaaaatcaccgccttgcaggcagagtggaaaaccatcggctacgcaccccagaagatgaacaccaaaatcttcgagcgcttccgtgccgcatgcgaccacttcttcacccgcaagaacgaatacttccagtcagtacgcgaaaacctcaaccagaactatgccctcaagctcgaactcgtcgagcaggcagaagcactgaaagacagcaccgactggaaagccaccaccgacgcactcgtcgaactgcagaagaaatggaaggaaatcggcaccgtgcctaagaagtacagcgaccagatttgggaacgcttcaacgctgcctgcgatgccttcttcgctgccaagaaagaagcaaacaagggtgcaaacgaagagcagcacgccaacttagaaaagaagcgcgccatcatcgacgccctcacagccatcgtgcccgaagagttcgaaggcgacctccgcacccgactccgcgaagcacaggacgaatggaaccagattggtcacgtgcccttcaaggagaaagacaagctctacaagcttctccgcgaacagatggaccgtctttatggctatgccaacgaacatgccgccaagcgtcgcatcgaccgcttcaaggagagcatcaagggaggcaacggaggtgatgtacgttcacgccttctccgtcagcttgacatcctcaacaacgagatcaagacctacgagaacaacctcggcttcctcaccctcagcagcaaatccaagcagggcaacagcctcatcgaagagctcaaccgcaagatggagaagctcaaggcagacaaggaagaagtcagagccaaactgaaagcactcgacgagcagtaatgctcaccgcatcataccaaaaggagggttgccaccaacggcacaccctcctttctatttaccccccttcatgcgaatgaaaaaacaaaaattttaccatttctttgaaaatgaaaaatgaaagaatgagaaaatgaaatatctacgatgtgtctgtcaacgctaaactcccaacctttaacattatacattatcactcatttctgtttcatattacacaggtagtccactggagggtagtactaatcaattctgcagtgccccgtctgttcgcccaccgctgttgaggtatctcacccatacaggtgttggtgtctcacccatacatgtgtcggtgcctcacccatacacccaacgaggtctcactcatagaactttcagtttttattctttccacctggtctgttcaaagggtgggaaagaaaagaatagaatcaagacatgaagcagctgtaaaggagaggcagctcttggcatcaaacagtatgcttagagtgtgcctttggtgttcctttagtcctcctttagtgctccttgtgttcgtagtggtaagatagtagtaaggtagtaggttcgtagtgataaggtagatgtgggtagtagttgtcacttgtcaactcaaaaagtttatcgcaaggggtaaaggtaaaaaatcattttgagcctttttccattcctgtacagcgcatttgttatcattttcccgatgttgttgacggcaataaaatctggaataatcttacgtttcttttgtattgtgttcggttttcactaacgttggcttcgcccaacttaggatgcgcctcaacaataaaaatgaaaaaattattctttcattttgtattgtgctcggctttcactaactttgcaataataaaaccgaaaaaagtgaaacctgtaccgtgatttggaacaacataggcgtacctttgctgtcaaaaatcattaactatcaaaaaacaacaagatgaaagacctgaatcagttcgtgagtgtatatcccgtttctataatctcaagatttcaatcaagaaaccttctatacaataaaaagcccccgttaaggacgagggcagcaacctgaatgttttcacaacggaataatccttattgtgatttgcttcaaattagtgaggcaaatgtacgatgtttttttatttcatacaaatttatttgataaaaaaattgtttttccgtaaatttggcggcaaataacttcaaattagaaaaaccaaaaccattatgaaaaagattttaggcctcgacttaggcaccaacagcattggctgggcagtggtgaacgccaacgaagaaaccagagaaaacggaactaaattcttaaaacctgttggcattaatgctgctggtagtagaatcattcccatgtcacaagacattttagggagtttcgatgcaggcaactctatatcccaaacagcagaaaggacaagactccgcatgatgcggcggctacgtgagcgtaacttattgcgtcgtgaacgcctgttacgaactttgaaaacaatgggattccttcctgaacattttgcacgacagatcaatcagtatggaaaattcatagatgacagtgaacctaaattggcatggaagaaaaaagaggacggctcttccgagtttctttttctagattctttcaaggagatgctggcagattttgcgataaatcagccacaattggtgaatgatgacaagaaagttccttatgattggaccatctatttcctccggaaaaaggctctgacagaaagaatcacaaaagaagaacttgcctggatactgctgcaattcaaccaaaagcgtggctattatcaattacgaggcgaggaggaagaagagaaagagaatgaatctgttgagatcattagtgccaagattctatctgttgaaaagaaggagaaggataaaaaatatgagaagtattggtacgagatgactctcggcaatgggatgacatatcgtgcttccttctcaaatgatgtttctagctggcaaggtgataccagagactttgtcttgaaaacaacaatactgaaggatggaagtgctaaaaacgaactttcattcttgcctacaacagacgagatcgaaaggatggattcccaaaggaaggctaaaatgtatgcaaagataaagttacgcacagaaaaggaaatcataaatagcaaaaagactgtcggcagttatatttatgatacacttttacaaaagcctgatcaaaagattatcgggaagttggtgcgtacgattgaaaggaagttctataaagatgaactcattctgattcttaacaaacaacaagagtttataccagaacttagggatactgaactataccaaagatgtatagaagacctataccctagcaatgaagcacatcgaaaaaacattgctaaaccagacttcgtgaaccttttcgttaacgacattctattttaccaacgtccactcaaaagcaaaaagtcactcattgataattgcccatacgaataccattctgataaagacgggaacatctaccccatcaaatgcatagcaaaatccaatccacttttccaagaattcagactttggcaatttgtacagaatctgcgtatatatcaacgtgaacgaattgtcaataatggtcagcttgatttattcagcactacacccaaaggcaaattgcaaacggatgttgatgttaccgcagaactgctaaagaatgaagatgattatgtaagactctttgaatggctcaacgacagaaattctatcaaacaggacacactgctcaattcctatttcaaaataaagaaggaaaaaggtaaagataaataccccttccgatggaattatgttgaagacaaagaatatccttgcaacgaaacaagagccacgttgctttcaggtttggggaaatgtggtgccaactctgatttcctcacacatgaaaaagaaatggctttatggcacatcctatattccgtcgaagacaaaactgaaattggaaaagccttacaaacattcgccaacaaaaacagtcttgaagagggttttgttgaagtgttctgcaagataaaacccttcaaaaaggagtatggttcctattcagagaaggccatcaagaaactccttccattgatacgaatgggcaagtattggaaagcagaatccattgattgcaagacatctgatagaattgagaaaatcattactggtgaatatgatgaaagcattaagaaccgtgtccgcgagaaagccatcaacctcaaagatattagttattttagaggattacccatatggcttgcctgttacattgtatatgacagacattcagaatctaaagaaatagagaaatggaatacgccagaagacattgaccgctacttggtcaatttcaagcaacattctcttcgcaatccaatcgtcgagcaaatagtcaccgaaacattacgtacagttcgcgatatttggaaacaggagggaagtattgacgaaatccatgtggaacttgggcgtgaaatgaaactgcctgcagacaaacgcaagaagaagactgagcagattcttcaaaatgagaacactaatcttaggattaaagccatgcttattgaattcatgaattcagatgtggaaaacgtgcgtccattctctccaagtcaacaggaaatactacgcatctatgaagagaatgcattggataatcttacaaaagaagatgccgaatatgaatttgtgacaaaaatgtccaaaacggctcaaccttcaaaatctgacattatccgatacagatgttggttagaacaaaaataccgttctccatatacaggggagatgatacctctttctaaacttttcacacctgcatacgagattgagcatatcattcctcagtcacgctatttcgatgattcccttagcaacaaagtaatatgcgaagctgaagtcaacaaactgaaagaccgccaacttggttatgaattcatcaagaaccacgcaggacagattgtacaactcacgcaaggagaaactgtaaaaatccaaacaattgatgcctatgagagatttgtaaaagaccactacaacacaaacggtatcaaaatgaagaaactcctgatggaggatatccctgatgacttcatcgagcgacagatgaatgatagtcgctacatcagcaagtttatcaagggagtattatccaacattgttcgggaaaaactggagaatggagagtacgaacaagaagctgtatccaagaatctaatttcttgcaatggtactattacaacctacttgaaacgagactgggggatggagaatgtctggaacagcatcatacttccacgtttcttacgtcttaatcaactaacaggaaaagattgtttcacaaagcgtaacaatgaagggcacataattcctgtagttccatttgagttacaaaagggcttcaacaaaaaacgcattgaccaccgtcatcatgcgatggatgcaattgttattgcatgtacaacaagagaccatgtgaatctcctaaacaatgaagccgcccattctaagcacaacgcaaaccgctatcaactacagcggaagttgcgtcgtttcgataagattgtaattaatggaaaagaaagggaaattgccaaagaattcctaaagccttgggatacgttcacaaccgatgcaaaacagactctcgaaaatatcatcgttagcttcaaacaaaacctccgagtcatcaataagaccacaaactcctatcagcattttgacgaagatggcaaaaaagaatttaccaaacaagaaaaaggctgcagttgggccattcgtaaatcaatgcacaaggacactgtctttggcgaggtcaacttacgtatgccaaggttcatcaatggagaaattgttgagggaagaaagaaaacagtttcattgcaagaagccatcaataacccagatgccattattaacaaagatttcaagaaaaaagtcaaagaacttcttgagaacggacatgatgtaaagtacatcaagaaatacgtggaagaaaacaaggacatttggtctgacattgattccaaaaagatagaagtgtattatttctccaaagacgaaaagaagagaaacggagaacccaaagaacgttattttgcaacacgtaagccattggacacttctttcgaccagaaaagaataaaggaaagtattacagatactggaattcaaaagattctgctggcacatttggaatcaaaaggtaacaaccctgatcaagccttctcacctgatggcattgaagaaatgaatcgaaacattattgccttaaataacggcaagttccatcaaccaatacaaaaggttcgtgtctacgagaaagcagacaaatttgctgtaggaaagacgggaaataagggaaagaagtttgtagaagcagcgaaggggacaaatttgttttttgctattcttggaacggagaaagagaatatggaaacagaccaaactgtggtcgttcgttcatattttacgattccatttaatattatggttgactgccaaaaagaatatggctcaacatggaagaacaatttagaatcgtatttgaaagacaaagaccttattgccccagactgtaaagtgctatttattctatcaccaaacgatttggtttatttaccaaagaaagaggaggatgattgtacgattgacaaaaatagaatatacaagtttatcgatccaaatctaaacaaaggtaacttcgtaccatattcagcagcagatgtaatcttttccatcaattttgtagatcagaagaagagaggattatcattccccattcaaaacgaatttggtattggaagccaatggtcaaaaaatccacgcgctctcactggtgaaatgattaaagaaacctgtgtccccatcaaagtagatagactcggcaatattattgaatataataagatatcatgattaagaagaccctctacttcggcaatcccatgtacctcagcctccgcaatgcccaactggtgttgcggaagcctgatgcggacaaattagaagagtcgttcaaacaggatgcagaacggaccatcccgattgaggacatcggtgtggtggtgctcgacaacaggcgcatcaccatcactactggagcgatggaggctctgctcggcaacaactgtgccatcatcacttgtgacagcaccaacttgcctgtgggactgatgctgcctctcagcgggaataccacacaaagtgagcgtttccgcaaccaaattgatgcatcgctgcccctaaagaaacagctttggcaacagactatccgacaaaagattttgaatcaggcaacggtgctgaacaaaaacactggagcgattgtcaagaacatgcaagtgtgggcaaatgaggtgaagagcggtgaccctgacaatcttgaagcacgtgctgccgcctactattggcgaaatatcttcccctctctccccaactttgtacgtggacgggaaggtgaccctccaaacaacctgctcaattatggctatgccatccttagggcttgcgtggctcgcggattggtggggagcggactcttgcccacattgggcatccatcaccataaccgttacaacgcttattgcctagctgacgacatcatggagccttaccgtcctttcgtggacgatttggtcatcaacatcatgcaaaagtaccccgattacaccgaactgacacagagcatcaagacagcccttctcatgattccgtcactcgacgtgatgctggatggaaaacggagtccactgatgattgccgttggtcaaacaactgccagcctcgccaaatgcttcaacggagaactgcgtaaaattgcctatccagaattgtagaaaatagcgaacatgagcagtttgtcacgcctcaccgaataccgagttatgtggattttagtattcttcgacttgcccacagaaaccaagaaggacaagaaacgctatacggattttcgcaagaaactccaagctgacggattcaccatgttccagttctccatctacatacgacactgtgccagcaatgagaatgcagaggtacatttaaaaagagttaaatcttttctaccagagtttggaaaggtcggattgctaactataactgacaaacagttcggcaacatgcaacttttctatggccagaaaccaactgagcccaaaacgcctggagtgcagttggaattattctgaaaatgaaaaaaccagccgtcgagctggttttttcatatcacacacccttcttttttattttctaattacacctacaacttcttaatactcttttacttacaaagattcaggtgtatatgactctgcaaagatactaatttgatagcaaatcacaacaatgagtgaaccgtgactaatcatgccctaggtgtatatgactctgcaaagatactaatttgatagcaaatcacaacgaatgaggatatgctttccttcttgcgtgcggtgtatatgactctgcaaagatactaatttgatagcaaatcacaaccaaggaatccttgcttcaaggaacttggcggtgtatatgactctgcaaagatactaatttgatagcaaatcacaaccttgaacgtgtggagggacagaatcccctggtgtatatgactctgcaaagatactaatttgatagcaaatcacaacatgctcaggctggttctgtttctggtggtggtgtatatgactctgcaaagatactaatttgatagcaaatcacaacgacgcttcccacaatttccaatgctgatctggtgtatatgactctgcaaagatactaatttgatagcaaatcacaactggcaagtttgattttgattgtgtttattgggtgtatatgactctgcaaagatactaatttgatagcaaatcacaacctctgctgtttcttctggtcgagaaactctggtgtatatgactctgcaaagatactaatttgatagcaaatcacaacgcgaaaggacagcgtaggtggcaactttgtggtgtatatgactctgcaaagatactaatttgatagcaaatcacaacggggatggactacaagactggcaatcctgtggtgtatatgactctgcaaagatactaatttgatagcaaatcacaaccttaatcaatgcagacagtgaatcaggcaggtgtatatgactctgcaaagatactaatttgatagcaaatcacaacgttacttcgaatggttcgcactccagcagcggtgtatatgactctgcaaagatactaatttgatagcaaatcacaacgaatatgtcaggagccattttcctgtgcaaggtgtatatgactctgcaaagatactaatttgatagcaaatcacaacggaactgtgtttgggaatattgactcaaccggtgtatatgactctgcaaagatactaatttgatagcaaatcacaacaaagtgaacaaagcactctaccgtgatagcggtgtatatgactctgcaaagatactaatttgatagcaaatcacaactgtatgtcggaggtcttgagaacaaggcagggtgtatatgactctgcaaagatactaatttgatagcaaatcacaacacatgggctgtgatgctgaacaaaccctctggtgtatatgactctgcaaagatactaatttgatagcaaatcacaacgcaataccgctacatggaaactgatgcaacggtgtatatgactctgcaaagatactaatttgatagcaaatcacaaccggtggctactactacaacggcaacgaatgggtgtatatgactctgcaaagatactaatttgatagcaaatcacaacggcatcaagatatttaggtggtgtggtttcggtgtatatgactctgcaaagatactaatttgatagcaaatcacaactaaattcggattgcaacctctcgccattgcggtgtatatgactctgcaaagatactaatttgatagcaaatcacaacgccgatgggatgcttggctgcatacgattcggtgtatatgactctgcaaagatactaatttgatagcaaatcacaacataatagaaagattatatcagtcccactttggtgtatatgactctgcaaagatactaatttgatagcaaatcacaacgcccgcgtcaagtgctgactgatacatcgtggtgtatatgactctgcaaagatactaatttgatagcaaatcacaaccgttccacggttacgcttgaacggagcatcggtgtatatgactctgcaaagaaggaatacatgaacaaggcaaacgagggtgtatatgactctgcaaagatactaatttgatagcaaatcacaacaggtgagtgcatctgaattgagagccgtaaggtgtatatgactctgcaaagatactaatttgatagcaaatcacaacagtacaagatgaatggtcagtggattttgtggtgtatatgactctgcaaagatactaatttgatagcaaatcacaacccgtgtcctatcgctacgattggtctaaacggtgtatatgactctgcaaagatactaatttgatagcaaatcacaacgggaccatcactgcattggtgaagagtgttggtgtatatgactctgcaaagatactaatttgatagcaaatcacaaccgttccacggttacgcttgaacggagcatcggtgtatatgactctgcaaagggtgtatatgactctgcaaagatactaatttgatagcaaatcacaacttccctttgcatactttcacactactttggggtgtatatgactctgcaaagatactaatttgatagcaaatcacaacaggtagaagccgttaaagataatagacgtcggtgtatatgactctgcaaagatactaatttgatagcaaatcacaacagtaccgcacccctctcttgattttcacagggtgtatatgactctgcaaagatactaatttgatagcaaatcacaactatatctatgcttatattgaaattcttgatggtgtatatgactctgcaaagatactaatttgatagcaaatcacaacagttagatgatgatcgatctaaccgttgctggtgtatatgactctgcaaagatactaatttgatagcaaatcacaacaaaaaaccacaaccaccgaagtgtttaacggtgtatatgactctgcaaagatactaatttgatagcaaatcacaactgtgcgttttgtgaagttgagattgcaaaaagaagtgtttttgatgtgttttcacatgatattaaaataaatatcatttttattaagtattattttgtggatgatattaaaattcatacctttgtgttgtcaaaacaaacagatttatttaattattaaaaaatgaagtacaatgaattagaaaagaaactcaaaaaaattggatgttacgacacaggcgaacaacaaaatggccaccctttatggttcagcccagtaacaggaaaatttttcaagatgagcaatcacggaagcgatgaggtggcaaaaggaactctttactcaatcaaaaaggcagctggtctcaaatgaccagcagccttcaaaaaaatagcctacaaatcaatcaataacaaataatcttaatttccacagagaatttagggttcccaaaattgtattaacaatgagaaagactaaagcaatcatcgaacgcgccaacgatggtaattacagcgtttacatggatgctgacgatgtcagctaccttgtgacaggcacaggcgcaacagtagaagaagctgtaaaatgcttcgaggatggttacagcgacatgaaagcgttctacacaaaaaaaggtatgaagtttgaagaattggagttcgtatatgaatatgacatggcttcttttctttcctactattccaagaatttctctcttgcaggtttatcgaggctcactggaatcaatcagggtcagttgagtcactatatgacaggaagacgtaagccatcacgtatgacagtcatgaagatgcagaactccattcacaaattcgctggtgagttggaaagagtgaacttcgtttagtatcatttttcattttttataaataaatctgttgccttccacagcaatgtggagggctttttatttcccgagttctttctttagcacctttctcccttcgtggatgcttcgcttggtgtatatgactctgcaaagatactaatttgaaagcaaatcacaacactcagcttgcttacctattaaattaatttggtgtatatgactctgcaaagatactaatttgaaagcaaatcacaaccaacaggattgactaaaaaaaactatgcagaggaagtttttggaagctaaaggctgaaaaactgcggcttttttgttttgttttccgaaaaaatgtaactttgcgaaatcatttgtacaacaacatcttgataacctattcagatatgagtatgaagtatttgactatcatgttgatgatgtctggcctgattgtgtcggcatgcagcaacaaactgaagagctacggctcggacgttgagagtgattctattgagagtgattccattgcaagggtgacacagcggctggattcgatagatgcggagtattatgtgaaggagcggagcatcgagtccatcagaagggtgtgggctgacaagaagattaaggtggatgccgaccctgcagcgttgggcatcagtcagctggccctggcgttctgtcagacttatccacagtgtgacacgaatgaggcactgaggagatatcttgtcgctccgcacactgacggcaaggatttggatagcctttccttcaagtcgccgacctataagcacacgtttacctactggattgagcctgcgttgaagaacggttacattcgctgcatgggggaaacgcaggttgaccgcaccacgtttgtgtgcttctggaaccgcaagaacgggcacaagctgtttgcggccttcatggaggagtgttgggagacttcgacgtgggaggagtgtctggtggtgttctacgactatgatcccgctacgagggtgatgagtcctgaacctgctctgacgaacttgattgaaaagcgcatgagggattatgacgcgtattcggtcgttctgcctaaggatggtaaggacatcatggtcatgggcttcatctttggtgatgaggaggaagaggaagacaacagtgaatacgtggagctgaatctgaaatggaacggtatgacgtttaattggggaaattgaactgaaagaggatgtgacttgaatgaatcagccccgaaagttttgtgtgactttcggggctgattcggtggatttataggattgattcaaatccacacacaggcttttgcaagtgttccgtttctcacctcatgctgttctcagccagcaggtcgtagcggataccgtcgttcagcatggagactccgattggttctgtttcgggctgcttctcggttttctgcgagggagtgcttcgttttgccaactggtgaggcgtgatgggttgactgactggttttacttgatagacggtgtcgtgtaccacttcgtgcacggtcacagtgtcggtgacaacgatggtttttgccaattctgatgcaggtgtctctgctgacgggcgcagatataaacccaaagcgaaacctgcaagacaggcggctgggatggcgacataccatccccaacggctctgacgcttccagggacggatgtgcatgcggtcattttgttcctgacgcagttggcgagcggcagcaatgatgtcgtcattgctcaaggggctctgtggggaatgtgtgttatgggttgtcatattgctgtagtttttttcggatgatggtcattgttttgtgcagtctcgacttcaccgttccttctggcagatgttctatctgtgcaatctgcgggatggtgagttcctcctcatagcggagggagaagagcagtcggagcggtggcggcaaggactgtaagacggagtaaagggcttcgttcagcctttccttatccatcttcacttccacctcctcgtcgctgacgggttcgacatcgagggtggagaggtagtcggtcacatgctcgttgtgacggtaagtgtttttgcagagattgtaggcgatggagaagagccatgtggcgacgttgctgtcttccagatagcggtctcttgcctcatacattcgcaggaacacgtcgtgggtgtagtcggctgccatcatctcatcgccgcccagttgacggaagaagaaaccctgcaggcgtcggacgtatcgacggtagagttcctcaaatgccgactcgctgcctcggctcacacggagcatcagctgctcgtcggtcatttgacggtttgatttgaagagaagaatgctcatgggttcactcctgatcaaggtccaacttcatcgtttcatactccaaatagttggggctatccgcctccaaactgaggttctccatgtcatagctctgtgaatgcagctgctgatagagatgggccagcaattccctgagccacgtgtagcgttccgcgttgtgcttcttgtaatagggaagttggtcgcgcaacaagataatgtagttcatggcataaaagtttaccttcgcactctcccgtttctccggcttgaacgacatgcgcagatactccatccagtagcgcgtctcgatgttgcgccgcttcaccgccatgttgtcgtagggctttggggaatagcgcagcgtgagtccctcgttgtagaagtgaggctgcaaatccttcggaatgccttccccgaggcagaaccaggtcacgcttgtggctgacacatagacgggacgcttggaatgggtgcagatatggcggaagatgcggggatacgattcgctctgaatgggcgaccagagtttttcccataaagcatcgtcgaaatccatcccgatgcgcttgaagacactcccgacatattctttccataccgcacaattctcgttgtacagaattttgtcgcggtgcacccccttcaccagttgcaggatgagcttgccaatgatgtctccatcgtaaggagccagatagacagccccctcgtccatgccctgcagttcgttgaaatgatattgcagttcctcggccgggtagagcccgcgttcgtagtattcggtcagcacgcgcgtcaaccgagcggtgtcctgcttggggatgagatagcccgcccatgtcttataatccgacgccacggcatcgtgtggcaagtggtcaacggcaaggtcggcaaacttttcatagtgttcgaagaactcttccgagctccatccttcctcccggtatgctccttcgtacgcgcaataataaaatgtataggtatcgggtatcgcctgcttcatgcgacccaccacattcagttccttgcgcagttcctcgcccttgttccagtccttgaagtgcagacgctccaccaagccgttttccacttcgaagaggtttcgccacgccttctcgtccttcgggtgctgagccacgaagtcgttccaatagctgtacaggctgtccagcttttccttcttctcgaggagcatctcgatatgcccttctatctgttcagtctcctgcgcacagacatttgctgtacctgccgcgatgagcaacaatgcaatcaatatctttttcattttcttctacgttttgtttggttttctaattgtttcactgtccgaaagcacttgacgtctttttgcttttcatgacagcatacacccgaaaaccgaaaccgttcacaaaaacagcatctttttttgctcactcgtaaacacctgtgtctgtcttaaacaaaaacactctcaagtaataaaaccgcggatttagcagatttcacggatttatttctacaaccacgaatttcacgaattgggagagccttggcggctcttgggaaaccatccggacggggctttcgccaagaaagccaaaaattcgtttaattggctacgccgagctgaaggttcgtagtcaagaaaatctgtttaatccgctcaatcgttccacaggaacttgttttaacgtgagttcggtataagaagttgcgccgttggcgccgaaagaaaaatagataaaaacaaataaaaatagataaaaagatcatggggatgattaagcagattgggcggatttatgggatttatccaaatccacacacagggttttactggtgaacgtgcagcagcacagtgtcggtgacaacgatggtctttgccatcgctgatgcgggtgtctctgctgacgggcgcagagagaaacctacaagatatgggcagctaccaactcactgacaagttctttgccatgtggctgttgaggaaggattgagcggatgaaaaacagacagtaaacgccctaccctacaccagcccgttcatatcccggctgattgcctgcaactgagagcggatgtctttcagtttctcgatgacctcgatgttgcgattgacggtcttgcttttgtcgcgtcggatggcatcgcgggctccctgcaaggtcatgccgcgttctttcaccagatgatagacgaggcgaacctgctccaagtcggctttcgtgtactgacggatgccacgacctgccttttgtggcttgatgttaggaaattccttttcccagaagcggagcagggtttctgtgacgtggaacatctgtgccacttcgctgatgctgtaaaacatcttcaaatctttgttcttgttcagtgccatagggatattatgctttaggtatgttcttcaatatttcaagtgtgaagttgtagaagcgctccacggtggggatgtggcaggcttcgttgggggtgtgggggcttaccaaagtgggaccatagcttgccatatccatgtcgggatagttcacaccgatgatgccgcactcaagccctgcatggcaagcacccaccactggacgttt

SEQ ID NO: 1044 - DNA, 24719 bp, synthetic construct
  misc_feature 1..24719: note = Synthetic
  source 1..24719: mol_type = other DNA
gttgtttttttagtcataattgttttatagattaaaattgttgtttttacttagggtggcttactagctttgattttctttgctagagccaccccctttttaatacaccgacatattgccaaaatcgtctcagcggcgataatgattgcatcattcagatcgtccgctttcatcaactactggcgcatcggctactactttcttgtttctacagagccgaggaatgacgtgctgacgggtaaaggtacagatatgtaccaccatttcagcaaggattacgatttccccagcgtaacggatgcctctaagggcatttacaaaaattgcttttttcattttgatgttattttttaagtgttaataaataatgttatttgttctcttgttgttgttctttcaaaaataaagcgagccaattttacctttttcagataaaatcagctctacttcgatttaggcttttgcaaatcctcaaatataacaactccagtgttacagttgaaaatccaatcctaacgccaaggtcttgggtgtctgtagctctccgcgtacagtcctcttaaaacctaatatttgaaattaaagtacgggtcttaaaggctcttatggcctctcgccgtacaacgttgtatatgattcatatataaggctttcaggtgatctggcacggtgtatgaaaaatgcgcttaaaacagcctatttttcttataattgtgaaactcgaaaacacaatcattttccgaaggggctgtctgtgaagatagtcctttctattttgtgattttgcgcttcacaagccataatctccttaccaataatgaataaattatacattaaatttttgaagttatgttcagtttgtttaacgccctgtttggtacgaactcacgaccagacttagggcaggcgcaggaggctacaactgcgacaaaagaaaacagtagcccatcggtatcagttcaaccagagccaccaaaggcaaaaggcaagtatgaagccgatgttgaatcactggaggccagattcgggtctctcaaatcaactgaactctgcattaaccttagcgacttattgcagatatgtgagcgtaaacgcaagcgcatagaagcctaccaaggacttatcaattatctgaaggccgaatatgatgcaactttaattattaaatcacgaaagacaaaatgacgaaaaagttattgctattcggaaatattcgtaacatcgaggtcgaagattcattgcagaacagacaggtggttatggatattcgtaaagagttgaagcagttggatgattgttatagctttgatttgattgttgataataacaacaatattgtcgctgtatatcattatgactacgttgacttaaatctggtaacagaaaccttcaacatcgaagtaaccagattggtaacaggagaaggtgcttgtggttatgaactgccatttcccatagcagatgccagtgatgaatctatcagccaggaacgatttgctgcaatgtggcaaaagaataatgtagctttaggcggcagtcttggtgtaaaaatgattgaagttcaagcatccttcactggtatgttagtaatcttcaaatataatactgtatgatgatatggtttttcggtaaagtgtacgatgacagtatgcttgttaccgacattgagaatgacatcgaggcgcgactgaaggaatacacaaacgttgagattggcgtatgcttgacagtccgtgatgatggctatgaggtggctttgcataggagcttgaacgttgatccaaaggagggctgcatactggaggtagatacattcctgattagcggagtgggctatagtagagatatgcctgaatataggaatattggagatccagagcaccaatcgctctttactcactacttcaatttgcctgagtttgaaaaggcttgcatgagaagcatcaagcagcagacaggacagagagtaaagaatgtaaaggtgaaggaatggactaccatgcttttgcttgaagcgaagtttgattaaccttggtgtgagggggtatttttatttattgcttgaattgaaggatttattcagtaccctcacaccactaaacacatgatgacaatggtacatgatattaaagttgaagaaagaatgtttagtgccgatatacaggcactatgcgactatgatgacggattcaatgaggcatggaatagcggttcggaatacgaaatgacgatcatgctgtccgacctcttcggaatctgccccaggagctatcagagaacgctaatgtacgagagactggtaaagttcttgggcgtgaagaatattacactaaaggtaatatcaatgaaaacaaaaaagaaaaaagaaaattgattatggcaacaaaatggcgaaagtattatggagtcaaaggactagaggtaacggaggctggtggtgtcagacgttactacgacaataattggacttatacaggaaagtctatttatcctcactctttacagcataagacagatgaaaatggtaacaagtatgttattacacgcgaccacggaaaactaatggtagatgaacttgttgctacctgttattggggcagaccaagagacgggaaagtgtttatcatacacaaagacaagaataaaagtcattgttggaaagataacctcatgtgggcaaccccttacgaatatggtgaacattacaaagatgatccaatgataaacacctcagacggctataggcttgttgacgtaacagaacagagtgggaaaatatatgtgtcgaaagaaggcaaggtgaaaattgaaggtaatgaggcgaagatttgtgtagaaagctatgatagcgatgttgactacgaaaggccaactcaacctcatgttaatgtttacaggaaggaaatgtacgctcatgcagagtatatcgaagaccttgtgacaaaagcattcctgccaaaaccgaaagatatggaaaacccgaaaatacttcataaaaacaacaactacatggattgctctctagaaaatctggagtgggttccttttagtgatgagcgataccaagcctatatcgccattcgtacacaggaattagacgcaatagataaagccaatagagagaaagccataaaggaaaaagactattggcgtgaacactttagcagaaaagcatagatgatattacaccaattgacagggcagatattcctgaataggaaagaagccaaacagacgatggggcatagccgattcaatcacgctttgagagataaagagattgtgtttgtttcggttatggcctaataactataataatcatttgacttgcctatgattataaatacaaattacgcctttcgggtgaacatatcacttgatgggtatgcgaagaaaaccgattcaactgcctgcctgagtaaaacaggtgcaaaagcaatcggaaaagaaaaaatggccttcattgaacagaccataacagtagaagatttcctgaattatgccaatagcggacattcattcgctaatctattcagttttaatccaaacgaaaaatattggcttgaaagtaacggaaaacactaccagagctatccagtttacaaaaatggagctaataagggggcaatgaagttgaccttcaaaactgaccagttctatagtggttctcaaactgttttcgtggatattgacgatacaaagtatgccactttgacagactttgtggggaagctacccatgcagccaacagcagcatattcttcttattccgataacgtagataaacatgggaaaatttcacgtcgttggcgattggtttatgtgttttacagcacgctcggactggaagatttcaaaaccacatcgaaagcagttcacaggtatattgaactttgcacaggagaaccgatggatgataactgcggaacacgaccttcccagtatatgaatggcggtttacagactggcgatcttttcaaatcaggctacatctatggtattagtgatttctcgccgtatgaagtgccagataaaacttgtgatgcagagtccgattcatttcaacccattttcaatgaagaaatggttgaggacatggatagcatgagctacgagaactttatgcactacaattcgtggagaggctacacttacagaacggagagaagggatgcctgggaaagaggtatttatcaactaacagatgataattaccttcagctctggtattatcgtgaaacggttaaggatggtgagcacaggagaagaaaacttttcaaaaatgcctgtttgcgcagattgatgaatccttgtatagatgctgacagcctattatttaacctttatgtcgatgcgcataggttctttgaaaactcagatggtgttcttactgtggactgcctgatgagcaaagttatcaaggctatgagtatgactgaggaagaattgaaagagtattgttcatgggagattgactattggcaaaagaatcgtcctaagtttatcttgaatagcggtgtagatcatagtatttctgaggtaaattccatctgcaaagagatacggtataaagaacttgaccttctctatgacccatccatttcagtccaggagaatattgccagaggtcttgatgtgtcacaggccacactctatcggtactgtgctgagaggtggatcaaaacaaatccccaaaagccaatgacctatagagaaaagcgtaaagccaagaaagcagagaagaatggtgaaatcgaacttttcaagaaactatatgaccccaaattgtcatttcgagataacttgaaagttttgaatcaggctggagttactataaaatctattgattcagtaaagaagtgggctgaaaaatattacaaacttgtaattgaggaaacaaatgatcaaccttttcatttcccttccttttcagatttaacaaataaagattgtatattcagttgaacaattacagaatcgagggaacctcattttcggggttccctcaacttcatatatatagtagttataactactacttattatagcagaatgagaaaaatgcacaaaaatcgtacagtttaaaataataacacaatgaaatacttaggttcaaaacggcgcatcgtatctgaaatattgccgataatgctaaaatccatgaaaccagatatggttttttgtgaccttttctgtggagggtgtagtgtcgtgggagcagtaccaacagaatttagaagaattgcatctgacaaaaatcgctatttgatagccatgctaaagcgattaacaactagtaactggaaaccgccgacagtgataacaaaggatttttatgtcaaggttagggagtcttaccgtgcagatgatggaaaatttgatgatgctacgattggttgggtgggattcgttgggagttatcaagggcgtttctttgatggcggttacagtggccatgctgtaaaaggccgtgattatattcgtgaggcaatagccaatatcaatagacagttagatgacttgaagggtattgagtggcagactggaagttataaccaagcaaccatcccagtcacttcattactctatctcgaccctccttattatggaacgtcaggttacaccacatcaaaggacttcgattataattccttttacgactggtgcaggcagaaaaaacgtgatggtcatacagtttatatcagtgaatataatatgcctggtgatttctcatgtatatggcagaaacaaataaccaatagtgtcaatcttaccaagacctatcaggctacggaaaggttatggacgctgtgaataaaaaagaagagagattgtagtgaaaaaactgcaatttctcttgattttttaaaactaaaagttatgttttatatataataagaaagaaaaatatcttaactatgagaaagatttttattacagtagctgcttttcttcttcttttggaggcaggctgcacaaagattcagcacgagcatttgcattatgaactgcctgagtgggaggtaattgcgaccacgacagttagggtttctggagacacaagtacaggtttctcctattattgattagaaagggatgacaggttcgtccctttatgtcattgatgaacataggcaatgagaaatcttcaaaaacttacacaggtaccgtcaaatgtagcattttgaggcgctttctaaatgaaatcacttaaataatcttaaaagatgcagggggagcagtaagggggagcagttttatagaaaaaaaaagaaacccactgaaaatcagcgggtttcaaagattcttggcggagagagagggattcgaacccccggtgcctctcagcacgacggttttcaagaccgttgtaatcgaccactctaccatctctccagtgcccgaaaagcttcgaaagcgggtgcaaaggtacgatatttaagtgagaaatgagtaatgagaaatgagaaatttctgctcgttaaggaaatttaacagccaagaaccctaaaaactcttaactcatacccgttaactcttaacttctttgtacttttgcaccatgatttacccacaaaactttgaaacgaagataggattccacgaggtgagacacctgctgaaggagcaatgtctgagcccgttaggcaaggaaaaggttgacgaactgaccttctcagccgacgctgacgaggtgaacgaatggcttgagcaggtacgtgaattccgcagattacaggcggagaccgacggtctgccgctcaactatttcttcgacgtgcgcgaagccattaaccgcattcgcctggaaaacacccatttggaggaggacgagctgttcgaccttcgccgctcgttagagacgattggcaacattgtgacttttctgaataaaggagacaggagccaggacgcggaagacgaacgagtggaatacccctaccctgcccttcaccgcttggccgcagacgttatgaccttcccagccatgatacgccgcatagactccatcctcgacaagttcggcaagataaaggattcggcctccatgacgctggccggcatccgccacgacctgtcgcagacggaaggcagcatctcgcgtaccttatatactatattgcatgccgcacagcgcgacggtctggtcgataaggacgccacccctgccctgcgcgacggtcgtctgatgattcccgtggctcccgccctgaagcgtaagataaaaggcatcgttcacgatgagtcggccacgggtaagacggtcttcattgagcctgccgaggtggtggaggccaacaacaaagtgcgcgagctggaggctgccgaacgccgtgagattatccgcatactgacggtattcacggctgaggtacgtccgcaggtgcctcagctgctgggcagctacgatttcctgggtcagatagacctgatacgcgccaaggccgaatgggccgaggccacacagagctttgagccgacggtcagcgaccgcccgctcattgactggatacgcgccattcaccccctgctgcaacgctcgctgaagaagcaggacaagcaggtggtgccattggacatcatgctggagaagactctcccccagcccctccctcgcagggaggggctggggggtgggtccctcctcatcatctccggtcctaatgccggtggtaagtcggtctgtctgaagacggtaggactgctgcagtacatgcttcagtgcggcctgcccattcccatcggcgaccgctccaaggttggcgtcttccacgacatcatgattgacattggcgacgagcagagcattgaggacgacctctccacctactccagccacctgctgaacatgaagatgatgatgcggcaggccaacgagcacaccctgctgctcatcgacgagttcggcggcggcacggagcccaccatcggcggcgccatagccgaggctgtgctcaagcagttctggcagaagaaggccttcggcgtcattaccacccactaccagaacctgaagcaatttgccgagaaccacccgggtgtcatcaacggtgccatgctctacgaccgccacgagatgcgcgccctgttccagctgagcatcggccagcccggctcgtcgtttgccattgagatagcccgtaagacgggcattcccgaagaggtgatacaggacgctaccgacatcgtcggctcggagtatgtgcagagcgacaagtacctgcaggacattgtgcgcgacaagcgctactgggaaggcaagcgccagaccattcaccagcacgagaagcggttagaggagcgcggcgagcggttagatgccagcatcgaagagatagagcgtgagcgtaaggccattctgcggcgtgcccaggagcaggcagaagagctgctgcgcgagagcaataagaagattgagaacgccatccgcgagattcgcgagagccaggccgagaaggagcgcacccgcctcattcgcgaggagctcaagaccttcggcgacgaagtggccagcatcgacacccgtgccaacgacgaactgatagagaagaaaatccggcagatacaggagcgcaagaagcgtaaggaggcaaggaaggcccaaccccagcccctccccaagggcggggagcccgccgccgccaagacgcctgcccccagtgcagggttggccgttggcgacaccgtgcgcataaaggggctcacctccgtaggcaagattgaggccattgagggcaagatggccaccgtcatcttcggcggcatgcgtaccaagatgcgtgccgaccgcttggagcgcgccgagatgccgaagaccgaagagaagcacgccggcctgggccagatgcagttcagccgtcagacgcgtgagaccattgacgaacgccagaagaacttccgtcaggaccttgacgtacgaggcatgcgtggcgacgaggccatcaatgccgtcacctatttcattgacgacgccatactggtgggcatgccgcgagtacgcatcctgcacggcaccggcacaggcatactgcgccagctcatccgccagtacctgaagaccgtgcccaacgtcagccacttccgcgacgagcacgtacagttcggcggagccggcatcacggtcgttgacttggagtaaaagaagaactacagaaaaataccatcaaatccttggttgcataaaataaaatcagtacctttgcagcgacccaagaagaatgtcatgccctatttatgactaacgtaaagccgagtcaacgtgaatttgaatggagtttaaccaggggcaacccttatcgtgagtaagactacaagcagtcaactaaaatggttaaactacaaaagtcagcaaaaaactaagtacagcacggccgtgctgaatattcagcacgggcgtgcttgatattcagcacgggcgtgcctgatattcagcacgggcgtgctgtaccggagagaaccgtccaaactcccaccttggacgggccaaactcccactttggacgggccaaactcccactttggacggggcttggtttattaaaagttccactgggtagtttttgtctcgcgcagagccgcagagtagaaagagctttatccctacgtgtcttttggctgcgcatgattggtggagaactatagagagcggcccttggccgcttaaactcccccgaactctcctgctctaattataccccctcagcgaaaactcagtgttctcggcggctctgcgcgataaaacaaaacatgagaatcttaaattcaatttacctttactagatgatacttaattggagttatcgaagttgaagaagttaaccacaaaaaaaagtccaccgttgaggacgatggactgggacctaatgttttcacaacggaataatccttattgtgatttgctaaaaattagttctgcaaaaataaactttttctctgaaaacaccaaatgtttcaaaagatttttgtacttttgtggcataataactaaaaatactgacaaatgaagaagattttaggccttgatttaggcacaaatagtataggttgggcagtagtcaatgctgaagaaattgcccgtgagaatgctacaacttatttgaaacctttcaacatcagttctacggggagtagaataataccaatgtcagctgacatattaggagattttgacaaaggtaattccatttctcaaactgcagaaagaacaagacttcgcatggttcgtcgtctccgtgaacgtacccttttgcgtcgtgaaagattgttacgcacactgaatgtattaggtttcttaccaaaacacttcgcaagtcatattgatcaatatggtaagttcattgacgatagcgaacccaaattaccttggcttaaaaatgctgagggcaaaatggagttcttgtttatggattcataccacgatatgttagctgattttgccctacaccagccacagctaattgcagacgggaaaaaagttccttatgactgggttgtctattatcttcgcaagaaggcattaacacaacgaatctcaaaagaggaactttcatggttgttgctgcagtttaatcaaaagcgcggttattatcagctacgtggtgaagaggacgaagaaaaatcaaatgagacaattgagattattaatgcaaagattctttccgttgagaaaaaggaaaaggataagaaatatgaaaaattctggtacgaaatgaatcttgacaatggaatggtgtatcgtgcaacgttctataatgatgtgtccgaatggagtggagaaagtaaagacttcgtattaaagacaactgttttgaaagatggtagcacgaagaaagaattatctttcctgcctaccactgacgaaatagagaggatgaaccctcaaagaaaagctaagctgtacgccaaaataaaactgcgtactgaaaaggatattctgaacagtcataaaacggttggtagctatatttatgatgccctattgcaaaaaccaagtcaaaagatcattgggaaacttgttcgtactattgaacgaaaattctacaaagacgaacttatcaaaattttggaaaagcaacaagaactaattccagaactgagaaatgaagcactttatgagaaatgtacagaacaactataccttaccaacgaagcgcatcgaaatacaatctccaaacctgattttgtcaatctattcgttaacgacatactattttatcaacgtccattgaagagtaagaagtcactcatagacaactgcccttatgaattccataaagataaaaacggcaatatataccctataaagtgcattgccaaatcaaaccctctctttcaagagttcagactttggcagttcgttcaaaatcttcgcatttatcagcgcgaaagaattgtcagcgacggccaactggatttgttcaactctactccgacgggaaagttacaaacagatgttgatgtaacggcagagctacttaaaacagaagatgactatgtcaagttgttcgaatggcttaacaatcgtggttccataaagcaagatatattgctgaattcctacttcaagataaagaaagaaaaaggaaaagacaaatatcccttccgctggaactatgttgaggacaaggaatacccgtgcaacgagacgagattcacaattctttcaggtttgggtaaatgtggtatctctccagacttcctgacacatgaaaaagagttggcactttggcatatactctattctgtagaagacaagatagagattggcaaagcaacgaaaagtttcgcagcaaaaaacaatcttggagaaggttttgcagaagtgttcagtaaactgaagcctttcaaaaaagaatatggctcgtattctgagaaagctatccgcaaactgcttcctttaatgcgaatgggtaactattggaaggaagatgatatagacgctaaaacgcgtgaacgtatagaaaaaatcattacaggcgaatacgacaaggccattaagaatcgtgtacgtgagaaagctttaagacttacagaaacaagccacttcaaaggcttgcccgtatggctggcttgctatgtcgtttatgaccgccattccgaagcaaaggaaattgagaaatgggaaaagccagaagacatagatcgatatctaagcggcttcaaacaacattcattacgcaatcccattgtagaacaagttataatggaaaccctgcgcaccgttcgggatatatggaagaaagaaggtcagatttcagaaatacacgtagagcttggccgcgaaatgaagaatcctgctgataagcgtaggcagatgacggaacgcattcagcaaaacgaaaacactaatctccgtattaaggctatgctgatggagttcgccaatccagaaatgcatattgaaaatgtgcgtccgttctcgccaagccaacaagacatcctacgaatatatgaagagaatgcccttgagaatctcacaaaggaggatgaacaatacgaattcgtcacaagggtatcaaagatggcccagccttcaaagtctgacattatcagatacaaatgctggcttgaacaaaagtatcaatcgccatacaccggcaatttcattcccctatccaggcttttcaccaaggactatgagatagagcacatcatcccaagagctcgttattttgacgactcgtttagcaataaggtcatttgtgagtcagaagttaatagtttaaaagaccgacagcttggatatgaattcatcaagaataacccaggaagaatagtgccacttagtcaaggaggtactgttcgaatccaaactgtggaagcatatgagaaatttgtaagagaccactatgcaaccaacaggacaaagatgaagaaattgctcatggaggatattcctgacgatttcatcgaacgtcaaatgaatgacagccgttacattagcaaagttgtgaaaagtctgctttccaacattgttcgtgcaaaacaagaaaatggagaatacgaacaagaagctgtatcgaaaaaccttatatcgtgtaatggtactataaccgaccgtctgaaaaaagactggggtatgaacgatgtatggaacagtatcattttgccacgcttcctacgtttgaaccaactgactggcaaggattgtttcacgacgaagaatcgtgaaggtcatgttattcccaatatgcctttagaactgcaaaagggtttcaacaaaaagcgtattgaccatcgccatcatgcaatggatgctattgttattgcttgcgctacccgtgaccatgtaaacctgctcaacaatgaggctgcccactctaagcataatgcaaatcgttatcagctacaaaagaaactcaggcgcttcgagaaagctatcaatggctatggaaaggaaattgaagttgccaaagagtttataatgccctggccatcatttactactgatgcaagacaagtattgcaaaacatcattgttagctttaagcagaaccttcgggttatcaataaaacgacgaatttttatcaacattacgatagcaaaggaaaaaagatattccgaaagcaaaccgatggtgatagctgggccgtacgcaagtccatgcataaagacaccatttttggtgaagtcaacttacgcaagaaaaaggcagtctcactaaacgaggctataaaaagacctaatagtatagtaaacaaagacttcaagaagaaggttatcgagcttttgaaagaagggcgagacgccaagtttataaaaaaatatgtggacgagaataaggaagtatggtctgacattaatactgctaaaattgaagtttactatttcacaaaagacgaaaagaaacggaacggagaacccaaggaacactattttgctacacgcaagtctcttgacaatagctttgaccaaaagaagattaaggacagcgtaaccgacactggcatacagaaaattctgttagcgcacttggaagcaaaggacaataacccagagcaagcattctctcccgatggtattgaagaaatgaaccgcaatatcatcgctctcaataaaggcaagttccatcagccaatcctgaaagttcgtgtctatgagaaagctgacaaatttgctgtgggacaaacaggaaataagaccaagaaatttgtagaggcagcaaaaggaacaaatcttttttggggcattctcggttctgaaagtatcaacaaggaaactggcaaaacagaaattgtccgttcttatctgactatacccctcaatgtcatgattgaatgtcaaaagaagtttggttccaaatggcaaaagaatttagaagcttatctacaggaaaaaaatttaatcagcaccgaacaaaaaatcctatttacattatcacccaatgatttagtgtatcttcctacaaaagaagaagcccataataaaatcagcattattgacagaaataggatttacaagtacatcgaccctggtatgaatacaggaaactttataccttttgccgtagctaaaactatcttttcgatgaagttttctgatcaaaagaaattagaaatagagatacctattcaggatgaatatggactggggagccaaggatcaaagagccctcgtgccgttacaggtgaaatgattaaagaaacctgtatctctattaaagttgatagactggggaacgttgtcgaattaaatggtgtaaagcttttatccgaatgattaaaaagaccctatgtttcagcaatcccgcttacctctctctgcggaatgcccagttggtaatcaagctgcctgaggtagaaaaggcagacaacctgacagaggacttcaggaaggcaacagagttaacaagacctattgaggacattggagtagttgtgcttgaccacaagcagattacgattactcaaggagcattggaggctttgcttgaaaacaactgcgctgtcattacctgtgactccagccacatgccagtcggcttgctgcttcctttggtgggtaacaccactcaaaacgaaaggttccgcgaccaactgtccgcttccctacccttacgcaaacagttgtggcaacagactatgcagcagaaaatacgaaatcaggcagctgtattaagtacgcattcagatgcagaaacaaaatgtatgcaggtttgggcaaatgatgttcgaagcggtgatccggataatttggaagcccgtgctgctgtttattactgggggcatctgtttggacatattcctggattcatcagaacacgggaaggtgtagctcctaataacctcttgaactatgggtatgctatacttcgtgcagtcgtagctcgttcccttgtagccagcggacttctccccacccttggcatccaccatcacaaccgctataatgcctattgtctggcagatgacattatggagccttatcgcccatatgttgatagtttggtctatgacatcacggagcagtatggtgtggatgttgaactttcaaaggacatcaaggcagaattgctctccatccctactcttgatgtggtgattgccggcaagcgtagcccattgatggtaggcgcagctcagaccacagcttctctttataagtgtttcagcggggaacttaggaaaattgcctatccagagttatgattgcagaacggtttagcgaatacagggttatgtggcttttggttctcttcgacttgccaacggaaacgaagaaagatgtcaaggaatataccaaattccgaaaacgacttttagaagacggcttcaccatgtttcagttttcaatctatgttcgtcattgtgccagtatggagaacgcagaagtgcatcgaaagcgtgtaaaagccatcttgcctgagtttggaaaggttggcattttatgcatcacagacaagcagtttggaaatatcgaactgttttacggtactaaaccacaaaagcctaacgctccaggccaacaattggaacttttttagcaatgagaccaatgttaagtttacttgtacattggcgaggcgcgacaaaaagtattcgaaactatttcttttttagaaaaggagaattctacctctatgatagaactctcctttttcaatgcacctttttcttttcctaacaatctctgcaatcatctgaatctcaatatgttttcagaattcagttgtttatgcaggtgcaaaggtactaattttttagcaaatcacaactcactcaggtaattaaaagtactgacattgttgtttatgcaggtgcaaaggtactaattttttagcaaatcacaacagtcctgaaatccgtccaggttcttaatcgttgtttatgcaggtgcaaaggtactaattttttagcaaatcacaacaccttgccgtctgtaccgaggacggggcttgttgtttatgcaggtgcaaaggtactaattttttagcaaatcacaacttgtgagcaacattacaaaagagcaaactagttgtttatgcaggtgcaaaggtactaattttttagcaaatcacaacgtgcaaggtttttaaacctcacgctcacaggttgtttatgcaggtgcaaaggtactaattttttagcaaatcacaacgccaaatccttataggtcttggcattttcggttgtttatgcaggtgcaaaggtactaattttttagcaaatcacaacgggcctggccctctttcattttgccctcgggttgtttatgcaggtgcaaaggtactaattttttagcaaatcacaacggtttcaccattgttaatactctcgttttgttgtttatgcaggtgcaaaggtactaattttttagcaaatcacaacacatcgtatatcgtatattccgcttgcagtgttgtttatgcaggtgcaaaggtactaattttttagcaaatcacaactaaatagaactgaccgcgttacgtaatttcgttgtttatgcaggtgcaaaggtactaattttttagtaaatcacaacagaattagtactgaatcctgaaatagtcgagtgatgttttatactggtcttgtgccgtcaggcaggtgtcggtgaggtttccgttgatgtggccccactcacgcagtcccctgtaataaaagaacttcagttcgtcagtgatgataaaaggaacaatggcattagccagacactccttgaacatcacgaggcgccccactcgtccgttgccatcttgaaaaggatgaatacgctcaaagcgcacatgcaggtcaaggatatcctcaaagcggcgctcactggccagataatcgtccaacagggcgtccatccgctctgccaccagttctggcgggcaggtttcctctccccccacttcattgggcatccgtttgtagtcgcccacagcaaaccagtcttttcggctgtcagaagttccgttcttcaacatgccatgcaactccttgataaagccggtcgagagatcatcggtagcatgttcaataacaaggtctatacaacggaagtggttgaccgtctccaaaatatcgttcacattcaggacatcatctgtcatgccgatagtgttagtctcaaagatgtagcgggtctgctcatgcgtcagtttgctgccttcaatatggttggagttgtaggtcaggtctatctgcgtcttgtgatagacaccgcctttcattcccatttccttttgctctttcaaggcagcgagcaggggcgaaatcagatgcttgttcatcattatattacggaccaaagatgagcgattcagaattaattttgcaaaaatacaaattaatgcgcaaaagacaaagaatttgaacggaaaaatttgatttacctttgccagatgattcaggacgctaccgacattgtggttcagaatacgtgcagagcgacaaatatctgcaggacattgtgcgcgacaagcgttattgggagggcaagcgccagaccatccaccaatatgaaaagaagttagaggtgagaggtgagcggttagatgccagcatcgaggagatagaacgtgagcgcaaagcccgcaaggagaagcggaagggggagaaagcgttgagcgaagagcgtcgagcgttgagcgaaaacagcttattagccaaacaaaagtctctcaactctcaacactcaacactcaacaagaacgataccgtccgcatcaaaggcacctcgtcggtgggtaagattgagagcatctctggcaaaatggccagcgtcatctctatttcaaagtcgctatttactaaacatcattcaatttttccataaatgatgcgccagcgtgccttgccattgaccattccttcgaagagtactttggagtttggcttgatggtagccgtcttgccctcggtaccccagcggatgactgcgaaggaatactcgtcggtcacgatgccgtcgccggcatagatgggacggttgaccatcgccttcttaaacttcttcgtggccagtttgctgcatccgacgaccacattgccgttgcctcctatcttttcgaaggtaatggcaccggcaggtttcttgcaggtgggacataccccgtcttcggccacgtcgttccagttgaatttcttgggtggctgagtggtcgaggtactggttgttgtctggctttctaccacattgatgatgacactacaatagggcatgaggttgtggttcatgttgatgtcaacccgtttggcgtttcttggtatgctgtagctcagcgaggcggatgtcttctgcttgagttcttccttgtgcagagacctacccgactcgtccgtcgcgctacacgacatgttgagctttccaccgtctccagataccgtcttggcagaaacccggatggtggctcctgactgggccgacatgtaaattctgtcgatgcctgatacaccagatacaagactggccccggtaatggtgtaggacaccttgacgccctggttgttctgaaagctgttgctgaaggtctcgccgctggtgggtgacgtagccgtcgtcccgttgcccactttccactccatttcagccttgaacttggtgcggacggcgttataggtcaggtaagcatagatcttcttggcattcgctggtactttgagcgacacgctggccgagcctactgcctctttcttgttgacaggctgtttcttgccgtcggtagtctcaatgaagtattccacgcacaccttcttgctgttattgggacccgccactcgttgacatccgagcgtcagcgtcgcgccagtcttgacctcacccttgatgagtacggtcatgtcgtcgcgcagcgtaccggaaatcgtggctttcgacttactggtcactacgcctccggagaatgtgtatttcatcttcgagccgaagcgttccatggttcctgtctcggcaaatgtcgtcgctgatgctgcgaagagcagcatcaggacgagtaggtaatgaaatcgtcttagcatagtaatttgttcaatccgtgtcattcgttgtcaaaaaactactccgtcagttccttgaacatctttttcgagatcttaatccagaagcatccggcagtggcagtcgagagttggctcagatcgccgtgcaagcccacttttttgtgggctaactgaatctcagccctcgtgggcagcgagaagtacgggcggcctgcttcctgattcagagctagcacaaatgattgctgatcggctagtgtcactttggcggcgtttgacacgctggtatgagcgtcgtgcttcttcttgcccgttactacccagaattcgtagtacgagatgggctctggcgtgatgagccaagaaccatccacaggtttcatgcgtccgataagattggtgataacgttgttacgctcttcttctgtgattttctgtgcgcttgccgtcatgttcatggcgaagacggctaccattaatactaaaatcttcttcatcatgctttttgtttttaaaaggttaataataaaatccgttgactgtatcttttcgtataaacccttatttctgtctgccggcctttataatattccactccatttttctatccgatttggccttcgtcagctcaagaggcacgttgtcgctgaccttgccgttcttcgggcggatgcagaagctcttgtcctgcgccaccatgatgaggtaggcgccgttgctctgcttctcaatcttccagttctcgttggcatatcccgtccagttccacgtgatgatttccgcaccgttctgcatcagggcctcgcagacgttgatgccgtaggcggggttggctaacgagaggatggcgtacgtgccgtccgcgttcttcttgatttgccacagctggttgtcttttctcgcccatttcgtcagaacgacggcttcacggttaccaggcttggcgttcttcgtcgtcagcacgtgggcggggtaatcggcatgacttatcatgtaggtcccctctgcgatttgtgcacttgccgtcatcgtcatgacgaaaacggctaccattaaaactaaaatctttttcattgtaatacttgttttaagttaataattcgattcgctttcatgtaccatcgtcagcccacgcctccgccgccgcctggtgttccgtactttttggcgagtgccttcatgcgctggtaacccgtgtagtctgtcgcaaggtagaatcccttggtggcaatgctgtacggaccattctcactctgaatgttgtagtgcaagttcagcgccttgtagagctcagatgtgctggcgatgtggaacttcatcttcttgtcgaacgcgttgagcgccttgagaaacttcttcttgtccgtgtccgacatcatcatcacgtcggtgatgctctcgttgcgtgggcgtttgttcacacctgtcacgccgtagtagtctccgtacgacacggggaagtacatcaaggcaaaccagttcttcttgttcttcccaaccttgacgagcgtgaacttcgttgacgaggccttcagttgtgcccggcgctgctggctcaggttttgagctccggccgtcagtgccagagccatcagaaccataaatactaaaatcttcttcatcatcctttttctctttaaattatgaataaataaatccttatcgtacctttaccttcgctcacataatcacgaccttcttcccgttgacgatatacacgccctttacggttggcatggcctgcagcttgcgaccgtccagtgtgtagtaattgtgccttgagacttgtgcattgtgaattgtactgatgccgtcaggaatctgaagcgcggcaatctcgtcatcggtggcaagaacaacccttgggtcgatgccgtcgagcatttcgcggatgagggctttcgtctctgtgtcgatgtcagcagccagcacgatgccgtcagcgtgaaattcgttgacccagtactggcaggcctccaagataaatctctcgcgtagtacctcgttaacgggggtggttgagaagtcaaagcgtacgaagaacgacatgccaaaggtctggtggacggccatgatagcctgctgcagttcgttgatggctgttgtgccgtcgtaaggattggtggagtagggatcgggcaccgtctgtgggttggtcatcgtcacgatgacggctttgcagccttctgcctgtagtttgctcatgcaggtcagttcttcaccagcattctcgtatgtcgtgccgtactcggtaagagccagatattttccgcgatgaccttcgctgacgccacacgtcgggtcggctgagaatgccgccacgtcgatgtactctattttgttgcctgactcatagaacgtatggatatcggagtcccatccacttgccgttgcatcccattcgtcgaataccatcgagcgcttgccatcgaagcccacagcctgcgaccacgggtcgggaatctcctctccatcgacgctgtaggcgtagtagcttcctttgatgtcaccatcaagcgtacacgtccacacgcccgtccaactgctaccgtccatcagtttggtcatttcccacgagccgtagctctgtgcgcctgcctcaccatccgttcctgtagcgtaacggttcagcttgacggatgtagctgtcggatcccacagcttgaacactgtcctttctggtgtatagataaagccgagttcaccatcgtagtagtatttatcaaggcttacaatggttagatttagtgtgatgacattgtcacagccatctgcattggtattggttcctgtctgcgtcagtggggtgtcggcagtaacatcgaactcgaaaggatattcttcgaagtgctggccgataaacacctcgcgctcccaaatctcgctggtagagtagtgtattgtcaggttcagtttataaatatccgtaccggtatcgtatgtatattctccactggcggtgtatgtgtttccgtgccagacgaaataatcgcaggccgtctcatattcagtgtcgtggacggtgacctgcttttcaaattttaacatatagccaccgtgtgtacagccgtgagaatctagtccgcttccgtctccctcatatggaatgtaggtataaccctcagcttctgttccatctcctgctgggcgaaaataaatggtgtatgttccgtcttcatcaacttgttggttgttatccataccatccggataccagtttgcaatagtcgtaccattaatgtttgacttaacaactttcaacaagtcacttgtcgtaagctcaacatcagtaatcttgtaaagaccttcttcgaccattgttaattcatagttggagtttagccaccattctgcaatggtgccggtcaagaaatacgagtttgctgtaaactgcgcccaagcccccgtcactatcgcggtgaggagcatcatcaaaataagtattcttttcttcatagttgtttggtatttgtttgtcagaaacaggaattgtgtcacaaagataagaaaagaatagggaaagcgactaccatattttgaaaatcgactgccaatgcaaaaaatggcagtcgatttcacgatatttggagcgtttttcagctgttctgctcgctgatccactcgcggggcgtcattccggtaatctgtttgaacgttcggaagaacgacgtttccgaggcaaaacctgccgtcagatagacctcttggatcttcttatctggatggtcggtcaagagttttttcacgtaatccacgcggtagttattgatgaacagcgtaaacgaacagtcgtatgctgccttgatgcagtcggacacagtgcggctgtgtgtgcccagtgccacagccacgtcggccaccttcagttcggggttcaggaacagcttctcttgttccatcaggcgggtaatgcgttccatcaaatccccattgtcaggagtgctgggttcaaagcattcatagggcttatgggatttataggacctatagaacttataggcaacaagggaaacagctaacaagacgatgcccagcacaatccaccaccaggggaagcccatagccgacaagtttttctcgttgttgcccaccttgaatacaatgacagaggcatacgccttgaagttagagtcctgacaaccccccaccatagccaagttgccttcagccgtcaagactggaggacaaagtcccacatcgggcagcggctccgtatagtaaagtgtcagcacagccggcttctgagcatagtcaattcctaatatatatataatatgtgtatcgtcagtacttgttcccatcagatacgcccgactgacagaccggtcggctatgacgggcattatccatcctatggggtggccattatgctccattggcacctgtccgatggtgggcagcagcgagaactcctcaccctgcaaaagagctatggcaatctgaccgtcgttgttgcataccgtaaaaaggtggacatactgcccctgagcctcatcaccgatgaaactgtcagccggccggaagctacaaccaatgtggacgggtttccactcgcggaacagtgaaggcgtgaacggctcgccatgaagtctgtcaacaatgatgctgccgtgcgcgtgtcctacagtgtcaagggcactgaagataacagcattgtcgtgtgacgtacggaagatgtaggggaagcagcgttgctgagccacgtccttcaccttcacaaactgcggttcgccgttgtacttctccacaccgtcctgttgataccagtttccactgatggccacctgtccgctatccatctccactgcactggccataacgcgcttagtatccaaacaaccaaaaccttcaaacgtatgggtttcagcgttataccattctacagagaaggtctgtccaatgcctaacggcttttcatgaccaccgccaaggagcacctttcctgacttcatcgctacagcaaaaccatcgtcatgacaatagaccgtcggtagttcgtgccatgccccgtcgctgaaatattcagccgtggccgtgggcacaaaaccgtcggtatgaccgcctatcaccgtcagttcaccgttcaagaacagcgtagcatgtctgacacgcgccacgttcaagtcgggcagacgctccgtttccatcttttgggttggaatgctcacgtcagcccctctttcaaagggtatgctctgcgccacaccctccaacgaggcaggaaacagcagcaatgctgcaaaaaacacttttctcaagaggttcataggtacaggtattgtattaaattacag

SEQ ID NO: 1045 - DNA, 24704 bp, synthetic construct
  misc_feature 1..24704: note = Synthetic
  source 1..24704: mol_type = other DNA
agtggtaacaacgcctatctctccatgatgtaattcagaacattggactaaatcgccaaggattgttttaaaaatctgatttattttaatccctttatccagccgttgagatcgaatgacgtctttgctttttagcgtgcctccatacacttttaggtaggctaactttccttttttttcatggaaggttactttaaaaacttttgcagcggcagttgagtagtcgcttttaggttgggggatgaacgttaaaatactgtttaataattcctctatgcctaggcctaatttggcactaccgaaaagcgcaccataaagtcctccagtttttatattttgttttcctttctttaaaacttgtcccaaatcagaggtttctccttccagatattgcgcgagaaaagtctcgtcgcattctgctagattctccagtgatttttcaaggatctttgagtctgtatgattactacaatttgtaaacgataacaatttgggattatctatattagatacatccggataattcaaagcgaaaagcttagcgcctaagtctttttgaaaatctaaaaaaacgtgttctacatctacgccagccctatctattttattaaagaaaatgataacaggtagttttcgctcgattaagctctcccaaaggttaagggtatgggcttgaacgccttccttggcagaaaccactagtattacaccatccaatatcgaaagagatcgatcaacttcagcggaaaaatcaatatgccctggggtatctaccaactggactaaactatcctcccaagagaaattaacggatgacgctttgatggaaatccctctacttttttccatagttaaaccatcagtaatggctgaacctttatcgacactacccagagatttagttgtccctgaatggtgcagcagacactcggtaattgaggtcttccctgcatctacatgcgctaaaattcctatggttaaaactgttttatctaacataagttggggagtgtagacctaagcatatcccattatttttagatgacatatcttctggcgaggtttgtttttaaagattactttattaatttttttacaagttgataattattaacgaggacttaagctgaaacttgaagtattctttctaattcccttaaccttaaaattaacccatttttggaccagctgttgtaggcgtaattttttcttgattctcatttgctaagatatttatacatataagtatgtaaattaatgtaaaagtatacttatatgtagtctttaaagtttttaatgatgcaaatacgtctgattaagtttgcgtaaaagggattgatttaaattaaaaccaacgagttgtgaacgtttagttgtgttagctagcaactaaattagtaaaggaaaactgaatagaagatctgctaggattttcgtaagtaggctaaaactatgtaattttttatatatggtgtgtgcccagtatgggcatctttaacttactgcagagtaagtaattaaactagagggttgcaaggcccttatgcgctggggtaacgcctagaagcattagtaagtggcaagggcggtaactgtgaagtagctctgaaggaagagagactacaacactcggtactgatcccttcgacttcgctcaggatagaccaagcagaaacggtatacgagacccgtacgtatggtggtgtgagaggcgcactccgttcctatttaggagaggagccgtctactcgattaacggtttgttgttttttcctgaatacacagtcattaataacgtaatattttcttttgttagtccgatattcattcctgcatttatatgaaattttaattgaagttgtacatttcccaaggctatgaatgcagcaatttgtctatgtttattacctgtcttcttttttatgcttctaaaaattgtacaagtttagaccaatgttctcatcataatagcgattaacggttccatcaaaactttctataacaaattctccagctccattaattttggctgtaagcaagtgtcccgctaatgccgtgtaatcgttacgtccaagtgttacatgcatgtgtatgtagtggttatcattttgttgagatatattgcctgttaagttggtgatttccatttgttcggtgaaagttttatctacaaattctttagtcgctggatcaaaaaatcgtaaagtagcttcacttacagcaccaagacctgaaattgttcctgcttttatattatgttcttcaacaaacgcagtgattgcttttgtaatctcagcatggttttgaatacttacaacatacttgttaccaaactgcttgtacgtgtacagtttagaatttgattgtgcgtttgctaaaaaagatactgcaaaacacagtactattaaaattgaacgtttcattttgtataaaattttaaatttaataagactccgttattatatctatcgttaaactatcggccttttttccaagttcggtctttaatattacaaaatgctctgtttgattatgaaagtcgatcgcttcctgagatttccattcttccaaaattatgatctttgagctgttattaatatcttgatgcaatatatacgagatattaccttcctcttttcgtgtggcatcagtaacggtttgtagcatatttaagacatcttccttaaattcgggtttaacaataattgtagctataatttttaatttactcataataaatacttttaattttttcgttatactttttttttgagtccagactattaatatgaacttttaattgaggttgaacagttcacgttgccttttttatctatttcatattatgtaggatgtttgtttttcaataaccgctaacggttagtatatgaaaagtaggcgatttgcaagcacaaaactttcggttaagtacaaagtttgatacgagccacaagccttggatttagcactatttcgcctatttttttatttttatatacatcttaagttagctttgagtgtcttttagattataatcaaattctttttttaaatttccgcaaacttgctcaaaatttcgatggagtaattttcctttttattaagagtttgagtgaacatttccgtaaactagctaaattcaatttaagggacaaagtgcattctttttaattttcctttttctatttgtcctttgttatttgcttttaaaaattcgcctgtttcaacattcaaacatgttaaccacatacctccgtgtgcataagtatctatgcaaatggtatgtttaaaatttgctatttttccgttttttcgagcagtatgtccgcaaatcacagtttttattggatcatatattagaggtgcttcaaatttcttgaaaaataaatcatgctcattctgttcctctaaacgcttgttttcttcaagtcctgcatgtacgaatataaattctccaatttctaaatagggcaagcaagaattaataaagttccaatgcgatttatctatctgattcatccaattttggttatcaccaattttatatgagtttaatgtaagtgatcctccataatcttctagccaatactcaaatatttcagttgaagatttggcacgtgtcatcattatttcatgattgccaagaataaatttgaagtcgaatgttttacttttttcaattaaccaatcaataacacctttgctatcagctcccttatcaacgtaatctccaagaaaaactactttatcatcttcctttatcaaaccatgttgaaaaatagtttttaatgcgtttatactgccatgtatatctccaattgcgtaaatcgccataattacttttgtttttatactgtgtaacccaaagcttatattaagtttgtttgactgctgattatcattaaaattctagtaatttacttttgacttattttttaatttattttctatgattgggtataggttgtaggtaggataaatttctgtagtaaaagctttccatgcggttctttcaattgccaaatttacagcggatagttttgacgcaggaagttctaatacaactacttgaccaagccccataactacaaaccaattaactacagaagtaccttctggtggaagattttcataaaacccttgatcggttttaattttttcaatctcatttaaattcatgctttgatcatgtttaagaaagatggttaataacaacttgtcattagctttttcagagctgggtttggaatcaagcactacctttgccttattttttaacttatgttctataataggatacaaattgtaagttgcatacatttctgttgtaaaagccttccatgcagttctttcaatttctaaatttacagctgataattttgaagcaggaagttctaatatagccacttggccaagtcccataaccacaaaccaattaactacagaaacaccttctggaggaagattttcataaaacccttgatccattcttatctcttcaacctcattcaaagtcaagctttgatcatgtttaaggaagattgttagcaacatcttgtcattagctttttcagaattggaggtttcagcatgcgattgtgaataacccgtgaattgtagtacgaataatccgagtaataatgcgtatttcatattttataacttttatattttattgtcagattttagattttattctacttaatgtttcttgtgatatatttatataagaagctactattttgtttggtaaccgtttaacaatatttgggtttattttaaataactgattatatctttctgaagcatttaaagtagtaaaagacattaatctctttgaattatttacataggctttttctaaatatatattataaaaatccttccatttgggaataatttgcataagatgcctaaagtcatcgtgactaatgtaaagaagttcgctattttcaataacttgaattgtttcttgggcaggttcattagttataaaactaaccagttctgtagcaaattgattttcaaatgcaatataacgggtaacgtctttaccattatcatctatgaaaaataatcttagacaacctttttttacgaaataactaacctgactaatttttccagtagaaagtaaaatctcatttttacttttttttattgttttaaaataagacaacacgattttcaaatcttcatcttcaatagtaatattcttttttatgaaattagtgagttcgatattatttgtcatttatttatagtctctaacaaattttcgataatggataatatcctgtattgataagaccattaaattatatgtctttgcaaattctatgattgtatccgtttttgccattgttccgtcatcattcattaattcgcacagtactgcttctggttgtaagcctgctagtttcattaaatctatactaccttctgtatggccttttcttcctagaacacctttgtcattagctctcaatggaaatatatgacctggttttgccaaatcactacttttagctttttcattgctcgcagcttgaatggttgtcaatctatccttggcagaaacccctgtagtcacaccatcttttgcttctattgtcacagtgaatggagtttgataactacttgtgttctcctttaccatataaggcaaatcaagagaatcggctttttcatttgttaaacaaaggcaaacaataccactacattttctaatcataagtgccatgtgattattggtcatgttatgagccgagaataccaaatcaccttcattttctctgtctttatcatcaattaagataactccatttccatttcgaagatgtattaatgctttttctaactgttcctgactttcggtactagtcgattgtatcgtatctaattctgctaattccatttttaattatttttaatttttagattagcaaaactaatattgtttcaagccaaactatttgacgtaagtcaataaattaatctatttaataaatactcaagtaaacttttactcataaggcataatttataaataggacattttgttattggtcagaggaatgagtttaaagagaatggggtttaattaataacagttctttaaatactgttatttttcccgcattaaagctaacgttgatgtataagttttgttgtgttgtttaagtagtgaatttagtaaattaaacacgaacgtcgaaattccagaggaatttcccaagtgagctaaaagcagtaataaagtttagacggtgtgtgcccagtatgggcatctttaacttactgcagagtaagtaattaaacgcaagtcccttatgcgctggggtaacgcctagaagcattagtaagtggcaagggcggtaactgtgaagtagctctgaaggaagagagactacaacactcggtactgatcccttcgacttcgctcaggatagactaagcagaaaccgtatacagaggcctatttattcgggtaagcaagcacgccattgcaccgcacaaaacataccaaaagcgtagtgcggtggtgtgagcggtgtactagtaattattttatttacagtcgtctactcgattgtagccagtctccacttcattaatttcactaatttttcttgagaaaagcagttatttctgaaggctctgctctgttgcggtaatcggcatctaaaaaagcataaataatttctccacttttgtttatgatgtatgttgctgctaaaggtagctcatttgatttgtcaccattgtagccgttcatatcaaatgatttattgtacatttctgcaacttcatctgtgagtttaaatacgattccatattccttggcaattttattcccaaggtcacttagaacttcaaattctaaatcatgtttttctgctgtactaattgatttgtcaggtaattctggtgttaaggcaattaatgtagccccatttgctttaaagtttggtaattcttgttgtaattcgtgtaatgtgatattacaatatgggcaccaaccacctctataccaagtcaaaactacattacctttttttaaataattattcagttctacaggctgtcccagtgcattatttagcgtgaaatttggagctttttcacctacttgttttgctgagctaacgattccacttttctcaacagactcttgaccttctttataggctctttttttattgtcatctgctttaagttcaaaattttctttcttttcatccaattttgatttaagggatgttctgttattgttttgcataccgctctcttttttaaaatcttcttttgttaatccattattgaatttaatatccgaccaagttaccttgatccattcagtactatctacagcggcattccaagtagattttttgtacttccgttttgttggtaataacataccttctatttcttcatactcaagcttcattaaatttggaatttccatttttccaaagtcagcaacagtaaaaagaaattgatcgactaataatgtttctttattgatgtaaagatggtagatgtcagtaggcttttcattaatagtgttaaacgtgatttttactaaatcataggttttattatctattgtttcttctccaagatgttcataatttaatcccggatccaataatttttgcatcatagtaaaccaataaaaattggtaggtctattaaaagcaaccctttttaaagcggttttatctgtaattattttaccgttgtgttttatccaaaactcatttccgtcaaacccttgttctattactccttcaagttgaggcaatgttctctcatgttgtttatagtttccataagataactctccatcaaaaatgtatttctctgtcgaaatatcagctttagtatctggagtttggtatgtgtaggtgtagactacatcttttttgttgtaaagactagtgtagtttcctacttcctgtaccattttataaaccagttcgtgccctttgtttttaaatgttatagcagtttcctcttcttgatttgttgtcttatcatttttgcatgataagaatatgcaacttaaaatgatgcttgttagaatagttgttttcatttttaccgattagttctgttaatactttcttaaatgttttatctaaataatcgtttagatattgtgtaattttttttatacgtttttaaataccatttcaatatagtctttaatctctttttgagtatttactctagcagcagcagctaaaccgtgctttgccaacaataaataattagcttgtttcaatacggtatctttatcctttttagaatccattgctaactttgcaatgaataaggcttttagattagtcataaaagcagccatttgttcttttattattaaatcttcactttcagaaaacgcgttatatgtattggttacgaagcaacctttttggttgttttctttgtattcaggattaactgaatcattaaaaaattgtttaatagcttccactccattttctgcatttttaaatttttcaagtgaagcacttgctttaatcttgtagtattttaggctttcaagaaaaagtccttgtttatttccaaaactagcatatatagaaaatttgttaatacccatttctttttcgagcatttgcatagaggttgtttcgtagccatttctccaaaaaaggttcattgctttttcaactacttcatcttcgttatattctttttttcttgccattgtttctataatacaacacaaaactaaacaatcggttagaaataaatatgtattttatcatttattttataatttcaatatgcaaagttgaataagagaagggaagctgttgtctaagttaatattcgttaaggcacatagtttagtatatgaagcgtagcattccttagggtgctatgatttcaaacaccgtatgagtacccagtatgggcatctttaacttactgcagagtaagtaattagactagagggttgcaagtcccttatgcgctggggtaacgcctagaagcattagtaagtggcaagggcggcaattgtgaagttacctctgaagaaagcgagacgacaaaagtcggtacagacccttcgacttcgctcaggatagaccaagcagaaacggtatacagaggcctatttattcgggtaagcaaccaaaccattgcaacgcacaaagattaccaaaagggtagtgtagtggtgtgagcggcgtactggtaatagactgattgtagtcgtctattcgatttttcgcaggcttttccattttaattgattttctactatttattccaattaattttgtttaaagttaaaccaagattgtagaaaattagattggtctattttacacttaaaattctgaaaagttttttctgttgtaaactgccttgtaattccttgaaaaaatattttctaggttattgtataaaaaacaaatcctaaagttttataaatttctgtatagagctgcttaatagtgagtggggtggctttttatggtgtttaatttatgctctaccactatagatgaagtgaaatggatagatgcgtgagtaacgcgaaggagatcctttatttatactgaaataattagtgcgtctttgtaagctagttctaatgggaaatgtggaactagggagatatgatatttaatgctcttattttaatcttagaagaaataatagctgatgcagaaagttttagagaagtgtcctttatttaaataattattagtaaaaacttaaaagtattacataaaaaagcctcccagttaaagtcgagaggcgaacttaaatgttttcacaacggaataatccttattgtgaattgatttcaaattgttctgctaatttaagtaaaatattggtatataaccaaataaaaagcctagttttatttaagtaagaaaatcgctactaaatttaaaataacctacgaaccttttccttaaggttaaaaaaacgacttaaaatttttatgaaaaaaatacttggattagatctaggaaccaattctattggttgggcactgattgaaaagaatttaaaaaaagaaacaggtgaaataaaagccgtaggaactaggataataccaatgagtcaagatgtgttgggtaaatttgattctggggtatctatttcacaaacagctgaacgtacgagctatagaagcgtaagaagattaactcaaagaaataaattaagaagagaacgcttgcatagagttttgcatcagttaaaccttttaccacgtcattatgacgatgctatcgactttcaaaataaattaggtcaatttaaagaaagtacagaggtaaaacttaattataactttaatgctaaaggggggtatgagtttttatttaaagacgctttcaatgaaatgattgaggattttaaaaaagataacccacaattgttttatttgaaaaataacggtaaagaaactaaaataccatacgattggactctttattaccttagaaaaaaggccttgtctcataaaattaccaaagaagaactttcttggcttattttaaattttaatcaaaaacgaggatattatcagttacggggagaagatgatggtaccgatgataaaactaaacttaaagaatttaaagtattaaaagtaaaagagattataaattctggagaaaaagttaaagggaaagtgctttataacgtaatatttgaaaatgactggctttatgatcgccaaattgtagatactatagagtgggagaataaaacaaaagagtttatagtaactacagcattagatgcagaagggaatcctaaaatagataaagaaggagtgtttaaaaggagttttaaaaaagtagactctgaacacgattggattgctataaaatcaaaaacagagcaagacatacgtgcagctaacaaaactgttggagagtttatttatgaaacactactaaaaaacccaactcaaaaaataagaggtagtttagttaaaactatagaaagaaaattttaccgcgaggaatttgagaaaattataacagagcaaattaaacaccatcccgaaattgatataaatacaataattggtaaagaaaatattttaaaatgtgtttctgagttatatccaagaaatgaggcacacgctaataatatcatcaataaggattttaattatttatttacacaggacattattttttaccaaagacccctaaaaagtaaaaaatcagagatagctaactgtcaatacgaaattagggcttttaaaaaagtaaacaacaaaactggagctgttactaaagaaaagcaacccttaaaaacgattgcaaaatctcatccattatttcaagaatttcgcctttggcaatttttacacaatttaaaaatcttaatcaaaaaaacgactgtcgatgaaaagattcaactagacgttgatgttactgacacattactgacttcagaaaatgactgggctgccttatttcaatatttaaatactaaaaaagagctagaacaaaagtctattatcgagcatttaatttctcagaaactaattttaaaatctgaaaaagaaaattaccgatggaattatgttgaagataaaaaatatccaggtaatgaaacacgagttaattttagcaatcgtttaaaaaaagttaaaaatttaaaggtagaagaatttctaacttctgaaatagaatttaagttatggcatattatttattcggttacagataaaaacgaatatgaaaaagctttagagagttttgcgataaatcaaaacattgataaagagtcttttgttgccaattttaaaaaacatcctccttttaaaagcgattatggggcttactcttcaaaggcaataaaaaaactattgcctttaatgcgcttgggggagttttggaatgaaagtaacgtgcctgttactgtgttagataaaataatcgatattaaagatagattaacgtctattaactacgatgaaaatgtatttaaaaaagatgaaaacaacttattaaagactattgtagatgatgtaataccaaaacaattattaaaaagttttattcatttagaaggtaaaaatcatttggcgggtttaaatacctaccaagcttgttatcttgtttatgaaagacattctgaaagtagtgctattactcaatggaaaaagcctgatgatatcgttacttttttaaatcattttaagcagcatagtttacgaaaccctattgtagaacaggtggttacagaaacgttacgtacagttcgagatatctgggaataccatggaaatagcgaatctaattattttgatgaaattcatattgaactgggtagagaaatgaaaaatcctgctggaaaaagggaagaaatatctaaaaggaatactcaaaacgaaaataacaatcaacgtattaaaggtgttcttaaagagttgatgaccgatggtgtaaaaaacattaaaccgtattctccaagtcaacaggagatattaaaaatatatgatgagggggtttcacataatccagatgtttcatacgctgcgattagtgaggatgatattttaaaaattagaaaaaatagtaatccgacgccatctgagataaacaaatacaagctttggttggaacaaggctatgtttcaccttatacaggaattgtaattccattgagtgacttatttactactgcttatcaaatagaacacattataccccaatcaagatatttcgacaattctttaagtaataaggttatttgtgagagtgatattaatgaagataagagtaataaaacggcttatgaatatattgcagaaaaagggggaagtattgttaatggcattaaagttttagagttagaggtgtatgaaagacaatgtcagcactattttaaaaagaatagaaccaaacttaaaaatcttttaagtgaagatattcccgaaggctttataaatagacaattaaacgacagtaggtacattagtaaattaattaaagggttgttaagtaatattgttagagaggacaaggagcaagaggctatgtctaaaaatattgttcctgttactggaattattacttctaaacttaagcacgattggggcttaaatgacaaatggaatgaaattattacgccacgttttaagcgtttaaacgagatgaccaactcagaagattttgggagcttcgataagaaaataaatacgtttagagtgcaagtacctgaagccatttcaagaggtttcaataaaaaaagaatagatcatagacatcatactttagatgctttagttatagcttgttgtacaaaagagcacataaactatttaacatcattaaatacagaacgtaaaaattatggtttaagagatcgcttattaatagttaataaaaatggtcattataccaaacattttaaaatgccctggaataatttttccgtggattgtaaaaaggctatagaatatacgattgtgagtttcaaacaaaatttgcgcgttattaataaaacaacaaataaataccaaagctataatgatgaaaacggcaacttaagactaggtaaggatggcaaacctaaaaaagattttatacgtcaagttaagggagatagttgggctgttcgcaaaccaatgcataaagataccgtttcaggacaagtaacagtaaaacgtattaaaaaaggactaaccaatatttcaaattatttattggattggcatttaattgtagataaagaaattaaaaaacaagttaaaaaaaatgcaactacttataaatgtgatttaaagttgataaaaaaacatttaaaagataaccctataacaatagacagcagtcctgtaactaaaattaaagtttttgaatacacaaaaaatgccacagcgacacgagttgcgttatcagagaaatttactcgtaagcaattagacgccattactgatagtggaattcaacaaattttaaacaatcatcttttaaattatcttgacgaaaaggacaaagagacattcgatttagcttttaatactgatggattagaacaactaaataaaaacattattgaattaaataatggaaaaaaacaccaaccgatttataaagttagactttatgaagagggtagtaaattctctatatcagaaaataaagctagtcctaaaagtaaaaaaatggtagaagctgccaaaggaacaaacttgtttttttccatttattggaatgaagaccaacaaaaacgagtatatgaaacaataccatttaatattgcgttagaacatcaaaaacaagtagcgcatctgcctaaagaagagcaaacagctgtacctacagatgccactaaaggaacgttcttatttaccctttcacccaatgatttggtatacatcccaagtgatgaagaattaaataacccgactttgtttgatgtaaataatctattaattaatcaaacgaataggatatataaaatggtgagtagtactggtagcaaatgtcattttattaattcaaatgtcgcttcattaattaagagttatgattcaaaaactaaaattggtgaattcggaagtttaaataaactagaggttacaacagacctatctaaacctaagaggattaaagaacattgttggaaattaaaaatagataggcttggaaatattattaacgtaattcactaacgatgataaaacgcaccatttacattggcactccctcctatttaaaacttaaagaccaacagcttttggtgcaagaccctaatggctcagaaaaagggactgtcgctatcgaagatatggccttgttggttttagaccattatcaaattacactgagtacgcaattgcttaatcaattacaatctcattgtattgcggtaattacctgcgatagtcatcacttaccttttggggtgaccttgcctctgtatggccatacagagcattccgaacggctaaaacaccaattagaagccagtgagccacttaaaaagcaattatggaaacaaaccattatacaaaaaattaaaaatcaggaagccttacttaatttatacaatcgcgttgctgagcctatggaaacgtattgggagcagacaaaaagtggcgatagtaccaatacagaggctaaggcagcacaacattattggaaatatctatttccagaatttcaacgccatcgttttggtcagggcccaaataatttgctgaattttggttatgccatattgcgaagtattgtagctagagcattggtgagttccggtttattgcctgttttaggcctttttcataaaaataaatacaacccatattgtttggcagacgatgtgatggaaccttatcgcccctttgtagataaaatggttgtgaattatgtgaataataatggtaaaaccaatgaattaactaaagatgtaaaagcctatttattgggcattgcgactcaggatgttttaatagatggtatgcagcgccctctaatggtcgctgtaaccactactactgcatctctatataaatgttatgcaggagaattacggagtataaaatatcctgaattagattaaaaagatgtctaacaatagatttaatgcatatagaattatgtgggtattagtgttttttgatttacctaccgaaactaaaatagaacgcaaagctgctagcggatttagaaaaaatttgataaaagatggttttgatatgtttcagttttcaatatacttgcgtaattgcccaagtagagaaaatgcgaacgtacatattaaacgtgttaaaaatacgctacccaaacatggtaaagttggtattttatgtgttaccgacaaacaatttggaagtatggaattgtttcacggaaaaaaacagacagatttgccgaatacaacacagcaattagagcttttttaatttcaaaaaaacaatccccaagcctttatctatatagagtcttagggattgaccttgtgattgctcacgtaaaaatacaatttgaaatcaattcacaacccaaaaaatgatgacggcaaaaaaagtatacttgtgattgctcacgtaaaaatacaatttgaaatcaattcacaacaaaatctttaatagctttctgcgggtcttccttgtgattgctcacgtaaaaatacaatttgaaatcaattcacaactttagaaaatgacattgattatttacaaaaacttgtgattgctcacgtaaaaatacaatttgaaatcaattcacaacatgtgtcttctctattatctaagatagcatcttgtgattgctcacgtaaaaatacaatttgaaatcaattcacaacccggtgaagcaacacttaattaaaaacaaacttgtgattgctcacgtaaaaatacaatttgaaatcaattcacaacttacaattggtgcagtagttcactcaaacacttgtgattgctcacgtaaaaatacaatttgaaatcaattcacaactacaaaccgttaaacacgtccttaaaaattcttgtgattgctcacgtaaaaatacaatttgaaatcaattcacaacaacttgttgcattagacgaatctaaagcttcttgtgattgctcacgtaaaaatacaatttgaaatcaattcacaactgttccaatatctagcgagaaaaactacaacttgtgattgctcacgtaaaaatacaatttgaaatcaattcacaacaattttatatagtgtctatttctactacaccttgtgattgctcacgtaaaaatacaatttgaaatcaattcacaacaatatacaattgatggcgttgtggttaaagcttgtgattgctcacgtaaaaatacaatttgaaatcaattcacaacagttgacctgcaaatgaattatctataaaacttgtgattgctcacgtaaaaatacaatttgaaatcaattcacaacatggtttgctgccataattaaaaagatttacttgtgattgctcacgtaaaaatacaatttgaaatcaattcacaacatactttataccggtcattaactgaacacgcttgtgattgctcacgtaaaaatacaatttgaaatcaattcacaacataaaaataatagccgtaaataagcacaaacttgtgattgctcacgtaaaaatacaatttgaaatcaattcacaaccgtcataccgaactcaatacctttaatcgtcttgtgattgctcacgtaaaaatacaatttgaaatcaattcacaacacggtaaatgttaattcccatccatcgtatcttgtgattgctcacgtaaaaatacaatttgaaatcaattcacaacagcgtttaaagtgttgttttgcgcttgaaccttgtgattgctcacgtaaaaatacaatttgaaatcaattcacaacagcaattccgaccgcattttcagcaacaagcttgtgattgctcacgtaaaaatacaatttgaaatcaattcacaacaggtatcgattgcaaaagctacagtttattcttgtgattgctcacgtaaaaatacaatttgaaatcaattcacaactatataggttgcctttaggttgccaaaaaccttgtgattgctcacgtaaaaatacaatttgaaatcaattcacaacgttcctgataccattaatgcatttaaaaaacttgtgattgctcacgtaaaaatacaatttgaaatcaattcacaacagtctgtaaagtatactctttaaatctgccttgtgattgctcacgtaaaaatacaatttgaaatcaattcacaacagtattgaggattaaaattctcctgcttgccttgtgattgctcacgtaaaaatacaatttgaaatcaattcacaaccgttcgagggtttacttgtgaacctatattcttgtgattgctcacgtaaaaatacaatttgaaatcaattcacaaccgaacctagtatagaggttatcgcactttacttgtgattgctcacgtaaaaatacaatttgaaatcaattcacaacgagttgggtggtgtcctgtataatccttttcttgtgattgctcacgtaaaaatacaatttgaaatcaattcacaacaaagtggatatgcaagaataatattattgacttgtgattgctcacgtaaaaatacaatttgaaatcatcttaaaacaaatatacctattgttgcctgaacactatattttggaatgattcaattctattgtcacccaatttgttacctttaaaaaagaaaccctgtaaatcattgatttacagggttttaagtggagtcggagagaatcgaactctcgtccaaacaagtcaccaaagagttttctacacgtttattcttttcttgaattttcgttcgcaagctggttaaagaaaacccacttacaacttatcttctttagtttcaattatgcgacaaagcggcacctaatctatcttgacatttacgatgtctcaaatggaacgccgtcaatcaaggctttccggagacataaagctcgtacacctagtgtaccgaggcttaatcctactataattcggattaggcagctaaagcgtagttattctcgccgtttaaaaagttgacttagccttttacgtgtttcaaaatcattacacgacgtgcttaccgtttaattaatctcgctgtcaaaaccagtcgaccccaattaaagatactttttttagtgcgttactctatttcgctttagcttcatagtgtcgggctttccgctatatcttttgccaaaaaaaatcaaaaggatgtcgctgcaatccctaacgcgccaaccaagaaacctgataacaaatttcaaggactacaaagctaatacaatttaaagagttaacaacaaaaccctgtccttttatgaaaatattataataaataaaacgatagtgttttaaaaccataaaacgtagacgtaaaatagtaataaaagtatcaccgctactataatatttggcgcacaggctacgctcaaggcaatgcaaaaccgtatgctattaccactacgataaaataaataaaaggtgtcaccaccacgctacatagcgaaaacgacaccccaacggtgtttatgtaacccgtaatggtgcgcaggacttaaaaagtaattatacaattgtgtgggtttctaatacaaattgttgttaacaatttaatttaacagtattttagcaaggccttaaaaccaggcgtaactttaaaaccaagaactgtctatgaagtttgctattattaaagagcgcaaaaatcccccagatcgtcgggtagtgttctcccctcaagcattaaaaatagtgcaacaaaattatcctgaagccgaagtggttatcgaagcttcagatattagagtgtttccagatgccgactataaaaaaatgggctttacaatctctaacgatattagtgacgccgatattctatttggcgttaaagaagtacctatcgcggctttaattcccaataaaaaatactttttttttagtcacaccataaaaaagcaaccctataaccgagagcttttaaaggctattttggaaaagaatatagaattatacgatcatgaaaccattgtaagacaaacgggatcgcgacttattggttttgggcgttacgctgggctcgttggtgcctataatgggtttagagctttaggacttagagataaactatttacattaccaaaagtagaaacactaaaagatcttactgctgtaaaagccgaattggataaaattgttattcctaacataaaaatagtacttaccggaacaggtaaagtcgctaaaggcgcacgggagatattagaccacctaaatattaggcaagttggtgacgcgctgtatttaacatcgccgttttcagagcctgtctattgcttagccgatgttatggaatacaataaacgtacggatggtaaagtaggcgataagtacgaattttataaagatcctgccggttacgaaagtaattttatgccgtacgctgaagaaaccgatatgtttatagcaggtcatttttatggggacggtgctccgtttttattcacccgagaagatgccagaaatcctgagtttcgtattaatttagtggccgatatttcttgtgatatcgatgggcctgtggcgtgtactttacgaccctctactattgctaatccgttttatggttacgatcctaaaaacgaaaaagaagtccctttcggtactaaaaatacaatcaccgtaatggcagtcgataatttgccgtgcgaattaccaaaagatgccagcgaagggtttggcgaagcttttttagaacacgttattcccgcgttctttaatgacgatgaacgcggtattttaaaacgagcgcgtataactaccaacgatgggaaattaacgcgacgttttgcgtatctgcaagattatgtagacggtaaagagtaagttttttaaactataaaatataaaaccacgtggtagtcacgtggttttttgtgtttagacgtattttctatggtattgataaatattctgactaagtaaatagagctattggacacgttattccatttacaggagagaattttatatagagcaactcttttttgaacgcgtcaggcttgtgcgctggggcgtagttttgggcaacgtatacaataatacttagtaacgaatttttaatcgcattaggcctcggttttggttattatactttcggactaaacgatccacgggtacagagaggctaactatagaaaaaagagtaatgacggtgttagcgcaatagttaatggtcgcaaaaaaacacaaccatacacacgaatgctactcgcgtttacccctaactattggcagtttactccgcttttttaaatgtaacagttgcgccctctgggttggataattccaaatgagaatcggtaaccttatactgtgtcgaggcttgtaattttttacggtacagcttttctttattatcggggcaagccattagcgtgctcatcccgtgtttaaaacgaagaaggtcattttccgagaaaatagtaccgcccaaaccattgcacccgctaaagccagaatatgttttgtttacggtgtctataattaagaagggaagcttctcgttaaaatcggaaacagaaacagcaacgttgcctatagattccaaaatccaagtggcgttcaatcggtagtccataacataattaccaaaaccttcgaatgtttttgaagtgttgtcttttttattagtgaactctaccgttgttttatagtttggtttagactgctggtcttcggtttcttgtttagcaattgttactaccacatcacctaaagcagtagggccttggtagcgttttatattggcatctgctgcacgaataattgctggcattttaattttaaaattctcgaaagcactgtcttccgatgagaatgaaataaactgattcgaaatatctagcgtccatatagaatctgacccaaaaccaataaagtaagtagatataggttttgtaagatcactatcgcttgttttatcattgctaacttccgattgcgtcgtgttttcggaaggcgtagctgtatcgcttttacaattaaaaagaactacgaatagggtacacgtaagaaccgaaactagagatttgttcatatagggctatggggaattataatgtatttatcgtttttctaatagcaactaagttagacaataagtgttctaaattatccaagtgcaacatattagcaccatcactttttgcgttagcaggatcgaaatgtgtctctataaaaaggccgtcgacattattaacgattccggcacgggcaatagtttctatcatatctggtcggccaccagtaacacctgcactttggttaggctgttgtagcgagtgggtaacgtctagaatggttggtgcatactcgcgcatcgtagggatgcctctaaagtcgacaatcatatcttggtagccaaacatagtgccacggtcggtaatccataccttctcgttacctgcgtcttttactttttgtacagcgtgtttcattgcttccggactcataaactgtccttttttaagattcaccactttgcctgtttttgcagccgcaacaactaaatctgtttgtcgcactaaaaacgcaggaatttgtaatacgtctacatattgtgcagctagggcagcatcgctaatttcgtgaatatcggtaacggtagggatatcgaacttttctgaaacttttttaagaatttctagtgccttctcgtctccaatacccgtaaaactatctatacggctacggtttgcttttttaaagctgcctttaaagatgtaagggatttctaatttgttggtaatagttactactttttcagcaatgcgataggccatttcttcgctttctatggcgcaaggaccgcataataaaaagaagttattactagtggtatgttttatttttggaatctcttgaagtgtcataagctttttttataataatacaaagatactatttgtaatggtactgaaaacttttttttaggacggaaaacggctcgtttttagcggcgcattagcgatagtagcggcatcctttttaatgctttaaagtattaagcattaaaaagatatagcgaatagcgcggtccttttttttgataaaagaagagggaatgctataaataaaaaaaatgtattatttattcattttttataattaactttgcagccttaaaaaaaagcatcaagtatatggctaagattataaacatcgcaattattgcacacgtagatcacgggaaaacaacgttggtagacaagattatgtaccactgtcaactgtttcgtgagaacgaaaataaaggagatttaattcttgataataacgatatcgagcgagagcgtggtattacgattacgtctaaaaacgtgtctgttatctataaagatactaaaattaatattatcgatactcctggtcacgccgattttggtggtgaagttgaacgtgttttaaatatggccgatggtgttgttttattagtagatgcttttgaagggccaatgccacaaacgcgttttgtactacaaaaagcaattgatttagggttaaaaccttgtgtcgttattaataaagtagataaggaaaactgtactccagatgaggtacacgaaaaagtgtttgacttaatgttcgaattaggagcagaagagtggcagttagatttccctgcagtttatggttcagctaaaaataactggatgagtgacgactggagaaatgaaacgactaacgttgaaccattattagatatggttgtagagcacgtaccggttccaaaatttgaagagggtacaacgcaaatgttaattacttctctagatttctcttcgtttacaggtcgtatagcgattggtagattacaacgtggaaaattagaagaaggacaacaaatttcgttagtaaaacgtgatgggtctattgcgaaaactagagttaaagaactttttatctttgaagggttaggtcgtataagagtagacagtgtgcaaacaggagatatttgtgcggttgtaggtattgaaggttttgagattggtgatactattgctgatatagaaaatcctgagggattaaaatcgattgcgatcgatgagcctacaatgagtatgttatttactattaacgattcgcctttctttggaaaagacggaaagtttgttacgtctcgacatattaaagagcgtttagaaagagaattagaaaaaaacttagcactaagacttggtgaaacaggtagtgccgataaatttatggtgtatggccgtggggtattacacttatcggtattaatcgaaacgatgcgccgtgaagggtacgaattacaaattgggcaaccacaagtaattataaaagaaattgatggtgttaaatgtgaacctatcgaggaattaactattgaccttcctgaaactgtttcgggtagagcggtagagtttgtaactatgcgtcgcggtgaaatgttaagtatggtagcaaaaggagatagaatgatttgcgaattcttaattccatctcgtggtattattggtttacgtaatcaattattaacggcaactgcgggtgaggctattatggcacaccgttataaagaataccaaccgataaaaggaagtattccaggacgtgtttcaggatctttagtatctatggaaaacggaacggcgattccttattctatcgataaattacaagacagaggtaaattctttgtagagccaggagaaaatatttacgaaggtcaggttattggtgagaactctcgtcaagatgatatggctgtaaatattacaaaagctaaaaaacagagtaacgtacgttcttcgggagcagatgataaagcgaaaattgtaccagcaattaaattctctttagaagaagctttagaatacattcaaaaagatgagtatgttgaagtaacaccaaaccacttacgtattcgtaaaatttggttaaaagaagcagatcgtaaacgtaacaagattgtttaatttacaggcgctttaaactatataaaagaggaactctactacagagttcctctttttttatacctgtaaatttcaattccattttgaattaagtttttcgctatattaacttaaattaaaatgcgatggagttatttggtattaca

SEQ ID NO: 1046 - DNA, 24698 bp, synthetic construct
  misc_feature 1..24698: note = Synthetic
  source 1..24698: mol_type = other DNA
aattagaatgtccttatatcatgacaacgacgtcagacgatatatatggaactgaatatgccgcggttttaaaaaatgtttttgcaatagcagcaggaatttgtcatggtttacgatatggtgataattttcaatccgtattaatatcaaattccattcaagagataaaacgctttgttgatacggttcatcctatcacacgagacattaaaagttcggcttacttaggtgaccttttagttacttgctattcacaatttagccgcaacagaacctttggaactatgattggcaaaggctattcagtaaaaactgcacaattagaaatgcatatgattgctgaaggatattatgctgtaaaatgtattaaagaaattaacgaaaaatataaggtacacatgccaatcactgaggctgtttacaatattttatatgaacgtatatctcctacaatggaaataactttattgacagaagaattacgataaaaaatcaaatcaattactataaatctacgcttcctggtggaattttgagggggatgaaacttgaggtagagtagaaatttaatttcaagaaaatggaacacattaaattaagtgtagacaaaacttttagctttgtaaaacaagaggaaatattcaaatacaaagacgaaagtaaaaagcatttaactgcccttcataaaggaacaggtagaggcaatgagtacaccggatgggtagaactaccatcaaaaattacaactgcagaattaaaagatcttcaagaaacagctgacaacctaaaaggacgtgtagaagttcttgttgtaattggaattggcggttcatatttgggagcaaaagctgtaaacgatgctttagctaacaacttcgacatgttacaggcagataacgaaaatccaattgtactttacgcaggtcaaaacattagcgaagattacctatatgagctaatgcaaattcttgagaatgttgaattcggaatttgtgtaatctctaaatcaggtacaacaacagaacctgctctagcattcagattgttaaaagaactacttgaaaaaggtgtaggcaaagaagaagcaaaagaaagaatcgttgctattactgacgaatcaaaaggagctcttcgtacactagctgatcaagaaggttacaaaacttttgttattcctgacaatgttggtggtcgcttctcggttcttacgccagttggtttacttccaattgctgtagcaggtcacgatatcacaaaattggttgagggagcaaaatcaatgcaagactatactgtagctacagaatttgaagaaaatcctgctctactttatgctgcaacacgaaatgccctttattctaaaggaaaaggtattgagattttagctaactacaacccaaaacttcacaatattggcgaatggtggaaacaactatatggcgaaagtgaaggaaaagaaaacaaaggtattttccctgcaagtgttgatttaacaagtgatttacactcaatgggtcagtacattcaagaaggacagcgtaatattttcgaaactgttatttctattgctaaaacaaaacacaaagttgttattcctaaagacaaaaacaacctagacaaacttaatttccttgcaggaaaaagagttgacgaagtaaataaaatggctgaactaggaacacaactagcacacgttgatggtggtgtaccaaacattagagttgagcttcctgagctaaatgaattttatattggtgaattgctatatttcttcgaagttgcttgtggtgttagtggttatacgcttaatgtaaacccatttgaccaaccaggtgttgaagcatacaaaagcaatatgtttgccctattagaaaaaccaggtttcgaagaagaaactaaaaaaattaaggaaagattataaatctacctcaatacattaaaaaatggctacctctttcgaagtagccatttttttgtgactttattttaagacctaactattggactttgatatcattctttctcattttgtaaattcggattctctttccacaatattgtcccataaaaaaagcaaacacaataaatggataggtgtacatttcatatcctaaatcgaaacaatatcgaaacaaaacaacaaatggaataggtatatgaatggttgcaaaccattttactgaaaacttcttaaccccatgacgaatatacccaaaaggaacattcaccaaataggtagctagcattgcacacaataaatttatctccataagcttgcaagttagcaatagaaatcaaaaacaaaaaattcaaaaatcaatcagctaagcattttataaaaggacattaaaattcagtcttttaaaagggcctaattatttcacaaaacacatcccatatttattaaaacttaaatacatttgcacttaattataaactcaataatgaaattatcacagcaactaaaaggatctttaatagcccttttagcaaccattacattttcgaatgtttacatttttagcaaactggcaatgaaagacgtcagtttagcaagtttcggaattttatggtttggacttgcactaatttggaatctattatacaattggtataaaataaataagaatcattttaaagatctgactaaatcatcaaaaagaacgcttcttttaattgcctgttctgaattaatcgcatcatcagcattttttttagcaattcacctaacgccaaacccaaccattgtatcatttttagctaatacaagccctattttcgttattcttttaggatttaccttccttaaagaaaggttctctatagccgagattattggtattatattaattttacttggtgttggcttaatcaacatcacagagtcaggaatacaactaaagcaactgactagtcctgcaagtttagcaacttttacatttgccttattttatggaattagtcttgttttagcaaaaactaaagttggtattctaccttcatctatgattacattttaccgtaatatagctttatttttaggctttattctttataatttctgccttttcaaagtaccatcatacactgaagaatcgctgttttatatttttattggctctttattaggtccatttctaggtactatccttactttttcagctttaaaatacatcgaagcctccaaggtaactctcattataacgagcagaagtttctttatcatattgggagcttttattttcataggcattctgcctagtcaaaatcaatttataggaggcgttatgacaattgtaggaattgcaataatttcaattgcgggaatttataaaaataaaagaataacaaaataactaagcaatagcggttatcaaattcatttcttctttagctatttcgcttagatctacctaatctcatttttcgtgaatagaatgagagcttcagttttttaacctattttatctagttagaaacctcaacaattaaataatctttaagatttaaatcacgaactaaatgctttgcctgaccaatcttagtgaatggacctaaacggtatttatataaatttttatcttttatctgatgcagatataccatgttttcaggcaaatcagaaaaaagttgcgttttaaatataccaacctgaatgtaataacgatagttcgatgaaatggctaacaccctttctttcccatcaaggctatccatattgatatgtgtttttggcaagtgcaacgttttaatttcttcctgaaaagaaaacgctttctccttatttataaaacgagccaaaggatattgattcaaactatcaaaagccaattgataaattttcagaaattgaggcttatcatttgccttctttaccatatcaccatcattacgttttacttgaataggcttaggttttacctcatctatatgtgtgtaaaaaaaactacacgttacaactgacaaaagtataagtacagcaataataacccgaataaaggtcttctttttcctgacttcaagttgtagcctatccaactcttttaaaagagccttaattctaacttttgaattttccagattacccataaacttaataaatcctatacattgaattactcatcacgaaaaaagtaattcgaaattaataattatacgacactcaggttacaagttgtatcaccagaacctaatctcattagctaaaagtaataaaatttatctgtttatgataaaaaaaaagagctcatcgaagaatcgagagctctttttttataattttttttgtcttaaacatgcttaagcacatcttcaagattctcaaaccttgctttgtagtcattcaatgatctaacgataacttcttttgcttcgtcaacaccatatacatgagtaatctcagtctctttttccacgcctggcatatccttataagttaagaaataatgcttaagtcgtgttataataacctcagggcaatccgaaatatcattataaacaccgtatgttgcatcgttttttaagacagcgataatcttatcatcagcctcattaccatcaatcatacgaaaaccaccaataggtcgtacttctgcaataatatcgccgtgagcaatcgctctttcagtcaatacacaaatatcaagtggatcggcatcacctttaataccttttttacctgatttctcggcgcaaaattcgcctaccaatttaccacaataagactgaggtaaaaatccataaagggctggtacaacatttgaatatttttgtggtcggtcaattttcaaaaaaccacttgtcttatcaacttcatactttacggtatcagttggtaccatctcgataaatgccatcaccgaattcggtgcatcatcaccaacatcaatcccatgccaaggatgcgacttataacgtaagcccatcaaacggccaataggatcatttaatttatttcccatcagataaaattttcaatatcaatacaaaaacagtttcctgtttgtaaacttgtataacaaaagtaagaaaacgatggaaaaaacctaaagtcaaggattttaatatcaatctaggtttctataacatataagaaagcattttagaaagaaacagtccaaatagtgttgggcctttttctgatgatatcccaatcggattttacgattattgaagcaagattagaataagataaaagtcaaatatttatcggtatcaggatctcatcataatgatagatcctgaaacaagttcagaatgacgaatacttaaaatcactccaacaatttaaaaagcttttggatacgttccccaactataagtagttggtgtgttagagtgttgtttattcatctttgaaaagtttccttgaattattttctacattatctaacaaaagctttcgcagatagttaccgttacttgtaaatccaaatgtaacattttcataatcacgctcaagaacctcgataacacctgtaagaactaattgatcataagactcatcatcctgtaaagggagtttctttaatatagaaattgtcaccttattaaagagttcaattaattcattattttgtaataaagttttaattctatctttattaacactctcaaatggatcagattttacggatgacacaggataatcattaggattgaaatgaccttcaggttttgaaagagcatctacgatatttttacttactagatcttctttctcatttgttttttctttttctatgctatcttcaagttctttaatttttagaatttctgcctgataacgaatctctaactgtttatattctgtttgtaaagcaagtcttaatttttgttcttcttcataacgtttctgtgccattcctcccaaatgaacaacttcttcaaaatcttcgatagatttaatttttttagaataaatatatttatacacccaaagagacaaccgtttatcaaataatgtaacaattgcccttgagataattaataacgaatatgttataattaacacgaccaacgctacccaaatacaagtgaataaattatctaaaaacactccagattctaaatacttatctactagttttaacctagtttctaattttgtattagaatcaaaagtgaagacagaataaacgaatttataattatgaattatccaaactcctattagagttccaaaatatgggttagttattttattcttgagtccttctaaaaacgaggttattggttttatagacataaattgcaatgtttgattttacagtaacaaatataacaataatatcatattgattatcatatataactcatcagaaatcgcaaaacggaagcacccaaaccaataaagaatatgcttaggctatgaatatctgatataaacactgagagcctcacaaaaaaagtgagaccctcaggcaaataaaaacaattcattcccaacaatcatcgaaatcataattctaaactcatcatttataattagaattcatcctccccagccatcacgatcgaggctacgatactgaatagcttcggataaatggtcggtttcgatattttcggagccagctaaatcggcaattgttcgtgatacttttagaattctatcataggctctagccgaaaggccaaccttttccatggcaactttaagcagtttcataccttctgcattaggcctacaatattttcttaacaaacgagaactcatcatcgcatttgagtgaataccttcttcgtcggcaaaacgtgcagactgaatctcacgagcagcctcaactctttttctaatgtcttccgatttttccgaaaggcgttcttctgatatcttgtcgaatgaaacaggcgttacttcgatatgaatatcaatacgatctaaaagtggacccgaaattcgactcaaatatttttgaaccataccaggagcgcataaacagtccttatcaggatgattataataaccacaagggcaaggattcatagatgcaattaacatcatatttgctggataatcgaccgtgaacttagcccgcgaaattgtaattgttctatcctccaagggttgtcgcaaaacctcaagcacggttcgtttaaattctggcaactcatctaaaaagagtacaccattatgcgccaatgatatttcacccggttttgggatggttccacccccaacgagcgccacgtctgaaaaggtaggatattaggaggcatatttatatatttgtacaaatactttaaatatgaaagcagttgtttacacaagggtttctaccgagaaacaaactttagaacgccaagacacagatataaaagcgtatgctgtgtataaaaatatagagattgtaaaaactttttctgagaaaatgagtggttctaccaaaacaaaaaagaggcctcaattctctgaaatgctacaattcatcaaacttcataacatcaaacacctaattgtttcagaaatttcccgaattggtagaaatatggcggatgcatctggaacaattcaaaatttcactgacaaaggtatttgcattcattcactaaaagagacattacaaacacttgatgaaaaaggaaatacaacgccaggtgctgcaatgcttatcgctatatactctggtgttgcacaaaccgaactagaaacactccagtaccgcataaaatcaggtctcaaaacaagtaaatataatcatggagggcaagcaggccacggggcttacggcttcaagaatgtgaataaaaaactagcaattaatcatgaggaatccgaagttgtaaaaaagatttacgatttgtatcttattggtaatgggaccactcgaattgcaagaaaattaaataatgaaggaattcaatctaaacttggaggaacatggtctgataaatgtgtacatgaaattttaaaaaactccatttacacaggcttacgtaaacataacgatgaattaattcgactacctgacgagttaactattatagaacgagaaaagtacgatactgtccaaaagattctaaaagaaaaatataataagaaagacgtaaatcgcaagtacatcaatattgcatctaaacttttagtatgtggtgtttgtgggaaaggtatgtacatgcacaaaagacctaataataaagacaacgcttacaaatgtttatcaaagagatatttctacaagggagtcagttgttcaaatagaagtgtgaatatagatttactaaattctctgttagcatatcatgttaagcatactccagcaaaaaagatctataaaagcaaactctctgagattaaacttaaactagatcgattgaatatcagaatgaataaagatcttaaaaaagtagaaagagcaaaacaattgtttattaatggcgaccttaaactcaatgaatttgaggatgtaaaaaacgaggttaatcaatttatatacaaactggcagaagaggaagaacttttagatgatgaataccaattagcagttgctcaagatatgacgttccggtttttcgggcaagattcagtcccaaatgggccacttgaagctgagagactaaaatcatctgttaataaagtagttaaggaaattagagtcattaatgctccaatgagcaaataccctcaattcgtaaggaatggactagattttgttaatgaaatcgagatattaaatcaagatggttcaagcaaaaaatatcttactatttctagatcaaaactcattatttgtaataacaaaatcatattagaaaaacctaaacctatctttatttaatttaaccaatatacactcaatagtgcaacaatatctcactccaattgcaatcagtacttatgatggatttgcatcaaaaatgttaaaaaaaaatagatgttgtattctgtgtgaggagaagaaaagaggtgggggtgttttttctaaggatttgtaatgtttatagtgatataccctagccgtgcgtataacacaaatcttaaattataacagtacctcttcatttcaagaatcttattcccttatcttcgcagcatgtatgtcttggtcaattgcaatatggatttgctcaacaggtacacaaccaacttaagtgacatcattaagatcaagtgcaatgactaagaaaacaaaacttacaatttataagatttcaactgacgaacaaaccaaaatacctttagttggatcaagtgtacgtgcaggtttcccaagtccagcagatgattttattgagttggatattagtcttgacagtgaacttattcataacaaagaggcaaccttttatgctagggtcgagggtgatagtatgcaggatgccaatatacacgatggtgatctgttgattatagataaaagcttagaacctcaaaacaataaggtggctgtctgttttatagatggtgactttacagttaaacgcttgcaaattgaggcagatcatattctactcatgcctgaaaacaaaaagttctcacccattaaagtcactgaggaaaatgattttattatttggggcatcgtaacctacgttattaaagctttataacatccccagtttggcattgttttaattctcaacttgatagaagttaacgttccgtattttatctctctattcttgtattcactaaatagaatctttctattttatatgaacttatgtatattcttatgctaagggtattttttatatactacttttcataacttagatggatcgttatgaatcacttcataatgagaaggttgtgtgtcaaccttcagatttgtcggaaatggactcacataaaaaatgactaagcagagctgctttgaatatttttgttctcagtatcattttaataaaaggtgctcatgaaacatttaaacaaaaaaatgccccgaattgaaagacgaggcggcttaaatgttttcacaacggaataatccttattgtgatttgcttactgaatgtgattcaaaattaataacaaaatatataatatacaagtgttatgaaaaagattttaggacttgatttgggaactaattctattggttgggctttagttaaaaatgattttgataaaaaagaaggacaaatattaggtataggttcccgtattattccaatgtcacaggatataatggataagtttggttctggacaatcgatatctcaaactgctgatagaacaagatacagaggcgtaagacggttggtggagagaagtttgttaagaagagaacgtttgcatcgagttttaaataaattaaattttttacccaaacattattcagattctattgattttgatttgcgcaaaggtcagtttaaagatggaatagaagtgaaactaaactactatccagttgctgttgaaggaaaggacaagcctgaatacaaatttctatttacagattcgttcttggaaatggttggtgaatttaaggcagtacatcctgaattattttataagaaaacaaaaggagaggaaactaaaataccttacgattggacaatttattatttaaggaagaaagctttaacggagaaaattacgaaggaagagctttcttggattcttttaaattttaatcaaaagcgtggttattatcaattaagaggtgaagaggaagagaaaactgatgataaaactaaagaatttgtttcattaaaagttaaagaagttgttgattcaggtgaagtaataaagaagacaggagataaactttacgatgtgtattttgataacgcttggcaatatgatagacaaataaccaaaaccgagaattggataggaaagacaaaagagtttattgtaacaacatcgactactaaaaggggagatttaaaatacacgtttaaagctgttgattcagaaaaagattggattgctattaaaactaaaacagagcaagatattttaaaatcagagaaaacagttggtgaatttctttttgatacacttttagagaatccgtcgcaaaaacttagagggaagcttataaaaacaattgaacggaagttttataaggaagaattaaaagctatagttgctaaacaaactgaattccatgctgagttacaagatagagctctatatctagcatgtaccaaagagctatattcaattaacgaatcgcatagtaatagtattaaagataagaattttgagtatttattagtggaggatattttgttttatcagagacctcttaaaagtaaaaagtcgagcattgctaattgtccttacgagaaaaaggttttcatgaaagaggggattaggcaagaaatagctctgaaatgtattccaaaatcaaatcctttatttcaagagttccgtttatggcagtttcttaaaaacctaaagatatatcaacgagaaattattggagataataagatagatgttgatgtaacgcatcagtttattaaaaatgaagaagattgggtggatttgtttgaattcatgaataacaggaaagaagttgatcagaaagcgtttttaaagaaatacaaactcaacgagaaagaatatagatggaacaatgtagaagatagaaaatacccatgtaatgaaacaagagctcaatttttatctcgattgaagaaagtgaatgacatagaaagtgtcgtatttctgagcacagagattgagtatgagttgtggcatttaatctactctgttaaagataaacttgaatttgagaaagcattgggaacatttgcaaataaaaaggggctcgatgagttttcttttgtggcaagctttcttaagtttcctccctttgatagcgactacggagcttattctgagaaagctataaagaagttgttgccattgatgcgtaaaggcaaatattggagtgagaatgccataaacgacgaagtgaaggatcgtatatcgaatattcaagaacgactagagagtattgattacgatgaggaggtatttaaagaagacaaacacaacagactacaaactattgttgatgatgatatcccaaagcaattattaaaaagttttttggcttatggcaaaaattcacaattaaagggattgaatacctaccaggcttgttatgcaatttatcaacgacattcagaggtgggagatattctgctttggaagagtcctgtcgatattgatttgtatttgcacaaatttaaacagcacagtttgcgtaatccaatagttgaacaagtggttacagaaactttacgtgtggttagggatatttggcaatatcatggtggtggtaaaagccaatttttcgatgaaatacatgtagaattgggtagagacatgaagaactcgagtgataaacgaaaatcaatcgcagccaatcaaagtgaaaatgaaaatacaaaccaacgaattaaagctttattacaggaacttaaggatgatagtcagataaaaggtgatattcgaccttattcaccttcgcatcaggaaatattgaaaatttatgaggagggtgtttttaatcaaaacgatgtagatgatgatattttaaaaataagaaagaacgcttcaccaagtaaaaacgaaattcaacgatataaaatttggttggaacaaggttatatctcgccctacacaggtaaaccaattcctttaagtggtcttttttcagaaaattatcaaattgaacacattattccacaatcgcgttactttgataattcattaagcaataaagtaatttgtgaaagtgaggttaatgaagataaaagtaataaaactgcttacgaatacattaaggcaaatgagggtaaaatattaacaggttcaattaagttgttcagtttaaaagcttatgaggaacattgtaaacgtagttttaaaaaatcgagaaccaagctaaaaaatcttttaagtgaagatattcctgaaggatttctaaaccgccaattgactgatagccgttatatcagtaaaatagtgaaagctttgttgagtaatattgtgagagaagaaggagagaaagaagctaccgcaaaacgtttgataccagttacgggtgctattacttctaaaatgaagcaagattggggattaaacgataaatggaacgaattaattacgccaaggtttaagcgtttaaatgagttaactaagtccaatgattttggttattgggataaggataagaacatgtttagaaccatggtgcctgatgaattatcaaaaggatttagtaaaaaacgtattgatcatcgtcatcacgccttggatgctttaataattgcttgtgtaacaaaagatcatactaactatatcacatcattaaataccgcaagaaagaatcatagccttgttgcaaaactcaggaatattgagaaaaaacaaattaaggataaacttacagctaaactaaaaacaattactgtggctaagtcttatttgcaaccttggcaaggttttacaatagatgcaaaagaaagtttagagaaaattgtagtgagttttaaaaagaatactagagttataaataaaacaaataataagtatttatcctacaaagatgagaatggtaatatgcatttgggtaaagatggaaaacctaaaaaagaacttaccaaacaggtgaagggtgacaattgggccattagaaaatcgttacataaagataccgtttctggtgctgttaccattaaaagaaagaaaaaaggattgtcgaatataactgcttacttggaacaatggcaactgattgttgataaacagatacgtaaaaaagtatgtaatttgaacgatttgtttaatggtgatgtaaaagcgattaagaaacatcttaaatcgcatcctataactattgataaagaggaaatactgaaagttgaggtttacgaaaaagttgaagcgactgcaactcgaggtataagtacggctttaactgagaaatttactcgtaaacaattagaatcagtaagtgactcgggaattcagctaattttcgaaaatcacattaagaattatcaagaagagaacggcaaagaacgatttgatttagcttttaattccgtaggattagatgatttgaataagaatatagtttgtttaaataatggtaaatttcatcaacccatttataaagtacgcttgtacgaagtaggtaatcgttttgctgttggggaaacagctaacaagaaagataagtttgtagaagccgcaaaaggcacaaacctcttttttgctatttactgggacgaagaaaagaaaaaaagagtatacgataccgttcctttaaatgaagtgatagcacatcaaaaacaaactgctcatataaaagcaaaagataatacccctattgctttaaaagctgaaaaaggacagtttttgtttaccttatcgcccaacgatttggtttatgtgccaactgatgaggaaatgggaaatccgaatatggttgatattaaaagtttaagcagggatcaactagagcgaatatataaaatggttagtactacacaaaaagaatgtcattttgttccaaatactgttgctaaagaaattagaaagaatgaaaatggaacaaatagtaaaagcgaacgagttcaaatactaaatggcatttcattgttagatgataaacaaaaacccgttatgattaaagaaaggtgttggaaattaaagcttgatcgtttgggaaatgtgcttgaagtgaaaaagcatgtttctccaatattacaggaagtataaatcaaaactaatatcatgattaaacgcacactgtattttggtaatccagcctatttgcgcaggcaagatgggcaactaaaggtttttaagccaaaggagaaaacagaacaggctagccttcctattgaggatattggggtaatggttttagatcatcctcaggtaaccttgagtcaggcacttttgtcttatttgatatcgagcaatgtggccttaatatcatgtgatgaaaagcatcaccctgttggtttgtttttacctttggatggtaactcggtacagtcggagcgttttaaggtacagttagaagctagcgaacccttaaaaaagcaactatgggcgcaaacagttgcctctaaaattgagaatcaagctcgacttttggaacgatttgatatggatgctaaacgcttgcatgtgttggttcctcaaataaaatcgggcgatagtgagaatgtggaagctcgtggggctaagatttattggggaaccttgttcgagaatcatgattttgtgcgtgaacgatttggcgatgtgcccaatccgcagcttaactatgcttatgccataatgcgagcttgtgtggctcgtgctttggtcagttcaggcatgttgccaactttaggtatttttcatcgaaacaagtacaatgcttattgtcttgccgatgatattatggaaccctatcgcccatattgcgaccaggtagtgatgcaaatgttttatgatggtgagcttgaggatgaaaaattaacgaaggaacaaaaagctaaaattttatccatattaacgaccgatgtgatatttgcaggtaaaaagagtcctctaatggtgggtattagccgaaccacaagttcgctttacgaatgctttgcaggcgaaagacgtaaaataatttatcccgagttttatgacacagtatgcactcagtcaatatcgtaatatgtgggttctggtctttttcgatttacccaccgaaaccaagaaagaacggaaggaagcttcgcgatttcggaaagagctgatgaaagatggttttaccatgtttcagttctctatatacatgcgtacttgcccaagtagagaaaatgccgaggtgcataccaaacgcgtaaaatatttattacccgaacatggacatgtggggatacttaaaataaccgataagcagtttgccatgatggaacttttctacagtcaggaaattgctgataaacccgctgtggttcaacaattgcaactattttaattatccatttcattacgaggagattcgacgaagcaatctgtctaaataacatggtgagtagaataaataaaacgaatataaaaagaaaaccgaagcctttgagcttcggtttttttatttctgatgcttcgtacaagttattgactaatagagtgtaataaccgacaccttgtgattctacacatcaaagatacattctgtaagcaaatcacaaccatctgatacgttagtagatactactgcaccttgtgattctacacatcaaagatacattctgtaagcaaatcacaacggggtaagggggacttgtgttcagaccaaccttgtgattctacacatcaaagatacattctgtaagcaaatcacaactatgaagatgtatcagtaattaggttaaaacttgtgattctacacatcaaagatacattctgtaagcaaatcacaacgaagcaatggcatttcctaactgttaggatcttgtgattctacacatcaaagatacattctgtaagcaaatcacaactcttatctggataagtaaatacaaacctcccttgtgattctacacatcaaagatacattctgtaagcaaatcacaacgaacggctgcggcaatagcacaaacggcaacttgtgattctacacatcaaagatacattctgtaagcaaatcacaacaagatcaacaagctttgcaaggtcctcagccttgtgattctacacatcaaagatacattctgtaagcaaatcacaacgtcggggtcttatgatacaatagcaggtaacttgtgattctacacatcaaagatacattctgtaagcaaatcacaactagtgccgaggtcatcgctagcttatcgaacttgtgattctacacatcaaagatacattctgtaagcaaatcacaacttgctcttgtaggaatgtaattaatagttccttgtgattctacacatcaaagatacattctgtaagcaaatcacaactcctgtacaatggtaactcgttgtattcctcttgtgattctacacatcaaagatacattctgtaagcaaatcacaacatcttccattcctaaagctactgccttatccttgtgattctacacatcaaagatacattctgtaagcaaatcacaacgtagttggtgcaacatttaaaggctcataacttgtgattctacacatcaaagatacattctgtaagcaaatcacaacactatgacaatatcaatatcaaaacagcctcttgtgattctacacatcaaagatacattctgtaagcaaatcacaacttaacggatcagtattcattaacaattcaccttgtgattctacacatcaaagatacattctgtaagcaaatcacaactgctggcgcgaacggtgacaaaataaatgtcttgtgattctacacatcaaagatacattctgtaagcaaatcacaacatcaactaatgctccagtagcttgaaaaaacttgtgattctacacatcaaagatacattctgtaagcaaatcacaacgtgtactgtcatgattagctaaatagtctgcttgtgattctacacatcaaagatacattcttatagttaataaagaaggcgatctcgcaatcattagcctgaaagggaataaaccagaggtcaatctatatttatcaattagaaacaacgttaagagaggtcgttgatacaggcctaagggcaatatgttgattggttaatgataagtggtattaagctaaaaagaagattttgaatcccattatgtcatgtttatctaagcatctctaagctgatgttaacacctctatagttttactgtcaggcttcataagcaaaggttgattgaatgctgttcaaattatcctttatcattgctacgatcaataacctgcttgtaaatggcactaatgatagagctgtgctgcccagggcatctttcaacgaaaagcatcatcagggcatctttggactattccctgcccctgtaaaaatcactcgcatcgtctcaattattaatgaggtgaatgggaatattgtggctaaaggtgagaaaaagtgtgattactaagtattaattatcaacatcaaattctataatatcaactttgagtgaatattactttaggaaaaacagccttgagctaggaaggtgtgaaaattgaaagaagcgtaggtacgaagctgatttcgattgaaacgaagggaacgtagtgcgagccgcctgcgagtggagtagcggttggtgtaaataacggtttgaagaatgaagaccatttacatctactgtttacagcaaggttatggcaatgtttttgaataggattggatagtgtgtaaggtcaaaaactatgacaaaaccgtagaccgctgcgactagcaggcgagcctaatatgggtagcggttggacttgtaagtactgactgaaggtacgaaaggaagtttttacaagaacaaaaagagctgccgtgagaaagatggaggaacacaaaaaacatgacaagctgaagcgaagcggaaccttttggtattactactctttatttaatcctctaaaataaagcaaataaagtgtagtgatagattggcgtgagttttgttgacaactgatgacgaacacctattttccttttgaacaccatcctctcacaaagacaaactcattaatctatttgcaacttgaattcaggaaagaattgttgtgtgttttagtaacaaacaatatgttgttattagtattattgattgtatatctaactaatatttgataatgttgtgtcgtgtgatagaattatcgtaacatttcaacagctaataatctgatcaaaatcgcagttacattatcaattgaggagttattaatatgccttgtgtaaactaggtattaataggcctcgtgagcaacatgcttgtgcacagaacacatataatttttatcgttatatatgactcgagactataggtctctagaccctgttttataatatttctggttatactgttacgtatgtatattgatagagaggggtttgacgtataatattttttgtgatagaaatttattttaaaaatcgatattgtattatgtgagaaaaaaaaaggggtgggtattttcctttaggtttggatactgttttagtaatatagtctgctcgtgcgtataatatgaatcattttttttcctaatagatttaattgaaaataaacaaaacgattacaagttctagttttaggaattgagatattttcggtatattatattaaaacaatataactatgagtaataatagtaatgacaagggaaagactcctgatcatattgatattcaatataaagatatcaatctttatagacaaaaagatgaatcttatactgcatactggcaatgtcatgattctataaaaacatattggcaatcaaaatatgtgtattctgattgtgaaatgagagaaaagattgtggatgatttatgtgctaggtataaacaatctagaaatgatgttttagaaatgatctgcatatctttagcagaatatatcttaatttgctaatgctttttatggtattctctcccgaagactaagataatattacgcaccattcgcttcactaggaggtagatatttaagatgtatataggttccaagcaaagtaaaaataatataagtttgatggtggtaatgaaacaatttaaagaaattgaattttagtaggacgtaaaactttcggcaattatatcgtaaaaatacctctagtaatatgatttgtaattgataaatctatagtttgttacggtcaagatgatacaatagatcgtttcccgaaagattgtacctataattgttaataattacgatactagagtgtcttgtcaattacttacgcttgaagaatggattaaggtctttaatgttctgaaagaggcaatttattataaaaatcgatgttgcattatgtgacgagggaaaaagggtaagggtgttttctctcaagatttggaactttgtatagtaatataccctgctcgtgcttgtaacacacaaaaaaaaacaataattcaagaaatactggttttcatagttttcccatatcaagattggaatgccctcaaatattaggctttccaattaatttcaccttagattttaattataggaaatagtttctttactttgtaatctgcgacatagaagttttctcgttgcactctttgcgcattccagcgcacgaattttcaaatatatctataaagagggttaaccctcactaattgaatttaaagcaaaggaacatagggtaatgaccttgtgttacttcgtattaacgtaatattatttgaagatgaagaataaacattattacctactaccaggtggtaaaagggctgaaaacatgaaacaggccagaatattcatggagattggaaaacatgcattcagaaatgcggttaaatgtggcgaagttattaaggtattgtttaaccctcaaacgcttcagagtgatgaacaatcaaacaacgtacaataggtccacaaatgatggtaaggagaatctctattccaaaattgataataggatgatacatgacgaacgactctcactaaatcaaattggattgatgacatttatactttcacagagtaataagtatgttattaactccacctacattcaaaaacagacaagtcttggtaaggataaattttttaaagaatggaagaaacttcaggagttgggttatataaaacgtaaagatatacgcgagaaaggtcaagtaaaaggtactcattggattgttaacgaaaaccccttaaatatggggcgtttgcctaaatccgaaaaacaggaatctggtaactctgaatctgataaccctgacagtaataataatcaagaaaataataatcaattatataagaaaacagtaacaggtgagcatgcatcaactgcgttgtcaccgagtataaagaaagagattaacacaatgtttgatgaagcaaaagaagtttatgaccatatctgtagtgttgctgctaactacgggtgcaagacatatggttgggacatgacggatgaggacaaattgcttattttaggagcactcagtaaatatgataagtacaagaataggacctcagtaagaatgttaaatgataagatagatgagcttgcttcacaagctggtagtgatgttaactatatggggactcgttttttctgcaaaaaaattgcaggtaatgaaattaaaaataatcaatttctaattaataaagcaaaggagaggattcgtaagaggagtttagaatcgccaggaagtctagttaactggaatcctagtgataagatccccgtaggttcagtctcaccatcacaacttcccccattaccttatcctcttcaaaaacattcatgaaatgcttttgaaaatactacaatattaacaatgaattgtattagtgaattaagggagtatttaaagtttacacaatttacttttaatgaagcaaaaagcccaatctttaaggttgggcttaaaaagtaattgtctcgtcctgatatgaacatttcgtatcaagcaaattagaaaaaaaggttaattctattcgtctctatcaaaacgttcaacgattcctaaaatatttttcaataaaatattcgacctccaatgcgatgggtactcaaataaccttttcgtcacatcgagtctaaagattatttttacattaaagtagaccattgtttcttggggacatacaaattgtgtaatcgacataccatttgtgtaattacgcatacagtttgtgcaatccacacctctcaacaagctattctacagccacatatcctccatgagagtatctaagaagatgtagaaagagaactattacgtattattaactattcctttttaaaaatagaggtaatctaaaaacagtttagacatttcacttatcttactatgtatcaaatatctttacgaatattagtatacacataaatcatatttagtcattacacaaatagtatgccttacccttaattcataattacgtggtataagttttggaatatgcttaactaacatcgtcttcccaaaatccttttaaataactctttctataatagtttcttaactttcacaacggttgttttgctcactcctagcgtatcggctgatttcttcaatgacattccagattcaaggcagttgacgatattcttgtgcttagtcaagaatttatcggtgctttcttttgtcccctctttgcgacctatatatactcctctttcctttgctaactgaattccttcggcagttttttccttaatctcctctcgttgctgttctgctatctgagaatacattgccgccatcattttaaaagtgaaactctctttaccattatcaaatagatgcatattacccattgatgtaattgttaactggcatttatattccttaaatactttgattatatcctgaatatcatctgcatcacgccctaaacgatcaattctattcacataaacatgtttcaccttaccagtaatgatatcacccatcaaacggcttccttgtggtcgttctgcaaatggtgtagttccttggatcttatcgatatactgttgtccaattgctttattcacctgagaaatgacgttctgcttagctgtagatactctaatatatgttgcttccatagttcattcacggtattgattgcagtcacaatataggtacaatattagactctataatattgtactcatgaaatccttgaatttgtagctaatatataatcattaaaggttcatgatataggtatagtctaattatataccacacggtttaattaattccaaaaatggaactttaaggtgtactctataattttagataagtacaaacgatagaatcacaagaaataagagtattaagaagtctgaactatgctgtatagctaaataattatcttaaaaattatacaatcgtaggacactttaaaaatagtatacttaattttgattcttaacaccataaagatcactgttccatgaaaaacctgtttctattagtcctatcacttctgtttattaatcttggttattctcaagacaatttatacttgccgatagcaaatggtgaggtaataagtcattcaaactacacattctcttatatagaaacttatgaacaagcagaatgggtcgcatatgaattgacaacagaagaaacggtaaaacttgtgagaaggtcaaatagatttaaatcagatccatatgtattaactggttcagcaacattgaaagactataaaagttctggatatgacagaggacatttagcccctgccgctgatatgggattttcctctattgctatgaatgaaagtttctatatgtccaatatgtcaccacaagcgccatcatttaacaggggtgcctggaagaagttagaaagccttgtaagatcatacgcaaaacagtatgggaaaatatatgtggttactggtcctattttaacgaaaggtcttcctacaattggtaataatcatgtagcaataccacaatactattacaagatcatactaataggtgaaggagataaccaacaaatgatcgcattcttattgaggaatgaaaaaagttcagattcactatctaagtttgtcgtcaatactgattgcatagaaacacttacaggaattgactttttcccacagttaccagacgatttagaagagaaactagaatctggaatagataagtctaattggtatttcaaagttaactaagcacctttaaaacaacatacaatctcctctaactctacagcaatacaatgtaaagagattcttaaatcaacaagagtaaaatgtagaaacaaaaagcagtaataattcttagtatgttgggaacattaataataacctctcacctatatatgttctatactaaatcaaaccaccacattatatccgataatttcatcagaaattgtgtgatggggatttctaaagggtctcttggtcattaaaccactagctttttcgagagttccagcaactgaatgaatctttgttgtttcgagagcttcttgcaaagttaatggaggtaaaatacctggtattcgttttgctagcatcgtttttccagaacctggaggacctatcatgattatattatgcccacctgcggctgcaatttcaagtgctcttttcacattctcttgcccttttacatcggcaaaatcatattcaaaatgattcaagtgagaataaaattcggctcttgtatccacctcggtaattaccaactcggcatctccattaaaaaaatcaattaattccttaatattttcaatcccatatacttttaaattattgacaacagcagcttcttttgcattctctttgggtaaaattaaaccctcaaaaccttcttctctcgccttaattgccattggcaacacaccttttatgggtactaaactcccatcgagcgaaagctcgcccataatcacatagttttgtaaatcaggacatttaatttgttcggtagccgttaaaattccaactgccaatggtaaatcatacgccgatccttcctttcgaatatcagcaggagccatattgatgatgatctttttgccaggaattttgtatccaacttctcgcaatgcagaatcaatcctttgctgactttccttaactgcattatctggcaatccaaccaagctgaaacg

SEQ ID NO: 1047 - DNA, 24692 bp, synthetic construct
  misc_feature 1..24692: note = Synthetic
  source 1..24692: mol_type = other DNA
cgggctatcggtaacatctaccgagaattcaggcttaaggtcattgaccaccttgaatcccagatataccgtcttggaattgttcataacatcccatgcgcgcaacatgagcgtgtgtttaccttccggcagctctggaatgctgaatgtcacaataccttttgtataatcacccgcatactgccggaaattgccgttaaggacccatgtccaatccggattgttgtcaattacgagcagtatatcatgacctattccgttgcccgatgtattcaggccggactcatcatgcaattcaaccaccagcattggggttgaattgacacttgcgccatattggaaggacggcttattcagatacagtcttatatccggaccgatactgtcaacggccatcccttgagccgtaccgccaaccgtaaagttctcatagtagccattggccgattccgacccgttgttgctcagggcatagagtgacagtcggccttgatcgccggaatagtttatatccagcggaacagggaatgtaaagcagaactcgccgttcctgacagaatcagtcgcagagtgcagtattcggtccctgtaacggaattcaaacggttcatcagctgtattcagattgttaaaacaggtaattatacgttcactgtcaaagacagtactgctaagttcgccgttgaaatccgtggctttgacccctgcgcgctctatatgaccgcgtacggttattaccgatccggcactggcctgagccattgccgtatcaggcataccggcaaacgagtcaacgacagctgtaagttgaggtaacgacagcttaagggcgggatctcccaacagaacataatgtatcttgttgagtgtcatatcagtctcaccctcaccagctgtgacaagttcattcttggcaagccgcaacgcatctcccacagcatatctgcggccgtttgaatcatttgccaggacatacttagagaaactgcggttaatggtcttgttgaggcttgcataaaccgtcctcgtagtagaaagcagacctattgcaccgcctttgcggttgcagataaggttcatgccgaaactctcaacaggcgaatcaaacggtgcgatatcacatgatgcagtaatccagaatggcaggcggggagtgttcagtgcactcatgtcggctttattcaaaaccagttcatgcgacaggacctctgtactgccatgaccggaataattcactatgagagcgccctcgtcaagctgtttcaacaggagtttccggacagcaggatatccgttgtttgaaggggtcacctccatcctgtaggcatcccaatataccttctgcacatcaacggcacgataaaggctcccatacagacctgctatttcatcggcatccgacatgtgcgtgttattatcaccgtcatcaccaagtaccattatcctgttgcaccatgatccgttattccggcctgacatgtaatctgtaatcttatctacagcgtaagccgcttctgtcgcggtaattacaggcaaacgtcccacaccgatatcaaccttttccgttacaggactggcaccctcggaatcatcaagaaggccgaaatagtcctccatcacatatgagtcggtatgactggttgagttgtatgattcatagcacagaaggtaatcatccgggttagcggaagaccaatcaggaacatgcatacggttatcccatgctcctccacccataagcagaagatatcgtggcgatatgccgttgttccccctgtcatacagcatcttcatgaaacggcgcagtgcggtagcatcgggagtacccgatgagaattcgttataaaccatatctgctctgactactgccactttcagactgtcaaatgccctatggaccgaagccagacgctcagcctgagcctgaagcttacctgaagcaggcactacaatcaccatatccaccgaatctgttccgtgaaggttctggttcttaacctcacctacaacttcaggctccgggaaaacgcctttgggattaaccgccacaagccggtccgaagagctgaaatcagcaccgagagtcacagtattgccgtcattccatacggaaggaacaatatatgcagaaccgtcatccttaaggcaccatactatcacatcggcatttgagtccttaatgatgaagctggtttccttaacatcacacccggtacggaaaactgtcgaagaaccatacaaggcaagtttacgtttataattaagacggatatagtcaagatgtgcatcggttcccgcaggagcgttgtgtacaatcctgatttgagtttcatccccaaaccggcctttactaaatattctgccctccttgacaacagccacctcctgatccttgtttgagcctatatggagactgcccgactctgtcccgtttacatatacggttagccttgaagactcatcggatgatgccgagaaagcgatatccatcatcacgctgtcggcatatatccctggtatgctgaatttataggtgcgtccgctacctactgagtagttatacttctcaaacaggcgccgccctgacctgtaccagctgaactcatccggatcatagactgaaaaatcgggatacatatccacaggaacaccgggaacagtatcagcccgcaaagtttcaaacctggctctggggcctttggccatgtctgtcaggaaataataaccgtaatccgaatatgtgttgacattatggacaaaacctctgtctgtgcgttcccatgcaaccggtcccttggcatagaacagaagattgtcgccttcctgccagacggcctgctccggaagatcatcgggcagatactgcaattctgtttcgggcaggactgcgccaccatagccgaaaacgcgcacagccgacggatccttgaatcccatggaacgcaacgacttggttgtcaatttatgaacacctgattccgaaacctttatcttgacccatttcccgctcgcgagcacggatgtacgggtatagacggagtctaccggaactgcatcccgtgtcttatgcacagcaggaatggcccttattactgacttgtatgaatttatcgcataaattgagccgtcccgtcttaccaatggcataaaaccggcattgaatgtggcactgccccggctcactcctatcgatgagtatatctccggccattcgggaacttcgtccggctgtatgccccacctgcccaaagtaggcaaatcgattctgacaagttcgggatattcaatctctgccgtatatattgaatcttgccatctaccctccaacggcatgccgaaactgctccatggacgtaccgaatccgtgacagccagtctccagccggattcagtaaaacttgcccgctgtgccagaatggatgtacatacgcacagcaacaagaccagaaaggcaaacggttttctcaaaacagtatctatcttacgtgaaaatccaaaacattctctccttccaggaaaccctgcagatgttgcccaacgcttaccggccccactccaacgggagttccggtaaatatcaggtctccggtcttgagcgtacagaaaccgctgacatattctattatccgtgcaaccggaaaaatcatgtcggcagtatgtccctcctgaaccgtattcccgtctatatccagacggaaatgcaaatcctgcagattacctgctttttccttaggaatccactcaccaaccacagccgactggtcaaatcccttgcataactcccacggcagtcctctcttacggaaatcattctgcatatcccgtgccgtaaagtcaatacccagtgtcacagcgtcgatatacctgtcggcaaaccgtgcgctgatgctcttgcccagacggtttatccttaccacaagttccgtctcatagtcaacccggccaagatggtccggcagaaaaaagggacggcggttcctgaggattgaagagtctggtttcatgaatatgaccggactctccggttttaataacgtttcgcccaattctttattgtgcctggaatagttcattcccacacagatgatcttcatatgctaccttgttttatttgcaaaaatagtatcttcgcatcacaaaacacacttgtcatgggaaagaaagaaaacgattggaaagaccggttgggagtgatgtactctaccaaccccgatttcaactatcagaccgatgatgagccggaggccgaacttctcccgccaggacaacagaaactgcgcctgcgtattgaaaagaacggacgcggaggtaagacagtgaccgtaataagcggtttcatcggtcccatgtccgatatggagtcactggcacgcaccctgaagacattctgcggttgcggcggatcggctaaggagggtgaaataataattcagggcgatttccgtgacaaggtcaaggcaaaactgatacagttgggctattccggtaccagatgaaacttacacagagttctataatctgacctttacttacttttaggtatcactgcttatacccaaaacttgtatttttgcagtcggaatacctaataatagtgaccgatgaaaactgaatacaccccccaggacaagatgagggacctgattgacgacaacaatctgatccttctggtattgagccgctttggaatacacttcgggttcggagacagcaccataggcgaggtttgtcaggataataacgttaactgctccacatttctcgcggtggccaatctgattgcaggaaagaattataccggttattgcgtttcacttccagcactgatggattatcttaagcgtgctcacacctatttcagtgatttcatcctgccaggcatacgccgcaagcttattgaggcgctcaactgcaatgacgttaacgatgtggcattcctgattcttaagttctatgatgactacaccgtagagatccagaatcacatgaaacatgagaatgatgtagtattcacttatgtggagaaattgctgcgcaaccagcctacaggcaggttcaatattgataaatattcagtatcacatgataacggatcacagaaacttaaggagttgaaggatattgtcattcgccattaccgccagcccaacaatgaccagctgaactctgctctatacgatataataaactgtgaaaatgaccttatatcacacagtgaaatagaggagcgtctgtttgttcctgctgtcaagaagcttgaaaaagcaatgttgaacgatagtgagcccgctaacagcaaggttcaggaatactctgccggatcaatagctatacttagcgaccgtgaaaaagatataatcaggtgcgtagcccgcggtatgtcaaacaaggagattgccgataaattgttcctttcaatacacacagttacaactcaccgccggaacatcacagccaaactgcaaatccattctcctgccggcctgaccatttatgcaataatgaataatctggttgatatatcagatataaagttacaatgaaagagaggctccctattaaaggaagcctctctttcattatagagaaatcttgaaatattttattcggatttcctaagcggtcccggagggccgcccgtttacggagtaaactaaaataaggataggtttacctgaaatccggatttattcggatttcaaggtgaatctgcggaaggcagttacggtgaggtccttatccagagccttcaggtactcggcaacggttttcttctcgtcaacgatgtacttctggttcaggaggcagctctcatcgtagaacttcttcattctaccctcggcaatgcgctcgatcatgttctcgggcttgccctcctcgcgagccttgtcagcagcgatttccttctcacgagccacgatgtcggcgggaacctcctcgggcttaacggcgataggattctgggcagcaacctgcagagctatctcatggacatactccttgtctgatacctccttgttgaaggcaaccaggcagcagaggaaattcttaccctgatggttgtaagaagcaatctcgggagcctcaaggtagttgtaaccatccagctcaagcttctcgcctacgataccggtacgctccagaacgatatcagcaacggtcttgccgtcaaacggcagagccttaacctcatcgagtgacttggcctttgcggcaacagcggcatccaggatgctctgggtaagagcaatgaaatccttgttgttggccacaaagtcggtctcgcacttaagggcgatgatagcaccgaagtttccgtcaacctttaccagtacgcaaccctcggaagcctcacggtcagaacgctttgcagcaactgccagacccttcttgcggattatctcaatagccttctcaaaatcgccttcagcctcagtgagagccttcttgcaatctgacataccggcaccggtcttggtgcgcagggctttaatatcatcaagtgttacagccatttctttttaatctttaaaggttaataaaatcaagcctcagcctcaccttctgccttgggagcggcagccttgcgggtgcgcttgggtttggcaggtgcctcctcggcgggagcctcggcagcaggagcctcagcagcgggagcctcagcagcgggagcctcgtcaagagtctcttccttcttggcaaccttgcggatgcgctcgcgacggggcttctcagccttctcagcctgagcctcatcatcggcagcagcctcatcacccttctctgccttacgctcggcaagaccctcagcgatagcatcgcagcaagcggtcaggatagcgtctacagacttagtagcgtcatcgtttgcggggataacgtagtcgatgtttgaaggatcactgttggtatcaacgatagcgaatacggggatacccagacggttagcctcacgtacggcgatgttctccttgagaacgtcaattacgaacagggcagccggcagacgtgacaggtcggcgatagaaccaaggttcttctccagcttggcgcgctgacgtgtgatctggaggatctcacgctttgaaaggtttgaatatgttccgtcctgagtcagcttgtcgatagtggccatcttcttcacagccttgcggattgtggggaagtttgtgagcataccaccgggccagcgctcaataacgtaaggcatgccaacggttgataccttctgggcaacaagctccttaagctgtttcttggtgcctacaaagaggatcttcttgccgtcacgggccatacgtttcagaacctcggcagcctgatctatagcggctacagtctggttaaggtcgatgatatgaatgccattgcgctccataaatatataaggagccatagcgggattccatttgcggcgcaggtggccgaagtggcaaccagcttcgagaagctgttcaaaatttgttcttgacataaatagtttgttagtttgtttacattcttttttaacaaccgtcgggtagctgtcacttcaggcggcagatcccgacagtttagatactaaacacagattcggcgtattaacgcttactgaactggaatctgcgacgtgccttgggctgaccgggcttcttacgctcaacagagcgggcatcacgggtcaggaagccttcagaacgaagggtcttcttgtcatcaggattgatcttaacaagagcgcgtgcaattgcaagacgcagagcgttggcctggccattgtaaccgccaccgtccaggttcaccttgatatcatacttctctgccacatcaagcttcttaagaggctggagaactacgtactgaagcagtgatgacgggaagtatactgccagatctctcttgttgatggtaatcttacctgttccttcagaaacgaagacacgtgctacggcgctttttctacggcctattgcattgattacttccattctctttcaatttaactaagtgaattgatatctattgtcttgggctgctgtgcctcatgcttgtgctctgtaccggcataaacatagaggttatccagaagcttgtcaccaagcttggtcttgggcagcatacctttaacaactttcttcataagtctctcagcgccgttgggcttagccatcagctgtgcaggtgtggtctcacgctgaccgccgggataaccggtgtaacgcagataaaccctgtcagtccatttcttgccggtcaggacaaccttatcggcattaagaacgatgacattgtcgccgcagtcaacgtgcggagtgaaatttggcttgtacttaccgcgcagcagcttggcaaccttcacggcgaagcggcccaggacctggtccttggcatcaaccacgacccattccttattaacggtagccttgttggccgaaacagtcttgtaacttaaagtatccattctaaactttaaatcattaattaaacattttcattactctacgcaacctctccgtcatcccgacgtcatggaaactccctaaacgcttgttttctgtagttacgctataccacagaacccgtactcgggggtttaacacgctaataactaaccctttatgcaagggttgataataatcggctcgcaaaattacactttttcaatgaaatagcagcacgtttgcgagatttttttgatttcctgccatacttgcaaaaaacagccttataacaatgattctttgcaagtatggcataaaaaaaaacctaaaaccccgattttggcgccatacctgtcaccacagccaccatagcccacattctctgcaagtatggctgatttttggcaacaaaaccatatatttgaaataaaaaactatatggaacagcccaaaatagagagaatgattcagttcatcacatttttggccgataaacgcggttatacaattgatgaaattgctgaaaagcttggaatatcccgacgcagtgcttatagatatatcgatacattcaaaaacgcccgctttattttcagttatgataatggtcgctatcggttgattaccaacaagggaaccatgaaagaattggcaaataccatatggtttacagaggaagaagcttacgtcatcaagactcttattgatgaattggacaacacgaatggcatgaaaacaggacttatgaagaaattatctgctatatctgatatgacgaatcttggagattacacatataacaaaacctattctgtcaatatcagcaaactagctgaagctattaaagagcataaaaaagtaatgctaaagaagtattcatcggcccactcaaacgacacgcgggatcacatagttgaaccattcgagtttacaagtaattccatcgatatttgggcttttgatacagaggatagcaaaaataaaagattcaaaatatcaaggattaatgaagtccaaattctggattctgattgggagaggtattctgaacacaaagccggattgatggatgatttccgcactcatggtaatgattgttatcatataaaactggaaatggacagaatggcaaaagaccttttgattgaggaataccccttatctgagaaacatattttttctataaatgaaaaacaatggctttacgaagcggatgtttataaactggaaggtgtaggccgttttatcatggggttatacgaacacattaccatcctggatggcaaagaattacgcgattacattatgtctttaattagaaaaatgaccacatacaagaaataaaaaaccatcagtgacacaaattgacactccttctatttatatttgtaacctatgaaacccattgatgcaaatagaaaaaagaagacgaagggttgcccctccgccttagatgttttcacaacggaataatccttattgtgatttgcttcaattttgtactgcaaacataagcactttttttaatccgcacaacattctcaaatattatttcaacgactaattaaaacatcaacataatgaaaaagattctaggactagatcttggcaccaacagcattggttgggcggtagtaaatgcagatgaaataaaacgcgaaaacggcacctcattcttgcagcccagcagcatcagttcggcgggcagtcgtattataccaatgtctgcagacgtattgggtgactttgataaaggaaactccgtgtctcaaacggcagaaagaacaagcaagcgaggaatacgtcgcttgctagaacgcaatttacaaagaagagaacgtctgttaagagtattaaaaaaaatggattttcttcctgaacattatgcaaataagattaatgaatatggtaaatttaccgattatagcgagccaaagctagcttggaagaacggaaaggatggaaagccagagttcattttcaaagattcttttaatgaaatgctttcagactttacaaagcatcagcctcaacttattgcaaacggtaagaaagtgccttatgattggaccatttattatctgcgaaagaaagcactattccagcgtatagaaaaagaagaactcgcctggattctgttgcaattcaaccagaaacgaggctattatcagttgcgtggtgaggaagaagaggagaactccgataaatcaattgagtttctggctcagagagtggtacgagttgaggctactgatgagaaaaaaggcgatgaagtctggtataatgtatatctggaaaatggtatgatttaccgacgttctagccgaattccgctagattgggtaggtaaaatcaaagagtttatcgtaactacagaccttgagaaagacggaactcccaagaaagacaaggatggaaatataagacgttcattccgagctcccaaagaagacgattggacgttaataaagaagaaaacagagtttgacattgacaaaagtcaaaaaagtgtaggatgctatatatatgatgctttgctcaccaatcccaatcagaagattattggcaagttggtacgcaccgttgagcgtaagtattacaaagatgagttaaaacagattcttgagatgcaaatagcgttgatgccagaacttcaaaacgaatcattgtacaggaactgcattgatgaactataccccaacaacgaggctcaccgaaataatattgcgaaaccggattttatcaacctgttcatcaatgatattatattctatcagagaccactcaagagcaaaaagtcattgattgacaactgtccttatgagtcacgcagggacaaatatggaaacgtgcactctgttaaatgcattgccaaatcaaatcccctattccaagagttccgcttgtggcagtttgtacagaacctcaaaatataccaacgagaaaaagaagtcaatggaaagttacaaacggatgtagatgtaacaaatgaactattaagaagcgaagatgattatatagccgtttttgactggctcagcaacagggcatcgataaaacaagacactctgctcaacacctatttcagattcaaaaaggaaaaaggtaaagaacattacccttatcgatggaattatgttgaggataaagaatatccttgcaacgaaaccagagcagcaatattgagtggattaaacaaaagcggtattagtaacgatttcctaacactggataaggaaatgcaactatggcatttgctatattcaattgatgataagacacagattaccaaagctctaaacaagtatgcgaccaagaaccatttacctgaatcttttgtccaggtttttgccaaaatcaagccttttgaaaaggaatacggctcatactcagaaaaggccatcaagaaattactgccactaatgcgtatgggtaaatactggaactttgaagacattgacattcacactaaagacaggatcaacaagatcatcactggagaatatgatgaaaacatcaaaaaccgagttcgcgagaaagccattgatttgtctgtagagagtcatttcaaaggcctacccgtatggttagcatgttacatagtatatggacgccattctgaatccaaagatagcatcaaatgggaacagcctgatgatattgacatgtatcttagagagttcaaacagcactcgctacgtaaccccattgtagagcaggttgtaacagaaaccttacgcacggtacgtgacatctggaaacaagaaggtcagattgatgaaatccatgtagagttgggacgtgagatgaaaagccctgcagataaacgtaaatggatgacaactaaaaacctgcagaacgagaacaccaacctgcgtattaaagccatgcttatggaattcatgaatccagaattaggcatagagaatgtacgcccattctcaccgagtcagcaagacatcctacgtatttatgaagagaatgcgcttgataatctcactaaagaggataaggattttgagttcataagcagaatctcaaaaactgcacaaccctctaaaacagatatagtgagatacaaatgctggctcgaacaaaaataccgttctccatatacaggtgaaatgataccacttgcgaagctctttacaccggcatacgagattgagcacattatacctcagtcacgctattttgatgattctttcagcaataaagtaatatgcgaaaaagaggttaacggactaaaagaccgccaattaggttttgagtttattaaaaatcacaatggggagaaagtacaaatcagtcagggcagaactgttcaaatactatcagttgaggcttatgagaagtttgtaaaagaacactatgcaaacaacggcattaaaatgaaaaagttgctgatggaagatattcctgacgacttcattgagcgccaaatgaatgacagccgctatataagcaaacttgtaaaaggattattgtctaacatagtccgtgaaaaggatgaaaatggagagttggagcaggaatccgtatcaaagaatgtgatttcatgcaatggcaacataactgattgcctcaaaaaagattggggaatgaatgatgtatggaacagtattgttctgccgcgcttccgcagattgaacgaattgacaggcaaagatgtattcacaacaattagtacagaggggcacgagatacccgcaatgccacttgaactacagaaaggtttcaacaagaaacgcattgatcatcgccatcacgcgatggatgccatagtgattgcctgcaccacacgcgaccacgtgaatctgctaaacaatgaagccgcccattccaagcacaacgccaaccgttatcaactacagcacaaattgcgccgttatgaaaagaccattataaatggtaaggaaaaagagatagctaaagaattcctgaagccttgggatacttttacaaatgatgcgaaacaaactctagataatataattgtcagttttaagcagaatctgcgaatcatcaacaagaccacgaactattatcagcattttgatgagaatggcaagaaagcaatgataaagcaagtaaagggagatagttgggctattcgcaaatccatgcataaggatacaggttggggagaagtgaatttacgaaaatgcgataaaacggtttcattgagcgaagcattgaagaatccgaaagtgattgtcaataaagattttaaacacaaagtgcaagagttgcttgcacaaggtcgtgatgccaaatacataaagaggtatattgaggataacaaagatgtgtggtctgatattgacatcaagaaaataagggtatactattatacgcaagatataaaagacgaaaatggcatcataaaagatcgatattttgctacacgattcttgagtgatttagtaagttatatgtctgggataaaagaatatgacaaggctatatcacaaattgaaagcatcacagacactggtattcagaaaatactaaaagcacacttggaagcaaaagacaataatcccgaactcgctttttctgcggatggtattgatgaaatgaatagcattattgttgattctaaaaagattaagtattatcagttgaaaaaagttcataaacctatttataaagtacgtcgttacgaaagcagtaacaacaagtatcctattggtcaaaaaggttgcaaagctaaaaagttcgttgaggctgatgatggaacgaatttatacttcgtcgtctatcaaacgattgataaacgacgaacatatgcaacaattcctcttgaattgtctatagaatgtcaaaaggataatcacaatctgaaaggctggattaatcttcttgatgaaagactcagagataagtctgagaacgaaaagctaaagagatatcaaagatttaatattcccaaggatgcaaaattgttatttgttctctcacctaatgactatgtatacataacatcagatgattcagatgaccgaattgagaaaaatagaatcttcgtagttaatgatttcaatgatacaacaatctattttaggccatgtaattttgcaaaggcaatagcatctaaagaggttgacatgagactcaagtatattaaaaaagaggataaagaaaaaatagttggatcatttgatgacaaaacagcaaattttgagaataaaatgataaaagagatttgcgtaccactgaaagtagaccgattgggaaatattattgaattaaacggaaagaaactatgaacaacattaaacttttccaagacaagaagattcgttcccaatggaacgaggatgagcagcagtggtacttctcaattgtagatgtagtagaggcattgaccgacagcgtcaacccaaccgattatctaaaaaaaatccgtaagagagatgaggcgttggctacctacatagggacaaattgtccccaggtagacatgttaaccgacacagggaaaaggagaaaaacattagcaggaaatattagacaattattacgtattatccaatccatcccatcgcccaaagcagagccatttaagttatggctcgctcaggttggctatgaaagaatggaggaaattgagaacccggaactcgcacaagagagaatgaaggaactctatgagaaaaaaggctatcctaaggactggattgataaacgtttgcgcggtatagccattcgccaaaacctcactgacgagtggaagaaacgaggaataacagaggaacgtgattatgccatattaactgcagagataagtaaggccacatttggcatgactccatcagaatataaggagttcaagggacttactaagaagaaccagaacctgcgtgaccatatggatgatctggagctgatttttactatgctcggtgaacgtgttactactgagatatcggaaaaagaagagccggacacatttgacaagagcaaaaagatagcaagacgtggtggcaatgtggcaggagtagctcgtagggaaaccgagaaagagcttggccgtaaggtatccacccctaaaaattatttacccgataaggacaaacctatgatcgaagatgattaagaaaaccctttgtttcagcaatccggcttatctctcattaaggaatgagcaattattgatcagattgccggaggtggagaaaaatgacacccttcctgaatcattcaagaaagacgcagtcagggccattcccattgaggatatcggggtagttgtgcttgacaacaaacaaatcactgtgactcaaggattgatggaatcattgttggaaaacaactgcgccattatcacttgcgacaacaaccatcttccagtcggcctcatgctacctctttgtggaaataccacacagaatgagcgtttcagagaccagcttgatgcttcacttccgcttaagaaacaactatggcaacaaaccatacaatataaaatccggaaccaagccgctgttcttaaagccaatactggagttgagaccagaaacatgaccgtttgggccgatagtgtaaaaagcggcgattctgagaacctggaggcaagagcagccgtctattattggcgcaacctgtttccggaccatcctgattttattcgtgacagagaaggaattacacccaacaatctactaaactatgggtacgcgatacttcgtgctgtagttgcaagagggctcgtctccagtggattacttcctacattaggtattcatcaccacaacaggtataatgcctactgccttgcagatgacataatggaaccttaccgtccatacgttgatcaattggtgattgatatcgtttcaaaatatggatatccagaagaacttaacacaaatctcaaacaagaactattgtctattcctgtactggatgttacaattaatgatcaacgaagcccactgatgatagcagttgggcaaacaactgcatcactgtacaaatgtttcagcggtgaatcccgaaagataatataccccacaatatgatagccgaaagattgagcgaatataggataatgtggatacttgttctatttgatttaccaaccgagactaaaaaggacaaaaaagcttacactctgtttcgcaagcagttgctttgtgacggattcacgatgttccaattctccatttatctgagacattgtgccagccgtgagaatgccgatgtccacattcgccgtgttaaatcattccttcccagcatgggacaagttggaatcctttgtatcacagataaacaatttggcgatatgaaaatcttcatcggcaagaaaaaggaggagccaatcgcgcacggtcagcaactagagttattctagtgccacttgatacaacttgtaccaacttgggaacaagattacgagatttgcaatacgtggtttaccgggtgcttacgtacaactaacttcagaaatccaaaacacacaaccccaaaataagaaatcccggaagatgaccgggatttctttttctaacaactgtcataactcgttgtgttactggataatactagtatccagttgttagcagtatcaaagatactcaaaattgaaagcaaatcacaaccctctgctgcgttatcgttaccggggtggtgttgttagcagtatcaaagatactcaaaattgaaagcaaatcacaactttgaccttcgtactatctaccaccagaacgttgttagcagtatcaaagatactcaaaattgaaagcaaatcacaacatatattagcggatgcagtaataagagaacgttgttagcagtatcaaagatactcaaaattgaaagcaaatcacaacaagttccacagacttctgtttccacagaaagttgttagcagtatcaaagatactcaaaattgaaagcaaatcacaactgtctctactagtgataagtactccctggagttgttagcagtatcaaagatactcaaaattgaaagcaaatcacaacagtcacggcaggcgttacgcctatatttagttgttagcagtatcaaagatactcaaaattgaaagcaaatcacaactggtcttaataaggatttcttaaaagtaaagttgttagcagtatcaaagatactcaaaattgaaagcaaatcacaactattcgcttgaaggcctcggttgcatcagggttgttagcagtatcaaagatactcaaaattgaaagcaaatcacaacaatatggattgtatggagcttatgcggtctgttgttagcagtatcaaagatactcaaaattgaaagcaaatcacaactaggacttaccggatatccaccaggagaaagttgttagcagtatcaaagatactcaaaattgaaagcaaatcacaactggaaagaacggagcatgaattggcaagacgttgttagcagtatcaaagatactcaaaattgaaagcaaatcacaactggccgaagcgcctaagattatgaacaagggttgttagcagtatcaaagatactcaaaattgaaagcaaatcacaacgagctatcactatagcacttcgctggacgagttgttagcagtatcaaagatactcaaaattgaaagcaaatcacaaccgaggccatcacggtgatgcgcgaccagaagttgttagcagtatcaaagatactcaaaattgaaagcaaatcacaacggacgggttccatgactgcggtcctgctgcgttgttagcagtatcaaagatactcaaaattgaaagcaaatcacaaccaattccggcttacatataaaacacttcacagttgttagcagtatcaaagatactcaaaattgaaagcaaatcacaacaggacagaacctctttctctgagagggctagttgttagcagtatcaaagatactcaaaattgaaagcaaatcacaactactattgtactcttttttacggactttttgttgttagcagtatcaaagatactcaaaattgaaagcaaatcacaacactgcaatgtggtgcctatcgtgaccgtatgttgttagcagtatcaaagatactcaaaattgaaagcaaatcacaacgacattgagcaaatttgcattttggacaacgttgttagcagtatcaaagatactcaaaattgaaagcaaatcacaactgatgccgtccaatcggcccgttccggtaagttgttagcagtatcaaagatactcaaaattgaaagcaaatcacaactactcctcgcagataattcaagcgatttccgttgttagcagtatcaaagatactcaaaattgaaagcaaatcacaactgataaccacattttctacaaccatgcccagttgttagcagtatcaaagatactcaaaattgaaagcaaatcacaaccatcgcatacccgggctgcaggagcgcttcgttgttagcagtatcaaagatactcaaaattgaaagcaaatcacaaccaagattggaacagatactcaaacgcacttgttgttagcagtatcaaagatactcaaaattgaaagcaaatcacaacggtgtgattgatacggagatgatgattgaagttgttagcagtatcaaagatactcaaaattgaaagcaaatcacaacttctttaataaactgatatagttattatatgttgttagcagtatcaaagatactcaaaattgaaagcaaatcacaactgcaaccttaataattcgtgacagatggtagttgttagcagtatcaaagatactcaaaattgaaagcaaatcacaactgatggtaaaaacgatagctctaggtttaagttgttagcagtatcaaagatactcaaaattgaaagcaaatcacaactactgatccgcagctcaaacagatggtgatgttgttagcagtatcaaagatactcaaaattgaaagcaaatcacaacgggattggttgaacacatttttttttcttgttgttagcagtatcaaagatactcaaaattgaaagcaaatcacaacacactcaatgttacgaagtgaaggagcttgttgttagcagtatcaaagatactcaaaattgaaagcaaatcacaacagagaaaggaattaagaaacgtgaccgtatgttgttagcagtatcaaagatactcaaaattgaaagcaaatcacaactggaggccgtcaacttcaccaacggcgaaggttgttagcagtatcaaagatactcaaaattgaaagcaaatcacaaccaacctgtgctgctttcttgaatcctgcaggttgttagcagtatcaaagatactcaaaattgaaagcaaatcacaacattgttgcggtaatcaagtatcagttgtttgttgttagcagtatcaaagatactcaaaattgaaagcaaatcacaaccgtatcgtcacttgccatttccaacttgaagttgttagcagtatcaaagatactcaaaattgaaagcaaatcacaactctatctcctcgtaccacttgccaccaagtgttgttagcagtatcaaagatactcaaaattgaaagcaaatcacaacgactaccaatgcagttcagatattccgcgagttgttagcagtatcaaagatactcaaaattgaaagcaaatcacaacaaggatgacggcatactcacgctgtgctagttgttagcagtatcaaagatactcaaaattgaaagcaaatcacaaccgtgtttcgctatgccatagaatgagccgagttgttagcagtatcaaagatactcaaaattgaaagcaaatcacaactgctaaagatttaagtaatgtcaatcttaagttgttagcagtatcaaagatactcaaaattgaaagcaaatcacaacatcacgaaacaacggatgggaacatttggagttgttagcagtatcaaagatactcaaaattgaaagcaaatcacaacgttcgtagtggttgcatatgttctgcaccgttgttagcagtatcaaagatactcaaaattgaaagcaaatcacaacaacgggacttaacgccgccatgattgcgggttgttagcagtatcaaagatactcaaaattgaaagcaaatcacaacatattctgctatcttccttgcctcattaggttgttagcagtatcaaagatactcaaaattgaaagcaaatcacaacactgtgtgccgatggaacataagcacagtagttgttagcagtatcaaagatactcaaaattgaaagcaaatcacaaccttattgcgtcaatgacttggcccaatagtgttgttagcagtatcaaagatactcaaaattgaaagcaaatcacaactgtgccgtcagccggttccatgccggctccgttgttagcagtatcaaagatactcaaaattgaaagcaaatcacaacactccgttacagattctgtttcagttgcttgttgttagcagtatcaaagatactcaaaattgaaagcaaatcacaacgagtttcagataatcaccgggatgaatctggaggttgctgcggaggtggaattataggaaaagttcctgacgctcccggctgtcaagttctacctgggacaggattttctggcgggcgttcttgtgcaacttgatgcaaaaaaagatcaggactacgaaacttattcctcccagaagtggttcgaccgaaccggacagggcaaaggcatcgtagcatccgtgtgccagcaccgggacaaagaagatactcaacagagttcggactgatttttggccgaaatggtatcgggagtagtaatagcccatgattaccgcgaatgcgtaatggcccggtacggccagcagcgcgcgactgacagcgactgacagccaagcatcggcattcccaagaacatatcccagattctcaatggcggcaaagcccaagcccacacagacagcatagactattccgtcataatgctcatcaaaataggggttcctgcgcaggataagccatagtgcaatgagtttaaagccctcttcaggaacagcagccacaaggaatgcctctattgtggacccggtaagagttgcaggctggccgccgggaccgaacagcagcacacttataccctgctccacaaaagataccggaaggcaaatcagtgcgccgtacagaaacgccttgagcatctgcgacatgggctcaggctgggcatcacgtctgcatgtataaacccataacaaaatggcaggcagtatggcagcaataatgagaatcatataactcaactttactgtgcgcaaaattataagattctgattaagtttgtaactgcaattacaaaaactgtctgacatgaagaattatatacttgccctaagttttcttatctcttatgctgtggcggctcgtgaagtccgcagcttagacaacagttgggagtttacacttactgaggctacgattgacaggctggatggtattgagggttggcgcacggttaatgtgccgcatgactggagcatcgagggagagtttgaccgcagcaatccaaccggacagggaggcgcctatctgcctgcgggcataggctggtaccgcaagacaattaaagccgatgtcggggccgatgaaaggttattccttgagtttgacggtgtgatggcctgcagcagcgtatatgtaaacggaaaactggcaggatacaggcccaacggatatgtgggattcacttatgatatcaccgatcttgtcactccgggcaaggacgcaacaattgcagtacgcgtggacaactcggtccagccggcatcgcgctggtacaccggcagcggaataaaccgccacgttcgtctggtaagcaagaatgcatgccacattccaatggacggagcgtttgtatcttataatgaaggaaaagttgaaatcaggacaaccattgccaatttggccaagagcagcaccaaggtcagtctgcaatacatacttaaggatgccgacggtaagacggcagcacgaggcaacagtccggcaatccaaatagaagccggttcgcagacagaggtgagcggaagtattgatataaagaccccgcatctctggtctatagacaagccctatctgtatacgcttgaggtatcggtcatggacggtcgcaaggaactggacacagagaccgtaaccaccggtctgcgcaccatacgttttgacaatgagaagggattcttcctgaacgggcagaacataaagatgtacggtgtatgcctgcattccgatgcgggcgcgttgggaacggccgttcctgcatcggtctgggagtatcgtctgcagctattgcgcaaactgggagtgaacgccataaggatggcccacaaccccgccgaccccactctgatggatctgtgtgaccgtatgggattcctggtaatgaccgagtcttttgacacctggaacacgcccaagaaccatgccgagaagggatacaacatctattttgatgagtggtgggaggccgatacccgtgccatggttgagcaggcccgcaaccaccccagcgtggtgatttacagcgtaggtaatgagatccgggacaacctgaacaatgagcagggttttgacaaataccgcaaacagcaggatctggtacattcattggacaacacacgtccggttaccatggcgctgttccgccccaactcatcgggggtataccgcaacggttttgccgagatgatggatgtggttggccagaactaccgtgtggatgaactcaaggcgtatcacgacgctcaccccgagaaggcaatcataggcaccgagaatacccatgatgtccagtcgtggctgatgctaagggatgatccctcgttaagcggccagttcctttgggcaggcattgactatctgggggaggccgcttggccgcaggtaatgtggagcacctcactgctggatgtaacagggggtgtaaaaaccgcaggcttgcagcgggccagctggtggaccaaggagcctatggtggcgtttgcccgtcatgccgacaacaacggcgcaggtgcgctggtatcggactggactccggccgatatggatacatatgaccaggctgtgattgaggtctattcaaactgtcaggaggtggacgtttggataaacggagaacctcagggacgcagacctatgcccgacaacgcccgtcccgctgtgtataacgtcaactatgatcagggaataatagatgtaagaggttataacgacggcgtggaggcagccaaatgcttttctgtaaccgtaggcgatccccagaaaatcatgattgagaagataggaggccgtgccggaacaagttttgatgacgttgagatactgtctgtatccattgccgacgctgaaggcaatgtctgcccaaacaatgaccgtaccattgaactgaaagttgaaggcgcacagctgatagcagtcgataatgccgatgtcctggcgcacgataccagccataagagttcagttttcaatacttatcagggacgcatgaccgcctatatccgccgcacatcggccaccggtaaagtaacagtaacggcgaccgactgttcatcggccgccgcacttaagggtgctgcaacgttctgatattcacttgattgcagccttcacttcggttatcatgttcttgtgtgcctcatcctcttcggtcagggttgaggtaagctttatatcacctgccttgtccttggttgagaatgtgccgctgtagagcaggatgctgttaaaatagagggtggcctccatacagatcttgtaatcaccggcaggaacctccttgccgtcggcatccttgaaatcccatgtataggtctggattccgctctgggacggagttgcacctgttacggcgtcaatctgctcatcggtcatctcctctgccttggcattcttgacccatgtgggaacgcaggtgggacggaatgtgtaaccgcgacggcctccgcggccctttgatgtaaatgaagttacggtaagggtacggaccaccttgccctctgaattttcaatccatacagcccactgattggagccagctccggcctgtttctgatagttgaatgagagttcaaccgcactggctttctttgaagaattacgctgtgccatagcgggcatggcaatgattacagcaagaattgttgaaagaatgattccggttttcatatgacttttgtttaaggtttgtatttatctgattattattccaatccactgaacggtgccggcatcttcttggtataaccctgcgcatcaaaagtggcaatgattgtgccgttctggtcctt

SEQ ID NO: 1048 - DNA, 24686 bp, synthetic construct
  variation 20175: note = n is a, c, g, or t
  variation 7872: note = n is a, c, g, or t
  variation 7476: note = n is a, c, g, or t
  source 1..24686: mol_type = other DNA
  misc_feature 1..24686: note = Synthetic
  variation 7379: note = n is a, c, g, or t
  variation 20301: note = n is a, c, g, or t
  variation 7463..7464: note = n is a, c, g, or t
  variation 7460: note = n is a, c, g, or t
  variation 7547: note = n is a, c, g, or t
  variation 7749: note = n is a, c, g, or t
  variation 7471: note = n is a, c, g, or t
  variation 3006: note = n is a, c, g, or t
  variation 2228: note = n is a, c, g, or t
accgattgtggtaatatacaaggaccagcactaaaattatgttttttcatttgtgatattttttgctatacaaagatgaaaattatctgagcttaaaacgttaaattaacaataaattattcagttagttttaacaaaaattccactgtatcaacatcatcggcataatcccaaagttgtgggttttgggtctctccaaatgcaatttcgttttcaactccaatagttgaaactacacattgaatatttttcgtttcagacttaatgatttcttttaaatcattaatgttttcataggtttcgtggaatatcaccgaaataggagatgagaaatttgagtcttcttttaataataaaaactcattgtctaaaagatttaattgactcattagatataccgctttattatagtcgtaattattaatgtatttgttatcatttattacttttttccatttgaacattccattgaaaaaattatcaaaattataatcttttggaaggtatattttggagacatttcggcatcccaagccaaaatatcgaaaaatatcgtcagaaagtttttcgagttgctcttgagtttcttttcctgttaatatagctacggaatttctattctttctaataatattggggtattttccgaagtaatagtcaaaataacgagcggtattgttgcttcctgtagcgattacggcatcgaaattttcaagtttttcttctgtaaattttattttattttcaaattctggtgctaccgaaattaaatattttgacaaaaacggaagcaataacttgtcattggaagatagttttgccaacactttatttccagtaattaatactgaaagaaaatcatgaaagcctaccaaaggtatatttcctgccaaaaccaaagctattgttttgtttgctgtattttcaacagaataatttgaaagccatttgcctaaattttctttcgttaaggcttctgcccaacttttaaaagcaaactgaatgttatcttccgaaaaccatccattatacgattttgataattgtataagggaaaccatttcatcaaaataatcgtcgttgttaggaatgttttctttttttgaatacgtttcagtagaaaactgactcataaattccccaagattaacaaaggcttgaattcttttttctaattgcatattttgtttggtgttaactttctaactaattaaatttgcagcaaagttaaaaaaagaaaatacgatggcaattattatcaccgacgaatgtataaattgtggagcatgtgaacctgaatgtcctaataatgccatctatgaatgcgcagaagaatggaattttgaagaaggaaccgagcttaaaggggatgtaattcttcctaacggaaaaaaagtaaacgcatcaaaaaatcaggaacctatagacgatgatgtgtactatatagttcctgataaatgtacggaatgtaaaggttttcacgatgaacctcaatgtgctgctgtttgtcctgtggactgttgtgtgcctaatttagatgttgtagagacagaaacagaactactcgcaaaaaaacaatttcttcacagagaatagattaattgttttctttttgatactttttatgaatagaatctttttttctttttacatctaccgcttcttttttctttaatgctattctttctgcttcgtattttgctttttgtgcctcttttgatgctttaatttcggcttcgagtttgagtttttcacctttaattgcagcttggttttctttgtttactttaatttctgatgaagtatgcttgattgtttcatctctttttgtagcgtaattaatgtcttggttttcagaacctgtatcgcttacattaattacttgttctttttcttttactatttttgttacggttattttgtcggtaactcctttaactgtagtagtttttataatagtttcttcttgtacattttttgttttatcattattttgagcttgtaataaggtaactgaaaataataatgctgtgagtgtgagggtaatttttttcatcatatttaatttgctgttaaaggttaaatatactgaatttttaatacatataaaaacaggtattattttaataaaaattaatcaggattagtaaatagtagtatttttatcgaacctaaattttttaatagatgaagtatttttatatactactaactttaactctttttanatcttgtaaaaaggaagaaaaaatcatttcaattaccaatccaaaagagtataacaaatatatattagcttccaacaatagtacttttaatagcgctaattctgaaaaagaattttggtcaaaacgcttacgaccagactctagtggcattggtgatttaggtcctttagcaaagtcatatactgcaatgtataatgcttcgggcgacattcagtatttattagaagccgaaaacctatatcgaaaagccgtaattatttcagctcaaaataaggatacatacgtacgaaaattagctaaaaaccttatcattcaacgacaatatacggaagctaaatttattttagaagaaagttttaatgggaaatctaataagcgtgctacccaatttttgctttttgatgtaaatattaaattaggaaattacacggaagcatatcaacttttgggtttgttaaaaaacacaaacgattacaattacctattgcgtttatcaaaatggatggactataaaggtaataagaaagcatccatccgtaatttagaggaggcaatgaaaattgcagattcccgaaaaagtaagattttgcaaatttggacatatacacatttagcaaatttatataccaattctggaaggatagcggaggcatatcaactaattttaaaaacacttcaactgcaaccagatcatatatatgcaaaaaaacaacttgcttggattttatattcttatgaaaaaaattcgatggaagcaaggcggatattaaattcagtnatgaaaacaaataagcttccagatttactgttatttaaagctgaaattgaggaatttgatggaaatacatctgaaagtaacaaacttaaaaacaggtttattaaaatcgtttcagctgaaaaatacagaagcatgtatattaaaaatttgattgaaatttattcagaaacagctcctataaaatcattacagctagccaaagaagaaataaagaactgtagtacaccagattcttatgccttactagcactttcattattaaaaaatatggataaagaaaaagcacttctattaatagaagaaaaagtggaaggaaaaacaaacaacccacgttctttgtattatcaagcaatagtttttaaagcaactcataaaacccaaaaagttaatgacttaaaagcactattaaataattcaacttttgaattgggtaatgtgttgaataactctataaaaaatctctaaataacaattcttaactgtttaataaaatttgtatatttagcccagctatttagcataattaaataaactattttgcacaacctcttcataaatagcatttataaatcaattaataattttactatgaaaaaactaattttttgtttggcttttgtgctaatcagtacctttgtatttcaactaaaggctcaagatttcaattctaacattgcttatcaacttgagcaacaattagaacaaaatcaattaaaaacaagtgatgttcagtatcgagttacttcagatcatctaagtagcacgagtaatgttcaccatacctactttacacaaaccattaatgggatagaggtgtatggtaccgaatcaagtattcatatttcatcaaatggaaaaactgtttcttcaagtattaagtttgaaaaaaatagtattgaaaaatctgctggaatttctagcccttcaatttctgcatctcaagcagtatcttctgcagcaaatcaattaaattatttggtttcagaaaatatttcagtgattgaaaatgctaaaggaacaaatagaaaaatactcctaagtggcggaggaatttcattgagccctattcctgcaagattagtctatcatattactgatgaaaatcaattggttttagcttgggatatttcaattcaagaaaaaagccagcaagattggtggagtattcgggtagatgcaaattctggtcaaatattgggtaaaaataattggatggtaagctgttcttttgaacacgatcatagcatgcacgaagtattagactataataaaaacttatatgatattcctaattataatgaaatagttaatgaagaaggaggatgtaatacttgttatgaagtagttgaaatgccaattgaaagcccatattttggagcaagatctgttgctacaggaattgaagatctaacggcttctccttttggatggcatgatacaaacggtgctgctggagctgagtttaccgttaccagaggaaataacgtaaacgcttatgaagatggaaacaactccggatatcaaccagatggtggagtaaatctagactttacagggtatccatttagtcaaatctacaccaatgcaaatcaatatgaagatgcagcaattactaatttattctattggaataatattatacatgatgtaatgtacacgtatggttttgatgaagccagcggaaattttcaagaaaacaattatggcaatggaggagcaggaagtgattatgtaaatgctgaagctcaagatggatcaggaacttgtaatgcaaatttcggaacccctagtgacggaggaaatccaacaatgcaaatgtatgtttgtggagataaagatggagatttcgacaatttagtaatcgtacatgaatatggtcacggtatttctaacagattaactggaggtccaaataactcaggttgtttaaataatgctgaacaaatgggagaaggatggagtgacttttttggtgttcttatgaccattgaaccaggagatactggaacagatgcacgtgcagtagggacctatttgtttggtcaaggacctggaggagcaggaatacgatcctttccatatactaccgatatggcagttaatcctcaaacttataatagtataaccacaacaggagggcaacctcacgcagtaggtgaagtttggggaggaatactatgggagattacttgggcattagttgatgagcatggttttgatgcagatatttataatttcacaggaaatgcgaataccgatggaggaaatgttgctgcattggctttggttattgaaggattaaaattacaaccttgtaacccgggttttgtagatggtagggatgctattttagcagcagatcaagcaatttatggaggagttaacgaatgtattctttgggatgcttttgcaaaaagaggtcttggagtaagtgcagttcaaggatcatctagcagtgttacagataatacagaagcttttgatactccttctggtcttgcagcttttactgctccagcagacgtatgtgaaaatgaaatagaattaacaaaccttggaggaggatctccttctggaggtatttatagtggaacaggagttactgatgatggtaatggtgctacgtattcttttgaccctgcagctgcaggagttggaattcatactattagttatgaagttcaagcgggtacttgctctgtagcttcaacagcaacagatactattgaagtattagcaattccacctggaccaaccacaacgggtgctgctgatttttgtgttggtgatgaagtgacagtaacggctactttagccgatcctcttaatgtaataagatggtatgatgcacaaataggcggtaatttcctttttgaaggagaatcatatacttttacacctcctggatcaataaatgtctatgcacaagaagttcctcctggaccaatttcacaattagttatttcagaaattactttggaaactccagatcgttttgaaatacagaatgtaggagaagcttttgattattctggctatagtgttgcagtaagtaaagacccttatccagatgttaatgcaattaatgatattgtacaaacccttgggaatatgggtacaaattcggtggtagattttaatgatgatggtggtgctggatattggggaaataatatatggtggaataatgatggtacaggatggatcattattatagatgataacggaaatgtggtagattcagttttttggaattttacagctgctcaaattgcaggactaaatgtaaatattaatgggtttactattactgctgcagatttagattggacaggtgatggtgctgcattaacagtaaattgtaacgattcttttagaagaacgggagatactaattctgcttcagattggtctggtatttgtgaaacttcagattatggagtagctaatagtgatattaatcttggagtattaggttgccttggtgacagaacgatagctgaagtaatggcagatcaaattaatccaacaatttcttgcgaactagatattcaagtaagtactgatgttgataactgctttgcttcaaatgttagtttaactgcacctacagcaacagataattgctctgtacaatcaataacaaacgatgcacctgctaattttccattaggagatacagatgtaatatggacagtaacagattctgctggaaacacgaatacttgtactcaaattgttacagttgttgatgatgttgaccctgtagtaacttgtccagctaatagtgttgagacaattaatgaaggagatttatatactattccagatgttacagcaaccgcttcagcaaccgataattgtactgcatcacctttaattactcaagacccaattgcaggaacaggaattggtgtaggagatactgttgttactattactgcaacagatgatgctggtaatgtatcaacttgtacttttacaattacggtagaatatattttaggaacaggtgatacggattataataatgaaattgttttattccctaatcctacaaatggcaatgttacattgttaaacaattctaatgtattaattaatacagtaactatatttgatattaatggaagagtaattaacgagatttcaattaatgggactaatttagaaactaatttctctattgaaaatcaagcaacaggtttgtacttcgtaaaaatagtatcaaacgattttagtataatcaaaaagattgtcaaaaaataaaagatgttaattcaataaacaaaaaaatctctgaacttaattgttcagagattttttttatactaataatctagtcagattaaatttgaaacaaacttagattntttaaataaaaggcttatttttttggttctaccttgatttgtgttagttacgttttaaaaataaaatggtttcagtgtttnatnntttatanatagnttaacgattaaccgattaaacaaataaacaaaaggatagtataacaactcattaaaaatatgcaaactaanatctcttgctttttgatattgaattaaatacacctatataaaatgtttgtcagttagttaaaaaccatcctgatagttaaatgggtcttttatcttttatatttcagcagagcagtcttgaacttattaatgtccataaatcttattataaagaacaatatatttttgctttataattttacgttttaatttcatagtaggngtaaggtgtcctgcttctatgctccaagtatctggtgttagttcaaaacgttttattttttcccaattaccaaaatgctggttatggatatctacttctttctgaactcgttttatcaaacgntcgttgcttaccatttcttcaggtgtactaccaaggtcaaccttttttctatgtgcccattcttttacaaattcgaaattaagttggataaaagcagcaggcattttttcgccatcaccaaccaccataatctgttcgataaagaaagattctttcatagcattttctaataactgtggagctacatatttaccaccactggttttaaacatttcttttttacgatcggtaatttttaaaaacccatcgctatctatttctccaatatctcctgtatgaaaatacccatctactaatgctgcactggtaagttcgggttctttataataaccaatcattacttgtggtccttttataagaatctctccatctttagcaattttaatttcagtatcacgaattacttttcctacggttccaattctaaaatgataatctcgcatatcatttacagttactacaggcgatgtttctgttaaaccataaccttccatcacaggaattcctgcagcgttaaaaactcttgctagtctaggttgtaaggcagcagacccagaagcaactgcttgtagatttccgcccaaagcttcttgccatttactaaatataagtttacgtgcaagacctaattgtttctcataccaccaaccattttgaccgtaaggctcgtatcgtaaacctaaatctattgcccagaaaaacaacttcttcttaactccggttaaatcattccctttcgcatatattttatcatatattttctctaataaacgtggaaccaccgtcattacttgtggttttacttcttgtaaattagcacttatcgcctcaatagactcagcaaagtaaatacttacgcccgtatattggtacatgtataagagcatccgttcaaaaacatgacagacaggtaaaaaactcaatgctttagaatttcctaattgcataggtaatctataagtactacttatggcattactcacaatgtttttatgtgaaagcattacccctttaggtcttcctgtagttcctgaggtgtaaataatggtagctaaatctgtttcaacaacagccgctttccgtttttcaacctcatcttgattactttcgtctgcacctagttttaaaacttcagaccaatgatcgcaatcttcacgttcgtcaaaacaatatactccttttaaagtagggacttgatgttttattttattaattttttccaaaacaaattcacacgaaacaaaacaatacacactttcactatggttaagaatgtatagataatcttcttcagaaatggttgggtaaataggtacatcttgcgcacctgtttgtaaaatgccaatatcacaaatattccattcggtacgattggtcaacgatataatcgctactttatcgttaggctgaactccaagacgtagtaaccctctacttatcgcatttgctttggctatatattctttagttggagtagcttcccactttccatcaacttttgaaaccaatgattctttaaggtcaaaattttctaattgataatagggaaagtcgaagaggcgttttacatcagtcataaaggcgtgtttttgtatagactgcaaaataggaaaaaagtttggctttttgaaataaaatagacctcataacataattcaaaaatccaatgtctttgcaaggagcatacgatgatgaaacctcataatgcacctaaattataatccccacccaaatcaaaggtcattgagtaggcgatagccgtatcgaattgcagtacctcatgatgctacccaaattataaataaaaacacccccatgtctttgcgagctttttcagcgaagcaatctcataatcttatccaaatcaaaataatagtaacaaaacaactaacttatttgtttgtttttttttatctttacgctactccctattattaagccagaataaagaattatacaaattcattaagaagcatgcgtaattctaaattacgattcaaaaagcataaaaaatgccccgaattggaagtcgaggcggcttaaatgttttcacaacggaataatccttattgtgaattgctttcaaaattgtagtgtaaagatatataaaataaataacatagttaatatgaaaaaaatactaggattagatttaggaacaaatagtattggttggtccttaatagaaacagactttgataaaaaagaaggaagaataaaaggtttaggaagcaggattattccaatggatcaaggtcaaatgtctgattttggaaaaggaaactctatatctcaaacagcaggtagaactaaatatagaggtgttcgaagattaattcaacgaaatttattacgtagagaacgtttgcatagagttttaaatattttaggttttctcccaaaacattatacagattctatagattttgagaaatactttggacagtttaaaggtaatgaggaagtaaaactcaattatagaaaaaatgaacaaggaaaacatgaatttattttcatggattcttttaatgaaatggtaaaggagtttgaagcaaaaggtcaaccaattaaaataccttacgattggacactttactatttgcgtaaaaaggcacttactcaaaaaataagcaaagaagaattagcttggctcattcttaattttaatcagaaaagaggttattaccaactgagaggagaggaagaagaagttgttgagggaaaaacaaaagagtttattgttttaaaagttgaaaaggttgtagatacaggagaagtaataaaaaagacaggagataaactgtttaatgttatttttgataatggatgggagtatgataagtcagtagttaaaactgaaaactggatcgataaatcaaaagagtttattgttacaagtactattaaaaaagatagtgaggtaaaaagaacatataaagctgttgattctgaacaggattggatagcgattaaaacaaaaacagagcaagatattgaaaattcaaacaaaactgtcgggcagtatatttacgaaacactattaaaaaatcctacccaaaaaataaaaggtaaattagtaaaaactattgaacgtaaattttacaaaaatgaatttgagcaaatacttgaaacacaaataaaacatcataaagaattacaagatagaaaactctaccaaacttgtattgatgaattgtaccctagaaatgaagcacaccaaatcaatataaaagataaaggatttgattacttatttaaagatgatattattttttatcaaagacctttaaaaagtaaaaaatctactatttctggttgccaatatgaaagccgaaaatataaaattgaagtagttgacaaagttacaaatgaaaaaagaatggaatgggttacagaacctcttaaagcgattccaaaatctcaccctttgtttcaagagtttcgtttatggcaatttttaaagaatttaaaaatttaccaaaaagaagatgaaaaaggaaatttaattgataatgatattacagatgcaatgttatcaacagaagaagcttgggttgaattatttgagtttttaaatgaaaggtcaaaaataaaacaaaaccagattattgatttttttataaagaaaaaaaggattgaaaaaaagaataaagacaagtaccgttggaattacgtagaggataaagaatatccctgtaatgaaacaagagcgcaatttattaatcaattaaaaaaagtgaaagatttaaatattgacatttttttaactgttgagttggagtacaaattatggcatattatttattcagttaccgataaaaacgaatttgaaagggctattgaaaactttgctgaaagaaataatatagaccaggtatcttttgaaaaaagcttcaagaaatttcctccatataaatctgattttggtgcttactccgaaaaagcaataaagaaattattgcctttaatgcgtagaagtaagtgttgggataaatctaaaatcacagatgaggtaaagagtagaattgtaaatataatggaacgagttattgcattaaatctatcttcaaatgcatctaaaaaacaaataaatgaagcactagagaaatttaaagtagctgatgatgacattcctactcaattaatcaaaagctttattccttttaaaaatacaaatccattaactgcactaaatacatatcaagcctgttatgcaatatacaatagacattcagaggcaggaaatatacagttttggaaaacaccaagtgatattgataaatatttacttaaatttaaacaacatagtttacgcaatcctattgtagaaaaggtggttaccgaaacactgcgtactgtacgagatatttggaaacattatggaaatggagaggaaaatttctttaaagaaattcatgtcgaattaggaagagaaatgaaaaattcagcagacaaacgtaaaaaaatgactgctcagatttctgaaaatgaaaataccaaccagcgaataaaagcaattttacaagaacttaaagatggtggtatcactaatgtaaaaccatattctccaagccaacaagaaatattaaaaatatatgaagaaggtgtttatcaaagtgttgaagtagctgatgatatagagaaaattagaaaaaacaacacgcctaccaaagcagaaataaataaatataaattatggttagaacaaggatatgtttcaccctatacagggcaaacaatacctttgagtatgttatttactacagcataccaaattgaacatatcataccacaatcacgttattttgataattcaatgagtaacaaggtaatttgtgaaagtgaaataaatccaaacccatataaagacaaccaaacaggatatgagtttataaaaaaacaagggggacaaattattcctgaattatctacatccaatagaactgttaaactattcactttagagcaatacgaaaaccattgtaataaatactttaaaaagaacagaacaaagcttaaaaacctattaagtgaagatattccagaaggatttataaacagacaattaaatgatagcagatacataagtaccttgataaagggattgttaagtaatttggtaagagaagaaaatgaaaaagaagcaacctctaaacatattgttcctgttacagggtctataacctctaagcttaaacaagactgggggttaaatgataaatggaatgagttgattacgccaaggtttgaaagattaaacaaactaacaaactctaatgattttggatattgggattatcaaaaagatgaaaatggaaacaatgttggaaagcaattttttagaacacaagttcctaatgaaattactaaaggatttaataaaaaaagaatcgaccatagacatcacgccttagacgctttggtaattgcttgttgtacaaaaaaacacaccaattatttaggagcattaaatgcagaaaagaaaaattatggattgcgtgatgctttattaattaaaagcaaagaagatcattataccaaacattttttaatgccttggaatggtttcacaacagaagcaaaaaaccagttagaaaaaacaattattagtttcaaacaaaatacgcgagttattaataaaactaataataaaaccttacaatgggttgataaagaaggaaagtggaataaacaattagtaccccaaaccaaaggggataattgggctatacgtaagcctatgcataaagaaacggtttcgggtaaagtgattttaaaaagagaaaaaggagaaatatcttttaataaggctctagaaaactggaaaatgattgttgataaatcaataaaaaacaaagtgaaaggagcttttaatttatttgataatgatttaaagaaagtaaaaactcactttaaaaataaccctataaaaataggtgataatgaagtaaagaaaatattggttaacgaaaactttgaagctacagcaactcgcacagcgttaacagacaagttcactcgcaaacatttagagagtattacagatacagggatacaaaaaatattagaaaatcatatcaaaaactatatcgatgaaaaaggcaaagagcagtttgatttggcatttggtccagagggagtagaggaattaaataaaaacatagcttcattaaataatggtaaaaaacatcaacccatttataaagttagactatatgaggtaggtagcaaatttaaagtaggattaaaaggaaatagaaaagataaatatgtagaagctgcaaaaggcaccaatttattttttgctatttataaagatgagaatggtaatagaaaatacgaaactatcccattaaacgaagtaatcgaacaccaaaaacaagtgtcacatttacctaaaaatgaacgaacagaaatacctattaaaaatgaattaaaaggtgttgctgttcaatttctattctctctttcgccaaataatttggtgtatgtgcctacagaagatgaagtggaaaacccaaatatggttgattttaaaaattttagtaaagaacaaattgagagagtttataattttattgatggttcaggtacaacggctaactttatacctaattcaactgcaaacttgatttttaatatgaataatactgaacaaaagaagaaaaaaattagcttttcaatacaaaatgaatatggtgtagggagtcctcaatcaaaaagtcaaaaatctattgatggtattatgataaagaatagatgttggaagctaaaagtagatagattaggtaatattataaaagttattagataaattacaaaatgattaaaagaaccctattttttagcaaccccgcgtatctaagcacaaaaaacaagcaattagtaattaattatcctgaagaagataaagtaacaaagactgtgcctatagaggatattggagtattagtattagaaaaccaacaaattaccattaccaatggcttactttcaaaacttataaaaaacaaagcagcaatcattaattgtgatgcttatcatttgcccgtcagcttgttacagccattggtagggcatagtgagcaaaccgaaagaatgaggcaacagttaaatgcgagtatccctctaactaaaaacttatggcaacaaaccataagtgcaaaaattaaaaatcaagcaaaatttttagaaaaaagagaagtgcctgcacataaaatgcacaaatggtctaacgaagttaaaagtggcgatatagaaaatcatgaaagtagagcagcagtatattattggaaacatatatttaatttagagcgttttaatcggaatcctaaaggagatgctccaaatcaattattaaattacggctatgcaattttacgtggcattacagcaagagcaattgtaagttctggaatgtttccgagtgtgggaatatttcatagaaacaaatacaatgctttttgtttagcagacgatattatggaaccctatcgcgtgtatgtagatatattggttaatgatataatacaatctggtgaaccttatgatgaaatgactacttcattaaaaatgaatttattacaactaccagccatggatgtgataatagatggaaataacagcccattaatggtagcaatgagtagaaccacaaactctttatacgaatgttttgcaggagtaagtaggaaagttttatatccagtattttaatttttagacctactaggttcctaaaacctttaggtctggtataaaataaaaagaaatgaaagaaaatcatttttcacgtttaaaccaatatagatctatgtgggtattagtatttttcgatttaccaaccgaaactaaaaaagacagaagggctgcaacacgttttcgaaaaaacttgctggacgatggatttaccatgtttcagttttctatttatatgcgtttttgtgccagtagagaaaatgccgaagtacatgaaaaacgtgtaaaatacggactaccagaatatggaaaagtcggaatattgcaaattaccgataagcagtttggaatgatacaattatttcacggacaaaaagcaacagcattagaaaaacctacgcaacaattagaattgttttaggaataaaaaatgtccggtcgagcgcagtcgagacctcaatacaacatcaatttactaattctatccaataacttaacaagcagtatatcaaatctttaaggcttgatacactgcgaatgctaagtaaaaatacaattttgaaagcaattcacaacatttaaaggtttatttaatttgtgagttatactgcgaatgctaagtaaaaatacaattttgaaagcaattcacaacaagtaatattatttactagctcgtgttcagactgcgaatgctaagtaaaaatacaattttgaaagcaattcacaacaaaaaccaaattttactttttgaagatattactgcgaatgctaagtaaaaatacaattttgaaagcaattcacaactgtatagtaacaggagcagtgtcgggcatactgcgaatgctaagtaaaaatacaattttgaaagcaattcacaacactagccttaactttacaccgttggattttactgcgaatgctaagtaaaaatacaattttgaaagcaattcacaacaagcaggaaagtatctattattaatcttacactgcgaatgctaagtaaaaatacaattttgaaagcaattcacaactaagcttcctgcattttttggagagcattgactgcgaatgctaagtaaaaatacaattttgaaagcaattcacaacgatactttcctactttgataattttcaaaaactgcgaatgctaagtaaaaatacaattttgaaagcaattcacaacgcatctaatggtctgtaataaagtggtaaaactgcgaatgctaagtaaaaatacaattttgaaagcaattcacaacgtgggtttttgttggcggttaactgttataactgcgaatgctaagtaaaaatacaattttgaaagcaattcacaacgatttgtatggtatgcacttaatcgggtttactgcgaatgctaagtaaaaatacaattttgaaagcaattcacaactattataagaacgagcaaaaagacaggtaaactgcgaatgctaagtaaaaatacaattttgaaagcaattcacaacctagtattgctacaaaattttctaaaagcactgcgaatgctaagtaaaaatacaattttgaaagcaattcacaacaacattgcattaaatgctaatcctattggactgcgaatgctaagtaaaaatacaattttgaaagcaattcacaacatcatagacaaagaccctttatctttccatactgcgaatgctaagtaaaaatacaattttgaaagcaattcacaacagcctttaagcgatctacgaagtattgtagactgcgaatgctaagtaaaaatacaattttgaaagcaattcacaactgtaacgtatttcattaaaagttaaattgaactgcgaatgctaagtaaaaatacaattttgaaagcaattcacaaccacagctaacattaacattcctattgttttactgcgaatgctaagtaaaaatacaattttgaaagcaattcacaacggcagcagcatttactttcaaatgttagtaactgcgaatgctaagtaaaaatacaattttgaaagcaattcacaacaactacttccagatccacaacaagggtctaactgcgaatgctaagtaaaaatacaattttgaaagcaattcacaacgaagacacctactcaccgctccgcttctttactgcgaatgctaagtaaaaatacaattttgaaatctcattgtacaaagcatcaatgataactcaattatgataacgagattcagcgattcataaaaacagtaacgagagctaaagcaatttacaacaatacctttgttttgattatagaacaaaaaactgcgaatgctaagtaataataatatgtttaacaatcctcaaccataaaccaattatatttttcacctctttgtcatgccggactagttccggcacctcatgatactaccaaaatcatctttacaaccaccacaatcaaaggtcattgagtaggcgatagccgtatctaaatgccgtactcattacgacgcatcatatcacaacctaaatcaaattccccctttgaggggggctaggggggtgtttttcaaacccactaataccgccaactgaagactgcctactgaaaaaacccgtacctttaataccaaaacaaccacaatgccaaaaatacaagacacaccaccaccagtagttatagaaaacctaaaactattagcaacagacttagaccaaaaaattccctccaaatgcctagataaaaacctgctcatagcaagttggaacatcagagccttcggcaacctaacccgtaaatgggactcagacgatgacgacagcccaaaacgtgatcttcactcagtgctatgtatagccgaaatcatcaaacggttcgatgtcatcgccatacaagaagtaaaagcaaacatcagagcattaagagacaccctaaaagtattaggggccaattggtcattaatactcacagacgtaacaaaaggctcggcaggtaatggcgagcgtatggcatatctgttcgatacccgtagagtacaactttctggtttagcaggggagttggtagttccaaaagaatggacaaacaaaataggagaagtaattttagacgagcaatttgcccgaactccgtatgcggtaagttttaaagccaataatcagacgtttatattagtaaccctacacatcaaatacggtaaaaaatcaaaagaccgtataaaagaactaaaaggaattgccaaatggttagcagattgggcaagtaatataaatgtctatcaccaaaacctaattgccttaggcgattttaatatagacgctaggggagaccttttagaccaaacctttctatccgaaggtttatttgttccaccacaactacaaaacaaagaagtaactcgttccatatttaaaaaaacaaaatattacgatcaaatagcttggttcaacaacagtaaaaaaatccccaacctctccatgcaatttatcaatggcggcaattacgattttgtacccacagcattaaaaaacagagagatttcaacaagaagcctatcatacctaatctcagaccattaccccctctgggcagaattcaaactataatcacagcccaacctgtcacgccgtactcgttacggcgccacatgtcgctacctaaatcaacccactgcctactgaatacggaatattatttcctccatagctactccatagctactccatatcaactccatattaaagccgtgtcaatgcgtgtccgtgcaaaaccccttttcaaaacaggagaatgccccttttttatcaaattgtaagaaaaaacttgcaaaacaaaaaatcccgttttatatttggatataccaatcccacaaaaaggtatatttaatacagttcagtgttccccgaaaagtaaaaactacgatgcccacaaatcgtcatgatacacttaagtgttttttgtcgacagtcacttaagtctttttaattaaccagatacgaatgtggtattacttcttgtaattcccccctacataagtgtcataaatcaattaagttatggctaaaaataatagttatcttaaattcgaaggaagccttggtggcttaacctactacgaaaaagacggaaagtctttagtaaaagtacaaagtagaatcagtaaatctcgtattgagcgagatcctgcctttaaacgtactcgtgaaaacatgatggagtttggcgctgctgcaaaagcaggcaaagctcttcgtgaagctatgagtacaatcgttaaaacaatgggcgatacctacctaacttcaagagtaacaggtgtcatgcgtcgtatggtaagtaatggtacaggtttacgtgggcaacgtaatatagatgtactagcaaatgcagatcttttagaaggttttgagctaaacaaatcagacgtattaagctcacagttttttgctccctatgtaaaacccagtttaaatgcaaatcgagatattataacctgggtaattccagattttaatacagattcgttcatcacaaaacctgaaggagcaactcatttcaaaatggtgcttgccgctggtttagtaagcgaatatgcatatgtagctgcattaagaggttacgaaccagtcaatgaagacgaaaatgntattggaaaagcagtttttagtaccgatatccctttgattgggatggtaggtaacgatacaaccctagtagtcgatttaggaataggagctgcggttgtagctactactgcaacaattgctgcaantgggattgttttttaccaagaaatcaatggtcagttttacgaattggcttctggtaatgctatgaaaattgctactgtggggtagtaataatatagtattttttaaataactctcttgttcatttacaagagagttatttttttatgtctttacaaggagcatacgactaagcaatctctataaataatccaaatcaagactgccaactgaagactgccaattgaagactgaaaaacctactccttcacaatcttaaaagttctagaagtattttctgaaacaattctcataaaataaataccagtagtatatgcactaaaatcgatagtttgtgctgttgaaacattcttaatttcagtaataagttgcccttgtatagtataaatttcaacagaataattagtggaactggtattgatatttagtaaatttttaacaggatttggatatacagtaaataccgtttcagagaaatcggaagttcccagagtttcgtccaatacattaatctttaaatcatcaaagtaaaatccatcagctctttgaaatccatccgattcaaattgaaaacgaaccaaaatctgttcgcctaaataatcacttaaatctatttcttccaatacccaatcgttttggtttccatcatataatggctctcctgttggctggccgttattactacttccttcattagtatattcaccacattgcggaatccaagtagatccgttattggtagaaacttctaattgtacataatcccagttgttttcgatatcccatttggcataaaatgaaatattcgcacccaatgcagtagttaaatctacttcatttaaaagagtaattgttttatattcattattttgataatcaccatttggagaatctgtgattgagcttgaaggcgaaacaaaagtatttgtagtggtatcccaaccattattattaaaattatcggttacgctatttccagtatcttcaaaaataggagagatgcttccaaatatttttgtgatgttttttatttgattgtaacttccgttgtttacaactaactccaagttaatttcgtcgccaattgctattcctgcgtttagagtataagagatggttccatttacttcttccaaaggacttaggtttgtaaagcttacaggattaccaacagaactaacatttgctgaaatcgggttgatacttactgtaaagttcccgtttcctgaaatacccaaacgtcttaaattaaaggtaatatctgaagtacttggttgaacaaaggtcggggaagtatcgtttaccgttgcatagttattcaccattttagctgcagtaatatttaagtacatcatgctcttacaaatactttcaatttgattcgaagctggccagaaagaaggaccaatttctggagtaaaagcatatattttattatgagttccaacggttccgtacataaaatcatcactatctccagcagcaggatataagtctgcagaaataatattgttaaacccattcttggaaactagttctgcagaaataccttcaaataaagcgttctctggagtaggtacattgtctgtataaccataagggtataataacaaatctcccgaagtatggttgttaaatgccatgacgaaattatgattttcaacaaaccacttcattgcttggttttcaatttctgagaaaggtccggtaccagcatatacttcactattagtgtcgtttgaagttccttcgcctccccaaacattattgtttggatctccgtttatatagtaatcgtaatttctatttgggtcaaccccataaccgtttttacggttttttctccaaaaaccaccaccattagggtctgttttttcattatataaataaccatctggatttacaacaggaacaaaataaagctcggtattatcaacaatgcttttaacttctggattgctatcatagttttccaataaataccacatatagaaaattagttgtgataaggatgctggttcacgagcatgatgaatggctgaatataatatttgtggttcgccttcatttgtgttaggattgtcacttatttttacccatttaattccgttgcctccaatagaaggagtggtggaattatcgggttgtccttcagttaaaaagctgctaatgtttaccttggttgtaattaaattagggtataaagccttcatttggtccaactcattgagcatttcttggtaggttaaataaccacccatacttcccaaactgaaattatttggagtttggtagtcatcaactgcttcattacaagttgggttttttgttggtgctttattagcattattttgttgaataaaatgtgctttggcatcttcaataagaacatctacctgatatccagcatttttagctttttcaatttcagaaaccgaaaattctgaaatcacaaaatagccttttttatgggttccatgatctactggaattcctaaagattctagattttttaaatcgtttgcttctgaataattaatttttgctcgttggtatttttcaggattattttgtgcaaaagaaaattgtattacaaaaagtaacacgaggagtactaattttttcatagcttttaatatattttataccgttaacgtagtagtcgttaatttagtgtaaaattactatgaaatattgaagtagtataattaaaccaattcattttatttgaaaatgtattgaattatactttttaacaaaaaaagactaccaaaattgacagtcttttcgttatttaaaatatttaatttactatttattctccaaccatatgcgagcattcacaaaggcttctaaccatggtgaaacctcatcgtttctatcgtttggataatgcgcccaattccaaggaaaagtagaacgctccaaatgcggcatcattaccaaatgtcttccggtagtatcggtaagcattgcggtgttaaaatcacttccgttggggttggcagggaaaccttcatacccatatttaccaacaatattataatgactttcgcctttcggaaaactgaatttcccttcaccatgagcagcccaaatccctaaagtactgcctttaagagaggataacatcaccgaattattctcttgaatttccaccgaagtaaacgtacattcaaacttaccactatcattatgaagcatttttggtttctctttatcttcagggtttatcaatcctaattctataaataactgacaaccattacaaactcctaatgaaagggtatcctcttttgcaaagaaacctttcagcgctttatttgctttttcattatataaaaatgcgcctgcccaaccttttgctgaaccaagaacgtctgagttagaaaaacctccaaccgcagcaataaacttaatgtcttctaatgtttcacgaccttcaattaaatcggtcatatgaacgtctttcacatcaaaaccagctaaatacatcgcatttgccatttcacgttcggagttagatcctttttcacgaataatggctgcttttggtcttgtgtgttggtcgctgagcggagccaatgcgcctgtaaattgtagaggaaacttaaacttcaatccctgattcttataattctcaaaacgctctgttgctttcgctacaccactttgttgttggtctaataaatacgaagttttataccaggcatcacgcatttcaggaacacgaaaacttaagttttcttggttatgttttatctgaaggttttccgtttcaattacaatacctattttcacaaagttgatattgctttctgaaagtattttttcaacaatgctatcttctgaagcttgaaatacaattccgttgttttctgcaaaaagaatctttactaaatcgttttcccctaaatcagtaagatttaattcagctcctaaattggtgtcagcaaaacacatttctaaaagtgtcgttatcaacccacctgaagcaacatcgtgcccagctactatttgattgcttgaaattaattgttgcattgtattaaaaacagtcgcaacataagaagcgtctttgatggttggaacttcattaccaatagcacttaaggtctgtgcaaaagaagatcctcccaatttataatcatctttggagatattgatataataaatgcttcctttatttttctgaagtacaggctctactacctttttaatatcgttacaatgtccagctgcggtaatgatcactgtacctggagctattacttcttcatctttatatttctgtttcattgaaagggaatcctttccggtaggaacattaatccctaactcgatagcaaagtctgaaataccttcaactgccctatacaatcgagca

SEQ ID NO: 1049 - DNA, 24683 bp, synthetic construct
  misc_feature 1..24683: note = Synthetic
  source 1..24683: mol_type = other DNA
ttagccgttaaaatttgttgaaggactaataaaacattagcatttatttctgcattgtcgtaatactttttgtttttattgttctcacttaaaaaaggaatgtaactagcctctttagaaaaaaaagtatggaatttttcgattgatatcaatacagataccaaagaggtttttggtaaaatttctaaattgataggtaaatcttgttgtggattgtataggaatattgaatgcttgtctaaaacattaaaagtataactgttgttgttaaaatgaaatttgcaattgcctttaacacagtaatgtagttgtatgtaagagttgtcaatatctcttttaaaaaactctgtttcgtctgagttattttggaattttagcacaaaaaaaccttgttcaatgggaacttctctaaatgtactttctgcgatgttttttgacatggattcagtggtttgtataaatcttgctatttagaatgattctaaaataaaatgtttctcctagtctgttttactgcaaaaatacacttttgtgtaagtttttaaggtgtttttaagcgaaaaaacgaatagcgacattaaaagttcttttagcgatacttttttttgttcaatatttatatttttgaccgactttttgaagaagactcaatgacagtagaaaataaacatcatagtaatttatacaacataggcgttagttataaaaaagctgatgctgcgattagggggaaatttagtatttctaaagaaaatcaaatacaacttttagaagaagcaaaacaaaaaggaatagacggtatttttgtgttgtctacttgtaatagaactgaagtgtgtggttttgcagaacacccttttcagttaataagtatgttgtgtaaatactcaaacggttcggtagaagaatttgcaaacgtatcaaacgtatataaaaataaggaagctattagccatttgtttagaatgggaacagggttggatagccagattttaggagattacgaaatagtagggcagttacgtcaagcatttaagcaagctaaagaagtaggaactacaaatgcatatttcgagcgcttactaaaccatgtaatgcaagcaagtaagcgagttaagaatgaaactaagttaagttctggaaccacttcagtatcgtacgctgctgttcagtacttaattaataacttaccagattacaactcgaaaaatgttttagtatttggtttaggtaaaatgggaaaacacacctgtaaaaatctagcggagtacacacaaaataaatcggtaagcttaattaacagaacggaagaaaaaacagaggaatttgtaaaagaccataattcgataagaaaagcgtcgtatgcaaatttagctgaggaggttcaaaacagtgatgtgttaattgtttctacaggagctagttttcctactataacgaaagaacatgttccgactgataaagacttgttgattttagatttatcaatgccagcaaatgtgtcaaaagaagttgcagacttagagagcgtcatgatggtaaatgttgatgacctttcaaaaataacagacgaaaccttagcgatacgtcagcaagaggtacctcttgccgaagcaattattgagactcataatcatgagtttcaagaatggttaaaccacagaagatttacaccagcaattaccgctttaaaagaatcattacaaagcattcaacaaggagaaatagcttttcacaagaaaaagattaaaaattttgatgaagaacaagcagaaatattaacatcaagatttatacagaaaataactacacaatttgtaaaacatttaaaagacgaagaaacttcagtaaatacaagtattgaagtaatggctaaagtgttcggagcaaatttacaatccacccatgcagaagataattagaataggtacacgcgatagccaattggctatgtggcaagcaaaaaaagttcaaaaacttttagaagaattaggtcatcaaactcaattaatccccgttaaagcaacgggtgatttagttttagataaacctctttacgaattaggaatcacagggatttttactaaaaatttagatatagccatgttaaatggtgatattgatattgcggtacattctatgaaagatgttcctacggtattgccagaagacattattcaagcggcagttttaaagcgtgctaactacaacgacattttgttgttaaaagataacgaagagtttatggcgcaacctaacggagtgattgctacaggtagtttacgaagaaaagcgcagtggttaaatcgttatccaactcatacagtagaaggtttacgaggtaacgtaaatacacgtttacaaaagttagaagataacgattggaacggagctattttcgcagcagctggtttagaacgtgtaggcttacgaccacaaggagcggtaaacctaacatggatgattcctgcaccagcacaaggagcaataatgattacagcgttagataaggacgaagaaatcaaagaaatttgtactgagataaacgataaagacacagaaacttgtacagggattgaacgtgagttcttaaaacgtttagaaggtggttgtacagcgccaattggggctttagcttttataaatgaaaaggaagaagaaattaatttcaaaggaattttgctaagtagagatggtaagaaaaagattgaagttagtaagaaagtaaaagttggtaaacataagtacgtagcaaaagattgtgctaattatgtaattgataaaggcggaaagctaattatgatggaagacgaaggaattgaaaaagagttttcaatctattcgactaaaaaattatcagaagcacagaaaaaattattaccaacacacatgagtgtgaatgatagcgattttataaaaatccgttttaatagaattgcacctaaagtaattaagcaagaaattgaaaatgtaattattactagtaaaaatggtgtagaagcaattctaaattcatttacttcggatgaattacaattcaaaaatatttattgtgttggtcgaagaacaaaaaagttaatcgatcaacgtataggaaaagtagcgcattcagaaagaaacgcgaaaagactatctgactacttatcaaaagaactaaaagggcaagaagtaacatatttctgtagtgacttacgtttagacacactcccaatacttttaaaggcaaatggagttgttgtaaatgaagtagaagcatataaaacaatgtatagtccatcaaaagttgatgaaaaagtaaatggagtattgttttacagcccgtcaacagttgaaagctacatggaaaaaaatacaggagataaaatagccttttgcattggtgatactaccgctaatgaagccaagaaacattttaaggaagtacaaatagcaaagatgccaacagtagaaagtgtactagagttggtaaaccttcactttgtaaaagaataaattatgtttagaacacgcagactaagaaaaactgaaaacatccgtcgattggtacgagaaaccaaattatcggtagatgattttatatatcctttatttattgaagaaggaacaggtattgaaacagaaatcccttcaatgccaggaattaaccgttattcattagatactatttctaaagaattagatgaggttgtagcgttaaaaataccagcagttttgttatttggaatcccatctaaaaaagatgatgaaggtaccgaaacttggaatgataacggaattatgcaacaagctatccgattcattaaaaaaaactatccaagtttatatgtaattaccgatgtatgcttttgtgagtacacatcacacggtcactgtggtgtaatacatgataacgatgtagataacgatgcgacgttagtgaacttagcaaaacaaacagtttcacatgcgaaagcaggagcagatatggtagcaccatcaggaatgatggacggtgccatagctatgatgcgtgaatcgttagacaacacaggttttgcaaacttaccaattatgggatattctgtaaaatatgcatcaggattttatgggccttttagagaagcagtagattcggcgccatcgtttggagatagaagaacctatcaaatggatccttctaatagagatgaagggttgcgtgaagctacttttgatgatgaagaaggagcagatattttaatggtaaaaccggccttatcgtatttagatatcattagagatttaaaaaataattttgatagaccaatcgcttgctataatgtaagtggagaatattcaatggtaaaagctgctgctgaaaaaggatggattgatggtgaaaaagtaatgatggaaagccttttatcaatgaaaagagcaggagcagatattatcattacctattttgccaaagaagctgctagagttttaatgagataaaatatgaaacaatcaatagtacacatagctttagtagtaagagattatgatgaagcaattgagttttatactaaaaaactaagttttactttgattgaagatacatatcagccagaagaaaataagaggtgggttgttgttgctccaccaaactcaaaaggaacttctatattattagctaaagcttctaaagaggaacaaaataacttcataggaaatcaaacaggaggaagagtttttctttttttaaatacagatgatttttggagggattataacgaaatgaaagctaaaggtattgagtttgttagagctgctaaagaagctgaatatggaactgtagcagtatttaaagatttatatgggaatttgtgggatttattacaatcaaaataaacaatatactcataaataaaataatttaatagataactaaagtaagttatggaattcaaaaaatcacaagagttatataataaaggactagtaaacttagtcggagcggtaaactctccagtacgtgcgtttgcatccgtaggaggaaatcctttatttataaaaaaagcgaaaggaagtaaaattacggatgtagataataattcgtatatcgatttagtattgtcttatggtccaatgattttagggcaccgccataaaaaagtagaaaaagccattagaaaggctttgaaaaaaggatattcttttggagcatcaacgaagggagagatcaaattagcaaaaattgtttgtgatgctttcctaggtatggacaaagttcgttttgtaaattctggtactgaggcggtattaagcggaatccgtttagcgagagcgtatacaggaaaagataaaattatcaagtttgctggctgctaccacggacatcaagatgcgttgttagttgctgcgggttcaggtttagctactttaagtttaccaggaagtaaaggtgtgcctgaaggagcagtaaaaaacacgttgattgccaactataacgatttagaaagtgtaaaagcacattttgaagcacatgatgatattgcaggagttattttagagcctgtagcaggaaacatgggagtagtaactccgcaagatggctttttaaaagaactaaaagaatatgtaaattctaaaggagctttgttgattattgatgaggtaatgacaggtttccgttctaaatttggaggagcacaagaattatttgatgtagaagccgatattacttgtttaggaaaagtaattggaggtggatttccagtaggtgcgtatggagcaagtaatgaaattatggaaacagtagctcctttaggaggaatgtatcaagcaggaactttgtcagggaatccaattgccatggcggcgggaatttcaactttaacagaattaaagaaacaaaatccatatgaaaagttcaacgagattgctcagatcattgaagtattcttgttagaatcagcaaaaaagcatggagtagaaattaccgtgaaccgatttggttcgatgattaatccattttttacagacgttactgtaaccaattttaaagaagcacaaacttctgatacgaagaaatatgctacttttttctgggaaatgactaaaaatggagtgtttttaccaccaagtcaatttgaagcatggtttttatcatcagctttaacggaaaatgatattcaaaagatcgctaacgccattgataagtcgatggaagcagtatcaaaaatgtagaataaataattgtcattaagaggaagaatgacgtatagatagacatgataaaaaacgatttatttttaagagcgttaaaaggagaaacagttgatcgtccgccagtatggatgatgcgtcaagcagggagatacttaccagaatttatggaaattcgtgaaaagtacgatttctttacacgttgtagaactccagaattagcctcagaaattacagtacaaccaattcgtaggtacggaatggacgctgctatattgttctcagatattttagtaattccacaagcaatgaatattgaggtggaaatgaaacctaatttcgggccctatttaccaaatccaataagagataaaaaagggttggatagcgtaattattcctgatgtaaatgaagaattaggctacgtaatggacgctattaaagcaaccaaagaaaagctgaatgatgaggtcccattaataggttttgcggggtcaccatggacaattttatgttacgttgtacaaggtcaaggatctaagaactttgataaagcaaaagaattttgtttcacgcaaccagttttggcacatgaattgcttcagaagataacagataccacaattgcttatttaaaagaaaaggtaaaagcaggtgtaaatgctgtacaagtttttgattcttggggaggaatgttgtctccaaccgattatcaagagttttcgtggcaatacatgaatcaaataatagaagcattaaaagatgatgctccagttattgcttttggtaaaggatgttggtttgccttacatgaaatggcacaatcgaatgcctcagctttaggagtagattggacgtgttctgctagaaatgcacgctatttaacaggaggaaatattaccttacaaggtaactttgatccttcaagattgttgtctccaccagcagaaataaaaaagatggtacaccaaatgataaatgagtttggtaaagacaaatatattgttaacttggggcacggaattttacctaatattccgctagagaatgcaaaggcatttatagatgcggttaaagagtataaagccgatagataaccccctttaaataattaaaaatgaagaaattatcttttgttttgatgtgttttttaacaactgttattttcgcacaaaataaaacgtattacaattttgcagtaaacaattgtgtagaagaaaacaccgaaggtttgattgataagtgcattaaaggctcttatttattaaattataactttactacaatggatagtaaaacggtaagtacagacaaaattaacaagccaattgtgttgatagctaacgcaacttggtcagctccttgttggggagatgtaccagctttaaacaaaatggttgaaaaatataatgaccaattagagtttgttatgattttctgggacaaggaagctaaagttaaaagaatggctgaaaaactagacaagagaattaagttagttcctgcgagagatatcgataaagttcaaaaaggatatttagatatcagtggttttgttcacaaattagattatccaacagcttatttaattagtaaagacaaacaatttgttaatattaaaagaggggctgcaacacctaccaaagaagtaagttgggataaagtcaatgaaatcaacacaaagaattttgaagattttttagcaccaattttaaaataaattgattcaacaatatttcatagacctctttctttattgaaagaggttttttattttcacaaaaaaaagatatgatacaaaatattataaaaggagttaaagcctattttgaggcttttggaatgatttcaaaattaagattatggaaatattttattattccgatgtttataagcctgttaacagcaacatttgttggttttatggcgtatacattctccgataatattgggcactacgtagctaatttttggaagtgggaatttggaaaacagacttttgaggtgatcagtacttttataagtgggctactaattgcagtaattggattagtgttatataaacatattgtaatggcgctatctgcaccttttatgagtccagtttcagaaaaaatagaagaccatctaagagggggagatcatacacacagaattacttcttttcaagagcagctaataagaggaatacgaataaaccttagaaatttaactagagagttattgtttacaattcctattttgttacttggatttattccagtaattggtattgtttcaaccgtattgttatttttaatgcaagcctattacgcaggtttcggaaatatggattatacgcttgaacgccattttaaatacagagaaagtatcagttttgtaaaagagaataaaggattagcaataggaaacggaattatatttatgctgtttttactaattcctataattggagtaatccttgtattacctttatctgtaactgcagcaactacagaaactattaagaaaatacagcttaaaaaattaccagaataagtacttttgcacttcaacagaaacaaacacatgaaagaacaattttacgcctacattcaagaattacaagataccataacatcaacattagaagctatagatggtaaagccaagtttcaagaagatttatgggaacgtgctgaaggtggaggaggtagaactcgtgtgattgaaaatgggaatatttttgaaaaaggcggcgtaaatatatctaaagtttttggtgagttaccagaagcattaagaaagcagtttggtgtagaaagtggagatttttttgcttgcggattaagtttagtaatacatccaaagaatccgtttgtaccaaccgtacatgctaactggcgatattttgaaatgtatgatggagaaggaaacatagttacacaatggtttggtggcggacaagatttaactccgtattatttatttgaagaagacgcagtacattttcatagtgtttgtaaagaagcttgtgataaacacgattcagaattttatccgaaatttaaagagacctgtgacaactatttttggaatactcatcgaaatgaagcacgcggtttaggaggtttgttctttgactatttaaaagaaacagaagagttctctatacaagatcgatatgattttgttaccgaagtaggaaacagctttttaaactcgtatatgccgattgtagagagaagaaaagagatagtttatactcaagagcataaagattggcaagaagtacgtcgtggtcgttatgtggagtttaatttagtacatgatagaggaacattgtttggtttaaaaaccaacggacgtattgaaagtattttaatgagtttaccgcctactgtacaatggaaatacaatcatcatccagaagaaggttctgaagaagctaaactattagaagttttagcaaaacctaaaaattgggtttaaaataaacaaaatatcatataattttataaaggcagaaaacttgggttttctgtttttttagttgctatattaacaataaaaagcctcccagttaaagtcgagaggcgaacttaaatgttttcacaacggaataatccttattgtgaattgatttcaaaattgtactgctaatatacacctttttaaattagtcgattacggattgtcgtatatcgaataacttttttttacttatttttaaatcattaagtaattcgtttcttaatgaagcaattgcgacttcttcctcttaaagataaaaatattgtatcataagttcactcttgtgttgtgaactagtataaaaaagcgaaataaaatgactaaaaaaattctaggtttagatttaggtaccaactcaattggttgggcgttggtagaaagcgattttgaaaaaaaagaaggaaaagttatagataatggcgtgcgaattattccgatggataaaggaactatgaataattttggtactgggcaatcaatttctcaaacagcagacagaacagcttacagaggtgtacgacgactttacgaaagagataatttaagaagagaccgtttgcatagagtactaaatattcttcagtttttaccagatcattatgcgaatacaattgattttaaaaaacaattaggtcaatttaaaaaagggcaagaggttaagttaaattacagacctaacccagaaggaaaagatgaatttatatttcaaaaatcatttttagaaatggttactgaatttaaaaaagagcaacctcaattgttttacacaaataaaagcggaagagaaacaaagattccttatgattggacgatctattacctgcgtaaaaaagccttaactcaaaagattgaaaaagaagaactagcttggttgcttttaaattttaatcaaaaaaggggatattatcaactacgtggtgaagaagaagaaaacagtggtaaaaatgaagagttttatgctttaaaagttgtagaaattgaagaaacccaagataaaaatgcaaaaggagtttggtataatgtgcagttagaaaatggatttgtttacaaaaggcaaagtaaagagtcattagatagctggattggtaaagtaaaagagtttatagttacgactcagttagaaaaggatgggaaacctaaactagataaagaaggaaatataaaacgtagttttagaatgcctaaagaagatgactggaaccttgtaaagaaaaaaacagaacaagatattaataattctaacaaaacagtaggggcttttatttacgatttcttacttaagaatccatctcaaaaggtaaatggaaaattaataaaaaccattgagcgtaaatactataaagaagaactggaaaaaatattaaaaactcaaataggattccatacagagttaaaagacacgaatctttacattcaatgtgttaaagaactatattctaaaaacgaagcgcatcaaaataatatatgcagcaaaaagaaagatgaaatgtttcgttacttatttatggacgatattattttttatcaacgtccattaaaaagtaaaaaatcgaatatagcttcttgtccttacgaaaacagggtatttattaaagaaggtgagaaaataacacaaggtttaaaagtcatatcaaaatcacacccttattttattgagtttagattgtggcaatttattcataatctaaaaatttataagataggagaagaaaaagatattgatgttacttctcagtttttagcaactgaaaaggatgttgctgatttatacgatttcttaaatgataaaaaagaaatagagcagaaaaatatcatcaaatattttattgatttaaaaaagattgataaaaaagagaaagatatatatagatggaattacgtggttgataaaaaatatccgatgaacccaacccgcaatagtatcttaactcgactcaagaaagtaagaaacatcaacgtttttaagtttttaacatcagaaatagagctacaattatggcatattatttattcggtaactgataaaaaagagtttgaaactgctttaggaaattttgccatgaaacaagaattagataaaaattcttttgttgaggcatttaaaaaacatccaccgtactcatcagattacggagcttattcaggaaaagcaataaaaaaaatacttcctttaatgcgtagaggtaaatattggaatgaaaagactatttcagaaaaagtaaaagattttgtttccgaaatttatgaacgtatcaaacatcttaagttcgaaaatatacaagaagaaaatttaaataaagctattgagttggttagtgatgatgctatatcaaaacaatttatcaaaagttttttaaaacattctatagataatccattaacagggttaaatacttaccaagcatgttacgctgtttaccaaaggcattcagaagcctcattaattacgcaatggaaaatacctaaagatattgatagttatttagaaaagtttaggcaacatagtttaaaaaatccaattgtagaacaagtagctttagaaacgttacgaactgttagagacatttggcgctacaatttgagtatagacaaagaatttaagtttagtgaaattcatgtagagttaggaagagatattaaaaactctaaagataagcgtaaacgcatttctcaaaaacaaaatcaaaacgaaaacacaaacaatagagttaaattattactagaagaaatgtacaaagatggtgctcgatcatattctcccagtcatcaagaaatattaaaaatatacgaagaaggggttacacaaaatccacaagcatcttataataaagtaaaggaagatgaaatagaaaaaattaaaaaaaatactaaccctagtgctacagacatcaaaagatataaattgtggttagaacaagggtatatttctccatatacgggcaaaccaatttccataagtaagttatttacacacgaatatcaaatagagcatattattccccaatcacgttattttgacgattcatttagcaacaaagtaatttgtgaagctagtattaatgaagataaaagtaataaaactgcctatgaatatttaaaagcaaaaggaggaagtatagtacatgggataaaattattaactttaagtgagtatgaaaatcattgcacccaatactttaaaaagaaccgaacaaaacttaaaaatctattaagtgagaaaatacctgaagggtttattaacaggcaattaaatgatagtaggtatatagctaagtttataaaaggaatacttagtaatattgttagagaagaaggtgagaaagaggctacctctaaaaatcttatttctgtttctggagctatcacttcaaagctcaaacatgactggggattaaatgagcaatggaataaattgattcaaccacgctttgaacgacttaaccttctcaacaactccaaccaatatggatatttagattatcagaaagatagggaaggaaataatattggtaaacaattttttagattagttacaccaactggagttaataaaaaacgaatagaccatagacaccatacacttgatgcaatagtaattgcttgttgtacaagagatcatattaattacattacctcattagaaaccgaaagaaaaaatcataagctagtttctaaattatgtaatcttaaaaaagtagctcgtaaaagaaatggaaatacagaaactattgaagtttttaattcatataaaaaaccttgggaaaattttacaaccgatgttttatatagcttagaaaaaacaattgtaagttttaagaaaaacacaagagtaataaccaaaaccaataataaaacttggcaatgggtaaaagataaaaaaggaagtctaaataaacaactagttctacaaataaaaggagataatagagcaattcgtaaaccattacataaagaaacggtttatgggaaggtgtatataaaggaaaagaaaaagaggctttcgagtgttaaaaattttattgaacaccctgaacttataataaacaaaacaattagagaaaaagtaaaagctttaaataaattgtatgattcagataaaaagaaaatagtaaaacatttaaaagagaatcctattgagcaagatggtaaaaaaatagataaaatagaagttagggaatggacgaaaaacgccacagcttatagagttaaattatctgattcgtttaccagaaaacaattagaatctattacagattatggcattcaaaaaatacttgaaaagcacgttaaaaaatatatagatgagaatggaaaagaacgatttgatttggcgtttaatcctgaaggagttgatacattaaataaaaatattatagaatttaacaatggtaaaaagcaccaaccaatacattctgttaggatttatgaagaaggaagtagatttcaagtttctactaatgagcaaaacgtaaataaaactaaaaaatatgttgaggctgcaaaaggtactaacctcttttttgcggtttattggaatgctagtaaaaaagaaagaatatacgagaccattcctttaaaagaagtaatcgattggcaaaaatggagagcaaaaaatatagcttttaacgaacctttaattccaattgataaagaaaaaggagaatttttattcttcatatcacctaatgatttggtttttgtaccaacaaaagaagaacaagacactcctagtttggttgatttttctaatttatcaaaagaacaagttaatagagtatataagatggtaagtgcaacaaaaggggaatgtcattttgtatctcaatattattcaaataatataatttctaatgaaaatggatcgaataataaaaacgaaagggttcaattaaaagatttaaatgaacttgatgaaaaaggaaagcctaaaatgataaaatctatttgttggaaattaaaagttaatcgtttgggcataatagaaaaagtagaacgttaaaaattagaaagactatgttaaaaagaaccatttatataggaagtccaacatatttaaagctaaaacacaatcaattagttgtagagtgtccagaaactaaagatgtaaaaggaacaattcctatagaagatatagccttgttaatgttagatcatcatcaaataactatatctaaccaacttatcaaccaattgatgggaaatggcgttgcattaatacattgtgacaatcatcatttacctaatggattaacgctaccgcttgtagggcattcagaacttactgagcgatggaggcaccaattacatagttctattcctttaaaaaaacaattatggaagcaaacagttattgctaaaatagaaaatcaaaaacagttattgcaacgaaataacagcccttttgaggctatgaatagctatttagagaaagtaacttctggcgatgaagcgaatatggaaggaaaagcagcgaatcactattggaagtatattttaaccgattttcaacgagaacgttttggtaatgccccaaataattatctaaattttggatatgctgttttacgtagtattgtggcacgtgccatagtaagtagtgggatgttgcccgcacaaggtatttttcataaaaacaaatacaatccgtactgtttagcagacgatgtaatggaaccttaccgtccttttgtagacaaactagttttagaatatataacacgataccctacggaagaagaattaagtaaacaagccaaaacacatcttttacaagtagctactgaagatgtacttattgatgaaaagatacgtcctttaatggtagcggtaactactacaaccgctagcttgtacaaatgctttacaggagaaaggcgcactattttataccctagtttggtatgagtcagcaacgttacaatgcttatagaattatgtggatattagtattatttgatttaccaaccgaaacaaaaacagaacgaaaagcagccaatggttttagaaaaaaattactaaacgatggctttaccatgtttcaattttctatatacatacggcattgtgcgagtagagaaaatagtaaagtacatgtaaaaagagtaaaaagtatgctgccaaaacatggaaaagtgtgtatgtttgaaataaccgacaaacaatttgaaatgatggaaatttttcatggtagaaaagaaattccgaagccaacgccagtacaacaattagaattattttaatttgtgtatttctattaaatgcaaaaacctcccgaaaataggaggttttaaagatttaccttgtgattgctcacgtaaaaatacaatttgaaatcaattcacaacatatctactgaagtatgtatctgcatttttcttgtgattgctcacgtaaaaatacaatttgaaatcaattcacaacctggtaaggtcataattatatttattttaacttgtgattgctcacgtaaaaatacaatttgaaatcaattcacaacatattactttatctataatggacgaatacacttgtgattgctcacgtaaaaatacaatttgaaatcaattcacaacaaatttcctaacctaactctagtagaacctcttgtgattgctcacgtaaaaatacaatttgaaatcaattcacaacatactagccataacagtgtggtattgtaagcttgtgattgctcacgtaaaaatacaatttgaaatcaattcacaacttagcgatataagagttagacaaatagagacttgtgattgctcacgtaaaaatacaatttgaaatcaattcacaactgtaagttccgtactcaccatctaacatttcttgtgattgctcacgtaaaaatacaatttgaaatcaattcacaactgccttctgcgtatttatttcctaaaggtcttgtgattgctcacgtaaaaatacaatttgaaatcaattcacaactaatccaatataaggaagcaaaaacagcgacttgtgattgctcacgtaaaaatacaatttgaaatcaattcacaacacatctccttagtgtttaaaacgtctgcttcttgtgattgctcacgtaaaaatacaatttgaaatcaattcacaacacataacgttgagcattgtataattcttgccttgtgattgctcacgtaaaaatacaatttgaaatcaattcacaacgagttttctttgctatatgaattattacaccttgtgattgctcacgtaaaaatacaatttgaaatcaattcacaaccagtctccattgtttggttgtttaacttttcttgtgattgctcacgtaaaaatacaatttgaaatcaattcacaacagcaaagttttgggtaagccaagctaggaacttgtgattgctcacgtaaaaatacaatttgaaatcaattcacaacttatggcagcctgatcatttccagaaaaagcttgtgattgctcacgtaaaaatacaatttgaaatcaattcacaacttgttttgtttacactcatattttctattgcttgtgattgctcacgtaaaaatacaatttgaaatcaattcacaactaacagttagaaaagcatctactttgtatccttgtgattgctcacgtaaaaatacaatttgaaatcaattcacaacattattcaattaaaggttcaggggaattaacttgtgattgctcacgtaaaaatacaatttgaaatcaattcacaactcttatctctaaccttaactacatgaggttcttgtgattgctcacgtaaaaatacaatttgaaatcaattcacaacctcaaggaagtcaatttgtagttggtacaacttgtgattgctcacgtaaaaatacaatttgaaatcaattcacaacttacttgggtagataattcaggaattgaaacttgtgattgctcacgtaaaaatacaatttgaaatcaattcacaactcaataccgaaagtacaagaacggctgaagcttgtgattgctcacgtaaaaatacaatttgaaatcaattcacaacttgttgatgaggaggaagaattggaggaagcttgtgattgctcacgtaaaaatacaatttgaaatcaattcacaaccatttttgtaagagagtatttttccgtcatcttgtgattgctcacgtaaaaatacaatttgaaatcaattcacaacttaatcctaaatctaaattatgtttaaatcttgtgattgctcacgtaaaaatacaatttgaaatcaattcacaactatattgcagaagataaaagaaaaacttctcttgtgattgctcacgtaaaaatacaatttgaaatcaattcacaacgatacctgaagcaatgggacccgatgataacttgtgattgctcacgtaaaaatacaatttgaaatcaattcacaacagagggggataagaaagcaataagtataatcttgtgattgctcacgtaaaaatacaattgtaaataactaaacctacttccaaacaatatttttcttggtcaattcattgtttacattgtgaatatggaaaagacgtgcttttaataacaactttcttccattcatagttcgagtatatactaatttagatttaccaagatgtttgttccagcaagattgaaaaactaggcattcttttttacgaataccaaaaatttcaggaacagaaaaaaagttatgtagctttaattttttacgaagccaatttgtttttatcaataaatacttagggttatcaataggttggagtagctcatccaaagcttttataattaaagtactctcatatctatttgctccatgtatagtacaagaaacatttcctttagctagtaattgagtttgagtttgtattttatctaaaggagttgttaaatgatttaatgtattaagagattccaagattgctaatgtcattttgtctattttcttatgaattaatccgaagtatacatataactgtgcagacttgtaaattttataaccaaaagttaaccccaaagctgaagacaaagcaaaaaggaagtaaacgatccctttttgtaagagtacattaaagttttttatgataaattcaggaagaaaaaaagataaaccaacaataatttcaccaaccgtgtacttaacaatatcttgatagtataaccttttctgtttgggaaactgcttgttcctttcattataaaaagtaagttctttactaatttcttttccattgctaatggaacttttccattgtttagcaatcaaatttctgttttcagaaagcgctaaggtttgtttatttaaactatcaatatcttcatcaataaaattagcaggaagctgtaaacgttcaatcccgttagaaataacagctttttcatcattagaaatacccaaaaaagcatcgaaacgacgtgaaagaatttcaaaatctcgtcctcccaactcatctgaaatatcaatacaagccaaatgccaaattaagccgactttatcaggatctttactatctactctaattgcacgaccacgcatttgattagaagtaacaaacgaccccacaactgacgctaaaattaaactattaatagatggagcatcccaaccttcacctaatagtgattttgttcccactaacactttgatatgtccaagttcaaaaagctgcgtaatgacttcaacaatactatgtttagatgagtttttagttgtaagagttacaaactcagtgtctgattttaaaggagtataactgtagttgtcaatagcatcaattaaaccaagcttagcgatgatgctactatgaataattactaaactacctgtaagaactgctaaactatttttattttttgtagctattctaacatgatgaaaaataggaacaacacccagtttttttatctcttgtatttcaggtaaagtagtgtttagatattcttttctaatatagtcagataaaataacacaacgtaaatcatcttgtaaatttcgttgttcttgttgaacaattgtggtaatactttttaatttactaggactattactgagtgatttatataaaagttcatttcctattaaattgactttatttttattaaaaacagctagttttcgaagtcttttttccaaagtattaagataagtttcatattcaataagcttatcgcgatcaacaactaggagatattgaaataaaacttgaatccattcatttgttattgaagggaaatcaatcttttcatttttatcaaaacctaatacttctaatttttcaacaggaataacttctcttgcttcatgtaagaagattagcattgaagaaaagaaatcagaatacttgtaaagttcttctaaattttcttcagttttagcataaaacctgtgttgttttagaaaaaatatgaattctttatcttttaaaatatcagtaacaaactgagctatttttaatcgaaaattagtaataaaattaatttcctgatcttcaggtttggatagaaaaactaaatcttggtgtggacaaaggttttgttctttaaccaaatcaggaactacaatttcatcgtcaatttctccacatagtttaaaatatttttgaatttcagcattttcactatcgtagggtggagtagcagttaaagcaacaacggtttgcatgtgttgttctttcaaatcaaacaaacatttccaccaagcattttttaaatgatgtgcttcatctaataataaaacttcaatttgatgctctttaaagaacttgtaatagtcttctttagtttcaaaagacttataaaaactatgtaaagcttgatatgtagaaaaggtaatatcagaaggttgcttaatatcaaatgaaatctgtttgaaattacaatcggtagtaaaaaagttttgcaaacgatcttcccattggtttctaatggttaacgtgggagctaaaatcaatgttcttttacctattcttttaataatttctattcctaaaatggttttaccagaacctggaggtgcaactatatgaaaatgattgtcctgtatatgagaggagaagttttgtagcacttttgcttgatacggtctccaatcaaataggaagttaagtttggtaatagctgtattcaacaatttttaattaggttaaagagttcaaaaatagaattttgagttaacaaacaaaagtttaatctgatattggattattcgtaataatatttgttttttacagagataacaataatctatttgtggtttttaagaattgaattgaggataatttaatcaataaagaagaagtcaaaaatatttaacgtataaaatcatgaaaaaatcgttgctttttagtaacttcgcaagcgtttaaaattatacactatggctagatacgaattgaagttgcctaaaatgggcgaaagcgttgcagaagcaacaataacttcttgggtaaaagaagttggagagactattgatatagatgataccgttgttgaagtagctacagacaaagtagatagcgaagtacctagtgaagttgaaggaaccttagttgaaatcttattcgaaaaagatgctgttgtagaagtaggtgaaactattgcaattatagaaacggaaggagaagaaggagcaacaactgatgcgtctaagaaagaagatgataccccagaaactgtagcagcagttgaaaaaacagttgaagtagcaaaagaaacagttgctactacgattgatacttcatcaagtgatcgtttttattctccattagtaaagagtattgcacaaaccgaaggaatacctgtagaagagttagaaactataaaaggaacaggtaaagaaggaagagttactaaaagtgatattttatcatatttagaaaatagaggaagtcaaccaaaagttgcagcatcagcttcaatagaaaagaagtcagcacctcaatcaacaccagcaccaactcctgtttcattaagtggtcaagatgaaattatagaaatgagccgtatggggaaattagtctctaaacacatggttgactctattcaaacatcagcacacgtacaatcgtttattgaaattgatgtaactaatattgttaattggagaaataaggttaaaaatgcttaccaacaaagagaaggagagaaattaacgtttacaccaatatttatgcaagctgtagcttctacaattaagaagcaccctatgataaatatttctgttgatggtgataaaatcattaaaagaggaaatgtaaacttaggaatggctgcagcgctacctgatgggaatttaattgtaccagtaattaaaaatgctgatatgttgaatttagtgggtatgactaagcaaataaatgatttagcaactagagctcgtgctaataagttaaaaccagatgaaattcaaggaggaacctatacggtaactaatgttggaagttttgggagtattacaggtacgccaataataaaccaacctcaagtggcaattttagctttaggagctattgttaaaaaacctgctgttattgaaactccagaaggagattttataggaatccgtcataagatgattgtttcacattcttacgatcatagagtggtaaatggagctttaggaggcatgtttattaaaacattaaaagatattttagaatcttgggatgtaaatcaagatttttaataaaagcgatataatattttaaaaggcttaggtgaaaacctaggccttttaattatatatagaaagtagttgtaacaaaaacgacattttaataatagatataatgcttattttaaggaaatgttttttatcaacatcattaattaatagaggtattctaaaaataaatttctataatttatagaaatgatttatgatttctattatatttgagaaaaataaaaaattatgagtaaattagaaaaccttaaaaaatttaaaatagctaaagaagaagcaaaatctattaatggagggaatgtagaccctcatgctttagtatgtttttcgtatagaagttatttaggaaaatttgaaagatgtagatctggttataggtgtatagaagatgatataagggattatgttcaacttttttgttaatcacaaaatctattttaaataaaaaaagtttaggagaatattctaaacttttttatttatagagcataaactagtttctacaaagttaaatcaatttcttctgaaaatgttttaatagatattttcaggaaaagttacaggaggagctgatggggatattacaggagctatggatatagatagaggttcagggatacctttagagtcaaagattaatatgacaatgaagattcaaggacgagatgcaacaacaaatatgacgactaagtttaccaaaggttaaaatagaatacataattatttagaaagctcagaatttattctgagcttttttatgttttaaaaatagttaaaatacttaccttaagtagtttaaaatttgttaaatttgtaaaactctcattatacttctcataaaagggctagtttatgatacttttcttaagcgaatccttgaaaattacattttttcaatcataactaaatcttactattatgaaaacagttaaacttaagttattaatgggatttctattgtttatggctattccaactactatcttttcacaagaagataatcaacgtcctgaatatattacggtcacaacagggcattggaaccttaattatgaaaattttgataaaggagaatggattgctacggaaaaagaatttttagataaagttgtaaaaaagaatgagtttattctaagatcatttgtgtttttacatcgatttacaccagataatacagagataatttttgtaactacgtattcttcttgggataatattgataaagctaaccaaagaagtggtgaattagcaaaagaagcttggccagataaagataaaagagaagcatattttaagaaaaaagatgcctattatacacatcatcattcagatgagatttatgcacctattggaggagtaaagatgttacaacctaccaataaagaaatgatttggttagtagtaaaaggacattttgcatttccagaagatggctctatggaagagtttgaagaattatctaaacaatatttagataacgttattcaaaaaaatgaatttataaaaggattttaccaacatgcacatgcttggggatctgatagaacagagtataccagagcttatgtaatagagtcaatgggaggtttagataaaatgggaaaaagaagtaatgagctttatagagaacattggtctgatgaagcaaaaagaaaagagtttggaaagaaaatgagtaaatattttaccggtaaacatggtgattatatttatacatcagtaccagaactaaccaaataaaaagaaaagagctcagaaatttctgagctcttattttttatgaaaaaaccaccaattcatatctcttgttagtttataccctaacttttcataaagctgtattgcagggtttcctttgttggtatgtaaaataggatgttttccatcttttaaaatctctttagtaacgtgttgagaaagttgtttagctaatccttttctagtatacttaggatgagtaactacagcgctaacctcaataaaattgttagtttgtatacgttgtcctgttacagcaacaagcatattatctttaaaaacaccaaaatactttcccatgtcaaatgttctttttttatagtatccaggcattactaaccatactagcttgtaaattttatcaacatgtttttctgttaatggtataatttcttcggtaatatctaattcggttacattctctaataccatttgacaaccatcaatctttttatacaaaagaatgttgtctttgttataagtaggaatttctttttcagagactaaaaagaattgatcagtcagttttgagtattcatctaaagcttccgtagtttttgaagcatccgtaaaagcacca

SEQ ID NO: 1050 - DNA, 24680 bp, synthetic construct
  source 1..24680: mol_type = other DNA
  misc_feature 1..24680: note = Synthetic
tgacattatgtatgaggacaacagatattctgttacgtacttagattttaaagactatcagttagcctcatatttggtgtttaatgataaaaaaacaaaaaagttatatccatatcaaggagcaataaaccgactcctatgtttggataatacatattatattatttctcacaatcaagtggattgtataaccaaacccaataaaggacatcaatggaaagaagaggattgggctctaatgtattatcaaaacaaatgctctaaacccaattctatggtacaattaaaagtccatcaacaagaggtgccaaaatccaattttatttataccccatatattatcactggatttggaatagataagcaattatatcttgttatatgcgatgaaacgggtctttatattgccgcatatattgacggaattatccacaaagagtttgttgtcagcaataacaacaacttacaatcatatgaatcatacaatacggggggagaacagcgtagttcactacattcccatgatgtttcttgtgtacaattattggattatcaaaataattccaatgtatttctttccataaataagagtgacattacactcacatatattgtaattcaataaaaagcatttttgcccaatctggcaggtcatctgcaatgatttatgcaggcaagatggaaaacaccagtgccgacatccaaatactcaattacaagcgagcgtcaagacttttctaaaaacatcggatgtgccaacaacacatccgattgctttttaatccttcaacagcctccacctattcacgcaggtcatcaacatattgttacctattttataaataatgttacacaattgcaaggctatttaccataaaatccgtacctttgtgccgaaattctttataactttataacaatatcaaacacacctatgatgaagaaaattctatctatcacagtggcaacgacggtgctcgccttgcattcgagtcccgctgctgcacaaagcgaaatctatccgcagcatttcgacctccaggaggtgacgctgctcgagggtccgatgaagaccatgatggaaacgaacgaccgactgctgttggaatacgatgccgaccggctgatgactcccttcatccgtcaggcaggattgtcgaaggacagttcatcgaagtattacggatgggaggagaagcatcccaacttcccgaactggggaggcgatgcgggcttcgacctgagcggacacgtgggcggacactacatcagcgccctcgccctggcctatgccgcgtcgaacgatgccggcacgaaggcgaagatgaaggagaagctggactactgcctcgccatcatgaaggactgtcaggatgcctacaaggacgacacgaagggtctgaagggattcatcggcggacagcccctgaaccacatctggacgggcctctatgccggcgacatctcgcagttccgccgttcgggcggctgggtgcccttctattgtcagcataaggtgctggctggtctgagggatgccttcctctatgccgacagccaagtgggcaaggagctcttccgcggactcgccgactggagcgtgaacctggtgagcaacatcagcgacgagcagatgcagcaggtgctgggctcggaacatggcggcatgaacgagacgctggtggatgcctacaagatcttcggcgacaagaaatatctcgaggctgcgaagaagtatagccatcgccagatgatcgacggcatgaagaccttcaacccgaccttcctcgacggtaagcacgccaacacgcaggtgccgaagtacatcggcttcgaacgtgcttggcaggaggacaagtcgctgaccgactatcgcaacgccgtgctgaacttctggaacgatgtggcgcagaaccgcaccgtctgcatcggcggcaactccattagcgagcatttccagagccatcagaacggccacttgtacattaataatatggagggtcctgagtcgtgcaactcgaacaacatgctgaagctctcggaagacctcttcgacgacacgcacgatgcgaagtacgccgacttctacgaggcgacgatgtggaaccacatcatgtccacccaagaccccaagaccggcggctacgtctatttcacctcgctgcgccccctctcctaccgcatctattcgcaggtgaaccagggcatgtggtgctgcgtcggcacaggcatggagaaccactcgaaatacggtcacttcatctatacacatagcgccaccaacgacacgctctacgtgaacctcttcacggccagcgaactcaacagcaagaagttcggcatccgtcaggagaccaagttcccctacgagacgaagagcaccttcaccatcaccaagggcggcaaatacaccatcgccgttcgcaaaccctcttgggccagcgaagacggcaaggcaagctatgtctgcaccaccaagaactggaagaagggcgagaccttcagcgtggacctccccatgaagctccgctacgaggaatgtcccgactacaagagctacatcgccttcaagtatggccccatccttctcgctgcccgcacagagactgaggcgcaactgcccaacgaatacggaggcgaaggacgcatggatcactctccaggcgcacgctcagcagccaagcccctctcatcagctccgctcctcatcggcaaccgctccgaggtgctcagcaacatcgagctgaaagacccaaccaagctgagcttcacgctcaagaccgacaagggcacgctgccgctcgaacccttctacagcatccagcactcacgctactcctgctacttcttccagggaacgaaggaagactacgccaactctgacatgggcaagaaggacgctgaggaacaggcactccaggctcgcaccatcgactacgtagccacaggcgaacagcagagcgaagcaggtcacgaagtcaagttctccacaggctccaccagcggcagctatcgtggcgagaactatcgcgacgccaagaacggcgagttcatccagtatgtcattgagaacaagggactcgagaccgacctcaccctcatgctccgcttcatcacttccgatcgcggccgtacagccaacatctacctcgatgacgagaaactgggcgacatcaccatccagccccgcatgcaaggtgccgacgaacaaggcttcttcaatgtcgagtacgccatccccgacgacctcctcatcgacccacaaacgggcaacatcaagccccaactcaccttccgcatcgtagcatcgcccaacaccatgtgccccggcctctactacctgagattgctgaagaaaaaataagggcagaaagaaataaggactgaagaaaaaattactgctgaaagaagcaatagctgctgaaagaagcaatagctgctgaaagaagcaatagctgctgaaagaagcaatagctgctgacaaagcaatagctgctgaaaagcaacacaagaaagaggagtgcaacaactgcactcctcttcttatttacatctatctatattccttattctttctgaataccaccctttctggcattcctgaattccatcattccttcctgtcgatggaagggatctcgtcacctggatcttccatgatgaagttgacggcaggcacccactcacgaacggtcttgtaagattgcagagctttgtcgctgtaggaagtacggagacgtgtgggatcaacgtggaagttcagcacaagagcttggcgaacagcttctgcgcgcttctcggccagcacacggtgatactcctcatcctcgtcgggaatgatgtctggatgacccacaatgttgaggttcaccaacggatgcgactggaggaacttcgccacatgctccacacgtttgttggtagtggagttcaggtagtagaagcctgaatagaaaggaatctccgtgtacatcgcctctccgtagcgaaccgtctcccgatagtcacgcgtgtggtcaatcagcacagggtcaacgaatggctccttgggaggctgacggaaacggcgcaactgctgcttgccgttcttgaagtgataaacaaagttgaccatcagatcaagatagaagtcaagcgtgttgccatcgctcgcaccattatacttattgtctgtaccgttaagacgcaaatccacacagatgtcccaaggctcgttcagacggatagccatctgcatgcccgcatgacccgtgatatacctgctaccttccttattcacaggataatagggcttttcggcattgggcgtcacattccacaacgccaacttgtcatcaaacgcaaaggtctggatgccgccagctccaaagatgaggttccatgtgactggacgctccacctcatagccgaaaaaggcgttggtgatgttgatcacagccgacaaagaagccgacaggaacttgaaattgtagcgtccattgccatacacctcaggcatagcattcgaagccgcctcactgcatcgcgacacctgcgaattgatgcttccgctggcctgaataccaaagactggcgagaaattatgtccaagcacaccgctaaaggaaggcatctggtggaagatgaagtctgtggcatccgcattctccgccatcgactgactaaatccacctccaatacccatataccagtcgccatgcttatgtttaggggcattatacaactgagccgatgccgtcaatgcacatgtcagcagacacatcgtccaaatcgtcttaatccatgctttcgtaagcttcatttcttcgtcatttttcgtgttcttcttgcaaaagtaccacaaaaatccaaaattcaaacaaaaatcggcaacaaaatcaaaaatatcgataaaattccttaactttgtcgccgaaatgcaacattcatggctcggtagctcagttgaatagagcatcagattccggttctgcaggtcatgggtttgagtcccatccgagtcacttttttccagcaaatcacccaagagtcaccccctagtggctcttttttaatgatgactcctcaatttctggtgaaaatcctatttgattgccttttatcgacaaaataagattgtcaataagtaaactattctaactaccaattgttaaaatcattatacctattaacaatcctaaatttttgttacatttttagttcgcgctgaaagtctcgaaagtaccatcatcgaagaagatgcgcacctcgaccaccttgcgaggaggcttctgctgttgcttcaaagtttctgccacgatgtcctgcacattgagtgttgtgacaggtgctggcgatggagacgatgaacgacgcgcaccaacagttggcgaaggggtgggttgagcaacagaagtgggggcagatgcaaagagcggcaactgaccatcatcgaacgaagcgacatcctccttactattatttaaattggtatgatccgactcttcattttctggagtaggagagtccgaatttttgtacatcggttcctggtcatagaacaaccacgcagggttgatttcaggaaaagcctgaacgatacttcgaagaatgttcagggtaggttgggtgcgaccactcaaaatgtgagagagggtaccaggtgcgatgcagacctcattacaaaattgggtgttgttgaggtgcttctcctggatgatcaactcgattttttccttgtcagtcatgtaatagtactatttttcttgtttttactaattttttacaaaggtaggcattattttccaatcatcaaaacattttggtttctttttgtatatttaaaattaatttttctattttcaaaattgcaatttggaaaattgtagtgtgttgctttttgtaaagtataatatatctgtaaaattacacctgtaaaaggctccttttctatcactttatggctgttatacaagtaattgattggaatatggttattcctggctcatttttcattttatagggaaaaactgccgtttttgggcattttagaagggtgaaaatcgtagattttatgattatacatcgaataaaagtgcgtaattatcaatacaacaaatacttacgataagagtgtttaaggtgtattttttcggcatttattttgataaaattttagataaagaaatgtaaaatattgcgtcctttgtgtttgtaaaatactacaggcgtcattgctggttttattttgtaaaaccaatttacaagaatggtgttttaactttgtaaatcactacttcttgaaacttaaattttgttaatgtaaaatttgagcactttcattttttcaaaaaagagagcgaatttgcgagaatcgaacaggtggtttctggtgcgtttttggctggaaatagacgcattttttagccccattttaggggttaaagtgctgattttccgatgaaagacgggtaaaattcttgttcagatttttgggtgaaagagattttgttcaggattttagagctaaaaaattgaaggattttgggcttgattttgttttttcttgcaagatgaaggcgactttcggcacccttcccgatgctaaaaaatcgccttgcaattttttagaacagttttcccgaacaaaaattttctgggcactttttgcgaacaaaaaatccgagtcgaattagagaccggatttagtgcaagatgaaaaaaagaagttcgtgcatgatgtcggcatcggtcaagttaccccgattgatacccttgagtcgagcatccgtttcacgaagtttgccgatgatctgcatcaccttcaaagcagaataatggcgcatggcagtcgtgtattcacgcagttgccacgtctggcgaaattccagatgcttcatcaagccctgttctgtgcgttcaggggagtaccaggcctgcatgagcagcgcaaagaagttgaacaaagtggagacagtcatcacaggaggattgctcttcacgttctgttccatatagtacatgatcttgttggccttggcaatgtccttgttggcaatggcagcacgtaactcccacacattgaactccttagacacacccacatgtccctgtacgaggtcggttgtgatgcgtgtttgtcctgttggcaatgccagaacgagcttgtccagttcgccagccagacggttcagatccgagcccacgctctctgccatcatcagacaagcacgttcctcgatggttatctgcttgcgtctcagatagtcagcgatgaactgtggcagcatgccctccttcaatttgggactttcgaacacgatgcccaccttttcgacggctggcaccagttttttgcgtccatccacctttccatttttgtagcaaatcaccaaaatagtggacggcattggattttgggcataagtggcaagttcgtcaatttttaacaaattctgtgcctctttaacaattaccacttgaaattttgccatcatcgggtagcggcgtgcacaattgaccacgtctgccacagccgtctcgcgcgtacaatagaccacagtttggttgaaatcctgctcatcttttgtcagcacgttgtcggcaatatactcagcgatgcgatcaatgtaataagcctcctctcccatcaggagatagatgggcttataatccttgcgcagaatctgctccacgatttcgcgatgtgtgatatttgcttttgccataagagggcgttcttttgtgcaaaggtagcattttatattgagaattgagaattgaaaattgaaaattattgctaatccgtcaaaaatccttacctttgtttccaaatacgccaagatgcaaccattgaatttgccgcctttcgaggcaaacatcaagaaaatggacgggatggtgaagatacaggatgtgcttcgccgcaagttcgtcaccctcacccctgaggagtgggtgcgtcagcattttgtgcatttcctcatcgagcagaagggctactcccctacgctcatggccaacgaagtggctgtgacgctcaacggcatgagtcgccgttgcgacacagtggtctatcgtcaggaaggcctgaagcctctgatgatcatcgaatacaaacgtcccgatgtggacatcacccagaaagtattcaaccagatatgccgctacaacatggtgctcgaagtcgaatacctcgtcgtgagcaacggtctgaaacactactgctgcaaagttgacctgcagaacggcacctatacctttctgcaggacattcctccctactccgatttgtaggaaatttatttcagacgaacacgaatctttcgaacaaactcgaatcttcttcatcttccaaatcctcccaatcctctcatcggccgcttgcgacctagttttttacgactaatccgcgttgcggatgattaagagattgaatagattatttttctgttgtcaagcaactttcacttttagtttttagttcttagtttttcacttttaccgtacgttttcagtcccttttcacgcccctttattttgccgccggcaatccacccttttgccgtcacctctttgatgctttgccgccgcctctcgacacgcttgccggcggggcacttttccttgtctttttgccccttcgtggaggtcgtcagggctcgtgtgtgcctttctttaattacggtacaaagttaatactttttcctaagatatgcaagtaaacatagatattttttcgaaatcaagcgatttttttacaagcgccgtcacgccgtcacgccgtcacgccgtcacatttaaaaaatcatgtttccgtcacttcaacctcaaaatcaagttacattatatattattatataatttataattatataataatatataatgtaaggaaaaggtactctttttttgcgcccaatctcccacctccttcaacaaatggaaattgcaaatgtgacggcgtgacggcgtgacggcgttcagagtaagacaaaacgccatcttgtaactttttgcggcataatccaaattaatcacgcattcatttggatatgtgaatcttttttcgtaactttgcacgtgaaataactacccaccctaacaacccaataaaaccaccctaaaacccgctcaccatgaagacccctacgctgttcaaagaatacatctggctggtcaacaccatctaccacgctggaagggtatctttgcgtggcttcctgttgaaaccatcgtcaaagagcatcagcaggattactatgaagccattgctcgatgtgacgctgcaggcaacagcactctttttatggagttcatgttgggctgcctgcttgatgccatgctgaattacgagcctaaggaagaggaagaagtgcaggataaagtgcaggttaaaatacaggataaatttccagaagtgtccaaagctgcatggaaagtgtttgatgttctccgccagaaccccaaagccacagtaaacctgatttgtgaacaattgaatctgaaggaacgacaagtgtataaacacatatctctgctgaagtctataggtgtgatagttcgtgagggcagtaataagacaggctattggaaaatcacgactgagtagagtatggaataaaaatgaactacttgccaaacaacctgcctctgctgagaaatagtcggggcttattgaacgaggctgaaaaaacgtgagttaactcgattcatctcgtgagttaactcacagaccgttttgagttaactcacctcatttttaatgttcaatgattcaagacaattttgtttgttaaaactccccttgaatgacaattccagcaatcaaaaagcccccgttaaggacgagggcaaaaacctgaatgttttcacaacggaataatccttattgtgatttgcttcaaattagtgaggcaaatttacaatgttttttgattttacacaattttttcttgacaaaatcattctttttccttaaatttggcggcaaattacttcaaattagaaaaccaaaaccattatgaaaaagattttaggcctcgatttaggcaccaatagtattggttgggcagtggtaaacgccaacgaagaaacccgagaaaacggaaccaaatacctaaagccaattggtatcagtgcagctggtagtagaatcattcccatgtcacaagacattttagggaaattcgatgttggaaactccatttcacaaacagcagaaagaacgcgcctccgtatggttcgtcgattacgtgaacgtaacttattgcgtcgtgaacgcttgctgagaaccttgaagatattaggattcctgcctgaatatttttccatgcaaattgatgcgtacggaaaattcattgatgatagtgaacctaaattgccttggaagaagaatcaggaaggtcaatatgaatttcttttccaacttgcttttaacgaaatgctggctgactttgcccaacatcaaccacaattggttgcagatggaaagaaagttccctacgattggactatctattacctacgtaaaaaagctcttagagaaaggattaccaaagaagaactggcctggattctattacaattcaaccagaagcgaggctattatcaactacgtggcgaagaagaggaagaagaccaaaccaaacgagttgagtatattgctcaaaaagtattgcgcgttgaaagaaccaatgagaagaaaggagatgattactggtacaacgtctatttggagaatggcatgatttaccaacgtccaagtaaatatccacttgattgggaggggaaggttaaagagtttattgtcaccactgaccttgaaaaagatggaactcctaaaaaaacaaaaaatggggaaataaaacgttctttccgtgcacccaaggaagacgattggactttgctgaaaaagaaaacagaatttgatatcgaaaaaagcaaaaagactgtgggatgtttcatctatgatgccatcttacagaaacccaatcaaaagattatagggaagctcgtccgtaccgttgaaagaaaattctacaaagaagagctcattcagattctaatggcacaaaaagaattcattccagaactaagagactctgagctatataagaaatgtataaaagaactctacccacataatgaggcacatcgcaacaacattgcaaagccagactttgtcaatttgttcgtgaacgacattcttttctaccagcgtccgctgaaaagcaagaagtcgctcattgatgattgtccatacgaataccatattgataaagatggtaactcatatcccattaaatgtattgcaaggtcaaaccctctctttcaagagttccgactttggcagttcatacagaacttacgcatttatcaacgtgagcgatttgtcagcgatggccaattagatttgtttggggctacaactacaggaaaactacaaactgatgttgatgtaacagcagaattttttaaatcagaagacgattacgtcaaattgtttgattggcttaacgacaggaactccattaagcaggacaccttgttgaattcttactttaagatcaagaaagagaaaggaaaaaaccagtatcctttccgttggaactatgtagaggacaaggaatatccttgcaacgaaacaagggctacaatactatcaggattagggaaaagcggcatcagtccagagttcctaacagacgatatggagatggctttatggcatattctctattcagttacggataaaatagaaattgtcaaggctctaaactcatttgccgacaagcatcaccttaatgacacatttgctaaagtgctcagtaaactgaaaccattcaaaaaagattacggttcatactctgaaaaagccattaaaaagttattaccattaatgcgcatgggcaaatattggaatgccgaatctattgatgaacacaccttggaacgaataaacaaaataataaccggagaatttgacgaaaatatcaaaacccgtgtccgtgacaaggccatcaatctttcagacatgagtcacttcaaaggattgcctgtctggcttgcctgctatattgtttatgaccgtcattcagagggcaaagacatagagaaatgggagagacccgatgatattgaccgttatttgaaagacttcaagcaacactctctgcataatcctatcgttgaacaaatcattaccgaaactctccgtacggttcgtgatatttggaagcaggaaaagcggatagatgaaatacacgtagaattgggacgggaaatgaaaaaccctgccaatgaacggaagagaatgacaaatcgtattctgcaaaatgaaattacaaatctgcgtataaaagctttgttgttggaatttatgcatgaaggaatggaaaacgttcgtccttactcacccagccaacaagacattctgcgcatctatgaagagagtgcagttgacaaccttaccaaagaagatgaagagtatgagttcgtaacacaaatgatgaaaacggctcaaccttccaaatcagatattatccgctacaaatgttggttggagcagaaataccaatctccctatacaggagaaatcattcctcttgccaagttatttacatctgcatacgaaatagagcatgttattcccaaagcactttattttgacgattcgttcagcaataaaattatttgtgaagcagaagtcaactgtctaaagggtagacaactggggtatgaatttatcaagaaaaacgctggcaggattgtaccaatcagtcaaggcggaaccgtaaaaatacaaacgattgaagcttatgagaagtttgtaaaggatcactacgccaccaaccgtacaaaaatgaagaaattgctgatggaagatattcccgatgacttcattgaacgtcagatgaacgatagtcgatacatcagtcgatttgtcaaaggcgttttgtcgaatattgtgcgagaaaagttggaaagtggtgaatacgaacaagaaacagtgtccaagaatctcatttcctgcaacggcaatatcaccacttatctaaaacaagactggggaatgaatagtgtctggaacagtatcatcctaccacgtttccaacgtctgaacgaattgacaggtacaaataactttacgacaataagcagagagggacatgtcatccccaacatgccattggagttgcaacaaggatttaaaataaagcgcatcgaccatcgccaccacgctatggatgctattatcattgcatgtgctacacgagatcatgtcaatttactgaacaacgaagcggcacattctaaacacaatgccaatcgctaccagttacagcgtaagcttagaagatatgaaaaagtaatcataaatggggaagaacgtgaagttgccaaagagtttataaaaccatgggacacatttacgactgatgcacagctggttcttgaaaatattattgtcagtttcaagaaaaatcttcgcgtcatcaataagtccatcaacttctatcagcattatgaagcaagtgggaagaaagaactcaaaaaacaggaacgaggtgacagctgggccatccgcaaatccatgcataaagacaccatctttggagaagttaacctgcgattcataaaaacagtatcactcaacgaagccattaagaagcctgaaactattgtaaataaggatttcaaagccaaagttaaagaactgttacgcatggggcataatatcaaatctatccagaaatatgttgaagagaacaaagatgtgtggtcagacatcgatttgaagaaaatatccgtgtattatttttccaaagacgaaaagaaacgtaatggagagcccaaagaacgatattttgccactcgcaaacctctggatacttctttcgatcaaaagcgcatcaaggagagcgtaacagacacaggtattcaaagaatactattggctcacttagcttctaaggacaacaatccagaacttgcgttctcacctgacggcatcgatgaaatgaaccgtaatattgttgctctgaataacggactgttccatcaacctatttacaaggtacgtgtttacgaaaaagctgataaatttgctatcggacaaacaggaaataaaactaagaagtttgtggaggcagctaagggcacaaatcttttctttgcgattttggggacagagaaagaaaatctggaaacaggaagaacagaagaggttcgatcctatttaacaattccactcaatgttatgattgactgccaaaaagaacatggtgcaacatggaagagcaacatagaaaattatctaaaggaaaaagatctaatttcagcagatactaaactactcttcattctctctccgaacgatttggtgtatttgccgactaatatgccccccgttggagccactacagcctttgataaaaaacggatatacaaattcgttgaccccaatgacaataaaggtaattttgttccctattcaatagccaacaccattttctctgtgaaattctcagaccaaaagaaaatgggaatatcgtttgacattcaaaatgaaatagggcttgggagtcaacactctaaaagcccaagagctatcacaggcgaaatgattaaagaaacatgtatccccatccaagtagacagattaggcaacatcatagaatttaacggaatgaaaatgtaaaatttatgattaagaagaccctctatttcggcaatcccatctacctcagcctccgcaacgcacaactggttctgaagactcctgatgcggataaattggaagagtctttcaagcagaatgcagaacgaacgattcctatagaggacatcggtgtggtggtgctcgacaacagacgcatcaccatcacaacgggagcaatggaagcattacttgacaacaattgtgctatcatcacatgtaacagcaccaaccttccggtggggttgatgctgcctctgagtggcaacaccacacagagtgaacgtttccgcaaccagatagatacatcgttgccactaaagaaacaactttggcaacaaaccgtccgacaaaagatcctgaatcaggcaacagtattgaacaagaacacaggagcaattgtcaagaacatgcaggtgtgggcaaacgaagtgaagagtggtgatccagacaactacgaagcccgtgctgccgcttattactggcgcaacatcttccctactcttccaaattttgttcgtggaagaggaggtgagcctcccaataatctgctcaattatggctatgctatcttacgggcatgcgtggcgcgcggattagtgggaagcggtttattaccaaccttgggcattcatcaccataaccgctacaatgcctattgtctggcagatgacatcatggagccatatcgtccctttgtggatgacctggtcataaatatcatgcagcagtatcccgattacagcgaactgacaataagcattaaggcagccctcctcaccataccctcacttgatgtgatgctggatggtaaacgcagcccgctcatgattgccgttggtcaaactaccgccagccttgccaaatgcttcaacggagagctacgtaaaatcgcttatccagaattataaagagaagaacatgagcagtctgtcacgccttaccgaataccgagttatgtggattttagtattcttcgacttgcccaccgaaaccaagaaggacaagaagcgttatacggattttcgcaagaaactccattgtgacggattcactatgttccagttttccatctacattcggcactgtgccagcagtgagaatgcagaggtacatttaaaaagagttaaatctttcctgcctgagtttggaaaggtcggattgctaactataactgacaaacagtttggaaacatgcaacttttttacgggcagaaaccgactgagcccaaagcaccaggcgtacaattagaattgttctaaaaaagaaaaaaccagccataaagccagtttattcttgtcacacacctttctttttcattttctaatcttccatacaacaacctaaaaatctgcaacttacgaatatcgtggtgtgtatgactctgcaaagatactaatttgaaagcaaatcacaacgccagactgttgatgccctcggctctccttggtgtgtatgactctgcaaagatactaatttgaaagcaaatcacaactgagttgactgactatatgttggataatgcggtgtgtatgactctgcaaagatactaatttgaaagcaaatcacaacaatctaataacgaataattatgaaagttaaggtgtgtatgactctgcaaagatactaatttgaaagcaaatcacaacagctttcagatgatcgtgttcagcgttgttggtgtgtatgactctgcaaagatactaatttgaaagcaaatcacaaccacttattcgtgcatctcttcgtaatcctgggtgtgtatgactctgcaaagatactaatttgaaagcaaatcacaacactcgaaggagcaaccgctgtacacaccgcggtgtgtatgactctgcaaagatactaatttgaaagcaaatcacaacttggctacgatggtaatgatattttgcgtaggtgtgtatgactctgcaaagatactaatttgaaagcaaatcacaacgtatgcaggagtaacttttaatcatgctaaggtgtgtatgactctgcaaagatactaatttgaaagcaaatcacaacagcgcgaacgcatacagcatccgtgcgtttggtgtgtatgactctgcaaagatactaatttgaaagcaaatcacaacacgtagtgctcatagatgcggacggtgtacggtgtgtatgactctgcaaagatactaatttgaaagcaaatcacaacatgtcttaataaagtataaaaacataggcggtgtgtatgactctgcaaagatactaatttgaaagcaaatcacaacaccttctgccaacttacctcgtcagagaacggtgtgtatgactctgcaaagatactaatttgaaagcaaatcacaacttacgatgctttcggaattggtggtctgatggtgtgtatgactctgcaaagatactaatttgaaagcaaatcacaacaggaaaggaatcatagtcatagcgactcagggtgtgtatgactctgcaaagatactaatttgaaagcaaatcacaacaggggacgcagaatgtgcatgagcgatgctggtgtgtatgactctgcaaagatactaatttgaaagcaaatcacaactattcccgtactacagtctaatggacgtttggtgtgtatgactctgcaaagatactaatttgaaagcaaatcacaacacaaggagggaagagtgctgaggttgtgaggtgtgtatgactctgcaaagatactaatttgaaagcaaatcacaactgctggatgatgatgtcactgtcttgtatcggtgtgtatgactctgcaaagatactaatttgaaagcaaatcacaacaacttatgaggtaaaatcttctcttttcatttgtcatgtgtcaacttaacattcactttgtactttacactcctgctttgtttaacgggctcaattttgagctggttaaaaagaaccaaatttggattgattgactgcaatgccctaattcaagtgaccaagtgacggttctctgatccacatttacaacatcacgacctcttttcggggtcgtgattttttgagtgatggtgcttcgtgaccatgtggatgaataaaatgcttttagcaacggtgattgggccgatttgccttagccagttaatgttttggttaatggtgtttaggattcggcggcaaagataagcatttctcggcaaacaaaaagcattacatggggatttattttgccgttcgcccgattcttcatacctttgcaggaaaaagatgtaatacttgtaataggaactaacccatatctttacaattataatgagaactttgaagtatttcttagggatgttgctattagcttctgtcccgtttacagcaaacgcacagtttgccatgttcggagggggaaaccgcgtaaacatggatagccttcgcaggattacagctgccgattatgccgatatgctggctaaagtcggagtaagtcaaccacgtgaaggtcgccagcccaacagtcaggacgagagtaaacaccccaactatgatgaactgacggcaaacccctaccctttctatccagatccattggtgacggaaagcggcaagaaggtcacgaatgccaagatgtggtataaggtgcgccggccagaaatagtgaaactgtttgaggacaatgtatatggacgtattccagacaatgtgcccagtgtgaaatgggtggtcacgaatgaggagaagaaggattttgcaggaacaccggttgtggttcgttatctgaaaggcgtggtggacaactccagctatccatccatcacggttgagattcaggccaacgtggtttatcccgacaatggcaagcggaacatccccgtcatcatagaattcggattcggaggcggtgaccccacccgtacccatgcaggctcagtgtcctggcagcagatggtgattgagcgcggttgggctgctgccaccatcaacccctcctccatacaggccgatagtggttctggtcttaccaacggcatcatcggtctgtgcaacaaaggccagcaccgccaacctaccgactggggttcactccgtgcatggggctggggattgtcgcgcttcattgattatattgagtccgatgccactttcgatgccaccaagtgcgccattgaaggagtgtcacgttatggcaaggcatcactcgtggctatggcatttgaggagcgcatagcagcaggattcatcgcttcgtcaggcaaagcgggtgcagcaggatggcgtcgtgattgcggtgaaagcatcggcaacatcgtctcaaatgaagagtaccactgggtatgcggtaacctgataaaatatggtacagacccactgacagaaaacgacatacctgttgatcagcatgaactcatagcactctgtgccccacgcgcatgtttcatctccacgggaagctggagtggcgacaaatggcaggatgtggtgggctcattcatatcggcctcaaaagcttcgcccgtatatgagttgcttggctatcaaggcgttggcacagaccttttccctggtatggacaatggtctcatggagggacgtctcacctatcgtcaacatcatggtggtcatgaagctggtcccaactggcctttcttcttagatttctttgagcgcgaagtggtcggtaagtgataagatttactttttcctcaaagatgtggcaaatgtaaggatttttgttgagaaaagacaaacatctccccctttttgtaaggaaaattggagttttatttgtttggtagcaacaaattctgtatctttggcaaaattttcgtacaacttaaaaaaacacatcaaaccatgcttacacaagaagacaaagactttctggcaaagaaaggtatttcggaagagaaactgaacgcgcagttgaattgtttcaagacgggtttcccttggctgaaactggcaggtgcagcttcgcctggcaacggtatcaccattccgtcggaggctgagaagaaggattatctcgcggcttgggacgcttatctggatggcacaggcaaggtactgaagttcgtgcctgcatcgggtgctgcaagccgtatgttcaagaacttgttcgagtttctcgataacggagagaagacggagttcattcagaagtttgaggcaaatctcgacaagtttgcgttcatcgacgacctgaaggctgccatcagcaagaacggaggtgacggcagtgtgaagaccgccatcgccacactgttgggtgacgagggtctgtcatacggaaaactgcccaaaggcttgctgaagttccataaatatgaagacggggcacgtacccctgtggaagagcatctggtggaaggtgccctctatgctggtggcaagaacggcaacgtaagtgttcacttcacggtgagcccagagcatcgccctttgttcgaggcattggtggctaaggtggctccaaagtatgaggagaagtttggtgtgaagtacagcatcagcttctcagaacagaaagcaagtacggacacagtggctgccaatcctgacaatacgccattcagaggcaaagacggcaagattctcttccgcccaggaggtcacggcgcgttgattgaaaacctgaacgacctcgatgccgacgtcatcttcatcaagaacattgacaatgtggtgccagaccgcttgaaggccgagacagtggaatacaaaaaactcatcgcaggtgtgctggtgagcaagcagaagaaagcattcgaatatctcgaactgctcgacagcggcaaatacactcatgcacaactggaggatatcatccgcttcctccgcgatgaactctcctgtcgcaacccagaactgaaggatttggaggatgctgaactcgccatctatctgaagaagaagctgaaccgtccaatgcgcgtatgcggtatggtgaagaatgtgggtgagcctggtggtggtccattcctagcatacaatcaggacggcaccatcagtctgcagattctcgagagcagtcagattgacacgaacaacgctgaatacctgaagatgttccagaacggcacgcacttcaaccccgttgacctcgtgtgcgctgtgaaggactataagggacagaagtttgacctcacgaaatatgtggatcatcaaacgggcttcatctccagcaagagcaaggacggcaaggagctcaaagcacttgaattgccaggactctggaacggtgcgatgagcgactggaacaccatctttgtggaggtatcactcggcacattcaatcctgtgaagacggtgaacgacctgctgagagaacaacaccagtaatcaacatttataattgatttgaatggaaatcattcagaagtatttccccaatttgacagcgcttcaggctgagcaattcgctcaacttgaggtgctttataatgattggaacgccaagatcaatgtgatttcgcgtaaggatatccagaacctctatgagcatcatgtgctacattcgctgggcatcgccaaagtagtgaacttcaaagatggcacaacggtgatggacctcggcacaggtggtggatttcctggcatcccattggctattctatttccaaacgtacagttccatttagtggacagcatcggcaagaaagtgagagtggcgaatgaagtggcaacagctatcggactgaaaaacgtgaagttcagtcatgctcgagctgaagaaatcaaagagcagtatgactttgtggtgacccgagctgtgatgccgatggtagatttgatgaaggtggcaaggaaaaacatcaaaaaggaacaacacaacgctgtacccaacggcatcattgctctgaaaggtggagaactggctggcgagattgcctcgatgaagaatatctgtaccgtatgggaactgagcgactttttcgaggaagaatatttcaagacgaaaaaggtggtgcatgtgacggtgagagtgtagaggtgagaggttatgggttataggttatagaatagagatatgaagatcaagacattcgaagttaacccgttgtgtgagaactgctatgtggtgagcgacgacacgaaagaggctgtcatcatcgattgtggctgttctgacgaacatgaatgggaggacatcaagaaatacatcagcagcgaaggactggaagtgaagcacctgctgaacacgcacctgcacttcgaccatgtgtggggcaacacattcgtgcatagagacctcggcctgaagcctgaagccaactacgaagatctgcacatctatgagcacatggacgaacagattaaatcggtggtgggcgtcggcatccctcatccccccctgcctccactgggtacatccctcttggatggcagcgaagtcacctttggcaacaccacgctgaaagtgctcaccacacctggtcattcacgaggttgcatctgtttctattcggaaaaagacgatgtgctcttctcgggcgacaccctcttctgtggcagttgcggacgtaccgatttggaaggaggcaattaccacgacatcatgctcagtcttcaaaaacttgccaccctacccgaccagaccaaagtcttctgtggacatggtccttccaccacgatagaaagagaaaaacgatacaacctctatctgagaggttgaaaaatctcaataaatttggttattctctcacttagtcgtaactttgtagcgtttttcaacaaagatgagaaaacttctacacattattatatatataagcgtcctgctcttcgcggttcctgcctcagctatgactgaggacggacagtttgtggtggtgcttgatgctggtcatggtggaaaagacccaggatgcattggctcgaagtcatccaaccgtgagaaagacattgcctacaacatcacgatggaagtgggcagactactgaagaacaatcatccagaaattaaggtggtatatacacgttctaccgacgtgttcatcgaattgggacgacgagccgagattgcgaacaaggcaaaagccaaccttttcgtttccatccatgtcaatgcattacccaagaatgccgcgcattatgcttatggtgttcagtcatacaccttgagtcccacatcgacaggcacaaatctggaagtggaaaaacgagagaactcggtcatcgccctcgaaggcgaagccgccaagaaatacaactacaatccatcgcccgaaagtaacatcatgttcgaactgatgcaagaccacgacatgaaagaaagcgttgcctttgcaaaaatggcgcaagacgagatggtacatacgggcggacgcaaggatatgggagtgcgccaagcgaacttagcagtgctgcgccttacctatatgcccagcgtgttgctcgaagtgggattcatctccactcctgcagaagagcagtttctgatgtctaaagccggtcagaacttaatggcaaagagcatctataatgccatcgcaaaatacgcagcacaacaaacaggtaaggccgcaaaactggaaaagccttccgctacgccagtacaacctgcagtcaccgacactcctaacgacaacactaccccatccgcaccaactacaacgaaaggagagaagcgaacggtgtataaggtgcaagtactcgcaggcagtgtcaaactgaaaagcaacgacaagcagttcaaggggttgaagtgtgagatgcatgagaagaatggtcgatacacttacacctacggttcagcaacaaccatggacgaggcgaagaaactgcgccagtccatcctcgataaatttccacaagcattcatcgtgacatttgaagaataatatgaaaatcagtaaagaaatcaaaatcgcatcggtggcaatcctttctgccatcatcgtgtatgtaggcatcatcttcctcaaagggctcaagctcttcaacgatgaggtgtcatatttcgtagagatagccgacgtgcaaggcatgccgaccgcatctgacgtacgtgccaacggactgaaggtaggtactgtgaaagccatcaagttcaatcctgccaagcagaacctgaccgtcgagatcaccatcaatccgaacttccagattccggagggtaccagtgtctatatgaccaaggagatgttgggaagtgccatgatgaacctgaagttgggtcctaaccccacagccatccttcaaccgggtgacaccattcagggtgcgcctttgatagacttgatgactgaggctggcaatatgctgccacaggtggaagccctcttgcctaaagtggattccatactgactgccatgaatcagttggcaaacaaccctgctattgccacttctttgaataacatggaagctgtgtctgccgaccttcgtgtgaccaccacccgactcaacggactgctgggcaacgatgtgccgcaactcatggctaagaccaacaacatctgtagcaatttggagaccacaaccagcaacctgaaccaaatcgacctgattggtatggcacagaaggctgacgcgacgatgaatggtgtgcaggagatgaccttcaagatgaacacagccatgagcagcaaggaaagttcgctcggcatgttgatgaatgacaactccattgcgttgcatatcgactccaccatgcagaactcatcacgtctgttggaggacttccgattgcatccaaaacgatacgtccatttctctctcttcggaaaaaaagacaaataaaaatgagagtgaaagaaacatggaggaaagatgttatttgaattttgttcaaacagcatctttcttcatgaagagccccatggggaatattgaaaacctatcataaacaaataattaaggggtaaaaaaaaataattgtcgctaattgttccatgcgtgaaacaaataggtaacacgctaacaatcaattaaaaagaaaaaatcaatataaatcaagagcatcaagaacttaactttcgtaaatgactgaaatgaagcactttttatcatgcaattggaaacgcg

SEQ ID NO: 1051 - DNA, 24680 bp, synthetic construct
  source 1..24680: mol_type = other DNA
  misc_feature 1..24680: note = Synthetic
ctttttcgatgtcgcccccgaactttgccgcataagcattcattttcaccttctcgctttcctcggtggtgtaagccagatattcgtttaaagaaacctcggttctgtatacctttgatgatattccacccagggaaataaagacttccttgtatttcttctggggatcattggccttgttgaccgacagcacgagcgccttttctttttccgtgagccccagcagttcctgtatctggtcaaatttattctggtacttgctttggtccagcaggatcttgcagtcgctgttattgataatggcctgcttgaccacaggagaagaaataatatcttctacttcctgtgtcaccacaatggcctccccgaagaatttacgaacagtcttaaataaataccgtaaatattccgccattccttccttagctatggctttccaggcctcttcaatgaggatcatctttcggatgcctttgagttttctcatcttgctgataaaaacttccatgataatgattgtcaccaccggaaaaagtataggatgatctttgatgttatcaagttcaaaaacaataaaccgctcttttaaaagattaagattttctgtggcattcagaagataatcaaactcgcctccctggtagtacggacgcagcacgtagagaaaattattgatgtcaaagtctttttctttcaccttgtcgccatccaaaatggatacaaaatcttctttcaaaaactcgtagaaactgttaaagcagggaaagagattggaattgatctccagcttctcataatacagctgcagggcatttgataaggctacatattcacttcggttaaaagtctcatcgtcttttttccacagcgccagcagcagtgttttgatactttcctttttctctgtatccagattgtctccctctgaaatataaaagggattaaaacgaattggtttcttttcatcatacgtgaaataataaccctttaccatatcacagagccccttatagctgtgaccgacatctaccagtacaatatgggttccctgctcgtagtagcttctgaccatatgattggtaaaaaaggacttgccgcttcccgaaggccccagaataaatttgtttctgttggtgcagattcccattttaacaggttcatcgctgatatcaacgtggacaggttttcctgtcagacggtcgccgagtcttatgccgcagggactcagggatgatctgtagcctgtttccatattcagaaaacagaccgcctgctcggtgaaggtatcaaaggtgtcattcataggaaagtccgccgcgtttccagggattcccgcccagtaaatctggggggctcccacagtttcgtgcttcgctgccgcatccatctgcgcaagggcagaggatactttgttttttatatccttaagttcttccttattggtgctccagcataagacattaaaatgagccttaacgggaagcctctgctgggaaacagcttcatttaaaaagtcattcgctgcgtcccttgcaatcatattttccctgctgtaggccgataaagactgaagcctaagtcttttgctttcaagcttttggatggttttctgcgcatcttcaataaacagatactggttataaatgtggctgcaggataagagctggccgagagtagaggcaaagccgacactgaacttggttttatccgtcgaataacggtcaaagttgattctggatccgcataacgccggcagatcagcggcatctcccagagtgaaaagctggcagtgcttgtcgccgactgataaaccttcatcaaatttgatatcattaaaaacaaatgaatcctccctttcagataagaagcagtacttttcgattagcccaatttttctgctctcgcttttaagcgcttggtttttcagtctgtccagcttgacaaaaccgccgtcttccataattctcttgaactgtccgcaggcatcttcaaaatcctcaagaagctgcgggcttagaacatcttcgggaacaatggagcttctgagcagattagaaaaaagggagcttgagctctttcttctctgcggtttcttggtcagcataatataacaggaatgctccagaaaaggtctttcattaaaataacgttcactgcttctggtcaaaaaactgctgtcatcacttgtaaaatcagccttataatgctgctctaaaaaccagtcctgcttgtgaaaaatgcagaactttggaagtatcttgacagctttgatccacgactggtggaaagcttcatattcctgatccgataaagtaaaaatctcaggaagctctgccttgaatactaccgtgatatcaccctgtttggatacaatacagtcatgttccactaccataacaggcagtatgttttcaatccttttctccatttctccttcatttttatttaaaacgttctataactatatcttaatgaaaacagacctgctatacactttaatacattgtggaatctgctttttcgccagtgccttcatcatgccgtactctccgtacttattactcattctgtaaatcttcagcacaagaaagacacctgctgttcctatcaaaccaacacataagagggaaggaaggccgataatgtacagaatggcgaaaaggatcataagggcgacaaccccgccgcctagataccagatgtactgcgcttttaatcccttgaattctatgctttggttgattcccttgttgatctggtaaacgctgctgtgcattgcatctttgcctttaaaccccgaaaaaggatttaattaccgttgccacaacaaccagaaaaacacagctgccgaaccaggctgccgccacttttcccgtatcaggatccccggcattccatttctggtagacttttaccgcgccaataagccccagtatggcacccacggcatacatcagttctgtccccgcatcaaaatagcttctgactttctggtttgcttcattaatccccgcaacaccgtcctgtgcgtagctggttccattaattagtaataacaaaagacatgaagtggccagcactttattctttttccaaatacgctttaaatttcttttacattttctcatcatacatcattttaaagttttgattattataaaaagcagaggaacaccgccgttgcaactctattttcttgtcacataaagccataccgcaccagagagaacagggataattcctccgctgaattttagaaaactcctccttcccacagactgtccgcctcgcttaatgttaaaagcagggccgggtgtttttcagattccaagactatcagtttattgatgctttcacgcagggaagagatcttcacataaggatactcttcgagcaccatcgacaggtagttttgaaactgctcttttgataattttttttcagcaatttcttccactgcttgtgtaattcttgtggcaagctgctcagcatcatccagggtatcgaatgattccgaaaaagaagctgagatcgattttggctcttttgaattttggatgttatttttaaaagtgggaattttaagtttcttttcccctgataccattttctttagatcggtactgtaatatttaagtagtaggaccagataccagattatgaccagtatgcctatgacagtcagataactgctccatggaatattcgtaaacatagtttttcattttatctgttcaacgtatattatctcgaaattcatataggacaaaagctttaaggcagacattctggctcttcggtgaatatttttatcatttgcttcagaaatcagatattctatattacggtcacattcactaaatactgcaatgccttttaaatcgcttatccaaagattctcttcaatgcagtttttggtaaaaaagttttgtaaaactttggattttatctcatcggtgatcctgtctgaatctgcattaaacagtaattcaaaatcattttcaagcagccagtcaattaggtagttgtagagggtttcatcggaaatgagattaagtaaaaaggtaaccacattgtgccatgtcggatgcaccttgcttgttcccgcatcaattttaattatattgataatctcctcgaagttcaaatcagataagatactggcaacaaaatattcctgaatgtttttaaggacaaaactccaattgtctgccatattttcctccagaaaagagtttttagcaaggcttacctcatctgtctgggcggctcttttaatttcacttgcagttataaatggcttctgcatggcttccaatgcaaaagcaatttttttggtgtagcttgtaattcggtctttatcaaagctggtgtcatttctaaatttattcgccttatcatcactcagtcttgagttgacgaactcctgaatcaacagcgccttattggtcaaaacctgcttgtggtttttataatagttcccaattaaatcaagataaaaaggattttctaaaatttccctgtttttatagctgtcaaaagttttttgctgttccagatccagattatatttggttttaagaaattccaatccgctagaagtgctgacctcattcaaaaagaaaatgtttaggtcatttatgttcttaatatattttttgtaaatattagtcctgcagctaatgacaagggagagatttttttctacaaataattctgaattctcacttatgaaatttctcagtttattgctgaagtctactatgttttcaatttcgtcaacaccatcaaaaatgattaccatcctggggatcaatttaaaattttccggaaggaaatcttcaatttgtgaggagaaagtaaaattctttaaggatttaaaaacagggatgatgttgctggtttctctgttattccatatatcaatggctaattgctgcagttctgaagttttgccataacctggattaccaagtaaaataatccccgttttattagcttctatctcagagtgcagggttttctgatttgaaaccggcatgtaatactcatattcttttttttggctttcccttaaacttcttttgatatgatattgatccacttcaattttaccgatatacttgtccttatcagattcatcaatgacgattttctgtaagtttttgtttgagaaaatgaatttgtcaaattggtttaatattacttctctttcttcgtctgttaatattggggcttcactgttaaatgcttttttatagatttcggggtaaagggaaaaatacttttcaacatcggtatccggacttaaaaaagcaaccttaaaatgtgtattggcaagactttccaaaaaaggcctgtttttggtctcctcgaagatattactaaattttcttcttggtgatataaaaagtaccagatcgaccttatcatgagaagatgcaatctgaggtaacttaatcatagcatctgtataattcaattctgatgtgtagtctttacattcactataaatagatttatttatgtatttattatcgacaatttctatcagattgtcgtacccattttgagtacctgataattgaattcttttacgaaccacttcaaactgtaattccttaaaaatcattgatagaaaatccattgccaaaatttctaaatcttctcccttttttgccataaaccaagtttaaatgaattacaaatatagagtatctcttgtcaatagtatgggcatgttgatgtattgatattttgatttgggtgcaaaactgtaattgttctattttttttaatgaagggtgtctgataaagttttcattcgaaacggactaaaagggcagccaagatagtggacgccggatcctgcaggcgcataacggccttgccgcccttcgggacttatagccctccgtatccttaaacgcccacttgattcttgctttctttttttccgttttttcttttgaaaacaattttgcggagcagacgggaagaaacagtaataatataaaacttttaaatcatggaaattacaggacgcttaaccagagatgctgttgttgttaaaacagcaaaagacagacaggttgttaacttctccattgcagttaatgacacttacaaaaccaaggacagtactgaggtaaaaaaaatagtcacttttattgactgctcgtactggctcagtgcaggtatagcccaatggctcaaaaaaggcacaatggtggaactattcggtagaatcggtgtgaacgcctatctcagcggtgagggtaaagccgtaggcagtctcacttttcacaccagtaatattaaaatactgattttcgcatcagacactcagcctgttcagtcggggaatttttctcccaagaaacgtaaaaaagaagaatccgacgatctgcctttttaattcgaatgataaatgtataagcctaaagaaaagagttatgaaagccttagaaaaatcaatgtatgccgattatgatgtgcgctttgagttcaataaaattatcctttccgatttagaatcctatggcggaactaaaaaagaacagcttaaatcttttcttgaagacctgcagaacgggggatgcattagcggtatgatctccgaatttatttatcatgccgattgtaaaaaattctacatccagtatcttgaagatctggaaaacatcagggaagaaatcgaagattcgcttggagaagccgtaaagaacagacaccgcctgcctcactacacttttatgtgctggctgtgtttcgaagaatattgtttcgacatctacagaaacagttttgaataacacttgctgttcaatcttaaatcaacttttatgaaagcttcagacaaatttaaaaccgttatagaaaattatctgagtgaaactgcgcagagcgatatcgtctttgcgcataacttcagtaaagcatccaaaaacttggagagctgtttcaattacatttttgccgaggtaaaaaaatcgggactgtgcgcctttgacgattctgaaatatttgacatggcggtcaaatattataccgatgatagtattgctcagcctcagcccgtacaatgcagggttgtagtaaatcagcctgaaaaagctgatttgtttagctccgcatccgaagttccccaaaacagcatcgctccaaaaacgcaagtgcccgcttataaaaccgcaccaaaaaccttaacactctttgacctatgatacctaaaacaatcatcgaaaagcagattacagcgctgagtgtctcccttaaacctgtaacggaaaaaatacagggcagggcagaaagagaaatttttctgaaatgggctgtgctctcaaggggaaaattccattgtttggaatgtacccatacttggaaacctgatgcgcagaaagcatcctgcaaaaactatatgaactgcacagcttgcaggggaaaactcaaaatacagcagtacaatcaggtgcatttcaaagaaattgagtattgggcagttttgagtgtatgcgcaggatttcaggtggtgcgtattatctgctcgcacaaaaacatgaaaaagaatttcttgccgacttactttcataaggaagtgatgcagcactggataaatccaaaaggggaggtgcgtacactctcgctcggcaccaacgttttttcaaatacctatgatgcctggaaatattactcgccacttgaaatccgtccccgaaattttgaggattctcccaaataccgcattaatccttataaggtttatgcaggagggcaggtgcttgatatcctgaaaagaaatggtttcaaaggaagtttttacaccatagccccgcaggtgctttttacggctcttttgaaagattcttatgcagagacgctccttaaaacaggacagacagatttcctaaagcattatctgctgtcgcacgcgcagtatatcagggagaactggcaggcggttaaaacgtgttttaaaaacagttataaggtgtcagatttttcgctttgggaagattatatctcactgctgagatggttcaaaaaggatttgaataatgccgataatgtatgtcctgaaaacttagctgaacagcatgacaggcttgtcgagcgcaaacgcaggattcagagacgtcttaaaataaaggaactccgctcggaaatccagcaggagcagatattctatgaagagcagaaaaaacagtttttcggactggagttcacaaaggaaaatctcagcattagtgtcatggaaagcgtgcaggattttctcgaagagggcgacgtgctccgccattgcgtatttaccaatgaatactataaaaagaataactcccttatcctttcagctaaatttgaaaacaagcctgtagagaccatagaggtggcacttccatcacttgaaattgtgcagtgtaggggaactaaaaacaaggtttccccgcaccacaaacagatactaaaacttttgaatcagaacctctatcagattaaaaagcggataaaaaataaaaaagcaatccgagccgaaaattagttttcggcttttttttaacataatgttaaattttggtgagcagacacttaaaggttgggatattgtctcaggggttcaggcttaattctaaaacaaagttcgggaaggaaaggcggttcgccgaaaaaaattcccccataaatgcaggtgaaaaaacctgctttattacgttgcttttttcactcgctttctcattcccggccgaggttccataattaatcttaaaacttaagaaatcatggaaacttcaaaaacacttcagaattggaatcaggtagcagaaatcgaacttatctacaaaacaaaagtaaaagcatcagaaagaccttttataaattcttccaaaacggcttaccagctggcactccagtcttggaatcctgatacaatagaatttttcgagcagtttaaaatcatacttttaaaccagtccaataaagtgcttggcatttatgaagtatcttctggaggtatttccgttaccatagttgacctcagactgatatttgcagccgcaattaaagcaaatgccgtatcgctgattatgattcataatcatccctcagcacagattaagccttccgaagcggataaacagatagctagaaaagtctatgaagcaggaagcatacttgatatcaaactactggatcatctgatcattactccggatatttactattcctttgcagatgacggagctttttagctcctacatttttttaataagtggaacgtaggtatttaataaattgacctactaattatttttgtaaagaagctttatctcaaattatgtagagatttcttgatttgctattaaaaggaaacatatctggacatctcaattagttacataaatttacggatacggtaatatttcggataaatagacaggtagtattagtaacaattaattataaataaacattataaatcgtgcagacaatatattttaactctgttatagatgataattttcaacttcagatgttacaatattcataaccagcattattttgcttatcgtaattgtcaaatcgataagccgatcaatagctcatgaatcgacaagcagttttttaagtttctgaatcatatgataagcatctgcaatattcctactgaatctgtcccaggtggtaaatactataacatctactcctttctctaaactccttaagatttgtgaataatttttgccatgctggtctattgaaagtttttagtagaatattcaaaataatttgtagaaaaatattataatgcctaaaataataagtataaaaaaagcgacccttttgaggccgctttgaatgttttcacaacggaataatccttattgtgaattgcttcaaaattgtaatgcaataatacaaaaaaaatcgtgcttgttaattatggttttccgtaaatcagttaattatcttttatttaattttagaaattaattttttagagatgaagaaaatattaggattagatttggggacgaatagtattggatgggcgttaacaaataatgacttcgataatacacttggaagtattgaagggttaggaagcagaataattcctatgagtcaagatgttcttggtaagtttgacagtggcgtttccatttcacaaactgctgaaagaactaaatatagaggggcaagaagattagtgcaacgctttttattaagaagagaacgacttcatcgaattttaaatatccttgattttttaccaaaacattattccgaagcaatagattttgataaaaaatttggacaatttaaacccgaaagagaagaaaaattatctttttataaaaatgaaagtggtaaaaatcaatttttatttttggaaagtcaccaagaaatgttctctgaattcaaattaatacatcctgatttaaaacaagttccctatgattggaccatttattatttaagaaaaaaagctctaacacaaaaaatttctaagcaagaattggcttggatactattgaacttcaatcaaaaaagaggatattatcaattgcgtggggaggaagaagaagtaaacaaaaacaaattagaagaatttcatacccttacagttgttgatgtaattgaaagagaaaaaggtaaatcaggaatctggtataatttaattctggaaaacggttggatttataaacgtgaaagcaaaattgcattatttgactggattggaaaacagaaggattttattgtaacttctgaattgaatgatgatggaactgttaaactcaataaagacaatgaagaaaaaagaagttttagatctccaaaagaaaacgattggggattagtaaaaattagaacagaacaaactataaatcaaagtaaaaaatcagttggttcttttatctatgatgagcttttaaaaaatcctagtcaaaaaataaaaggggaattagtcagaaccattgaaagaaagttttataaaaaggaactatcaaaaattctaaaagtccaaattgaatttcataatgatatttttggcgaaagaaatctttataaaaaatgtattgatgaattgtacagacataatgattctcataaaaataacatcaaagacaaaggatttgactatttatttttagatgatattatcttttatcaacgtccccttaaaagtaagacttcattgattagtgattgtagtttggaatttattccaataaaagataaaaaaggtgttttagtaaaagatgctaacggaaaacaagttgtaaaacctttaaaatgcattgcaaaatcaaatcctatttttcaggaattcagattgttacaatttgtaaaaaatctaaaaatttacaagaaagaaattataaatgaaatcgacgttacggatgattatttaaaaacggaggaaaattgggtagaactatttaattggttaaacgataaagctgaaattagtcaaaaacaatttttggcgtacccaaaattcaaattaaaagaagacaaatttagatggaattttgtagaagacaaaatctatccttgtaacgaaacaagaaatcaatttttgaatgcaatcgcaaaaattgacgtagataaatccttttttgacaataaaaacacccaagatttatggcatattttatattctgttactgataaaattgaaatcacaaaagcaattacaacttttgtcaaacgacataatttgcctaatgaatttataacaaacttttcgaaattaaaaccatataaaaaagattatggctcttattctgaaaaagcgatgaaaaaattattgactttaatgagaagagatgaaacttggaatcaagatgtaatttctgataaagttacagccaaaataagtgctattaaagaaagattggaatctataaattatgacgcatcaattcttgaaaaagtatctgacagcgatattccgaaacaagtcttaaaaagttttataaattgtactgaattcaataaaggtttaaatacctatcaagcatcctatttaatatatgataaacatagcgaagctagtgatgtttcaaaatggaaaacccctgcagatattgaacactttttaaaatatgattttaaacaacattccctgcgtaatccaattgtagagcaagttattacagaaacgttgcgagtagtaaaagatatttggcagcattttggagagggaaaagaaaatttctttaatgaaatccatattgaattggggcgtgaaatgaaaaacaattctgcagatagaaaaagaattaccgaaaatataaatcaaaacgaaaacacaaacttacgaatcaaagccattttaaccgaattgaaaaatgatggcataaatgatgttcgtccttattcaccaagtcagcaagagattttaaaaatttacgaagaaggagtttatagtagtgaaatcagaaaagaaaaattagaggacattgataaaattagaaaaattgcaaaaccaactacttctgaaattatcaaatacaaactgtggttagaacaaggttatatttctccatatactggaaagttaattccattaagtgaactttttacaaccaaatatcaaattgaacatattattccacaatcaagattatttgatgattcgttttcaaataaagttatctgcgaatctgaagttaatgatttgaaaggaaataagactgcattagaattcattctaaaaaatgaagacagaattgtaaccttaactggaggaaaaacagttagaattttcactaaagaagcctatagccaacacatcactagttattacagcaaaaataaaaacaagcaaaaaagattattaagtgaggaaattcctgaaaagtttatcgaaagacaattaaatgacactaaatacatcagtaaaattgtaaagaatcttttgagtaaaattgttagagatgatgatgaacaggaactaacctcaaaacatatcgtttctttgaatggatcaatcacttcaaaaatgaaacaagattggggtttgaatgatgtttggaataacattattacacctcgttttgagcgtttgaatgcgattactaattctagtgattttggtaaattagaactcaaaaaagatgaatttggaaacagtggaaaacaagtttttcaaaccaccgtaccagatgcaattgcaaaagctttttctaaaaaaagaattgaccatcgccatcacgctttagatgctttggtaattgcctgtgtaacaaaagatcacgtcaattatttaaactctatcaattcagaaagaacaaattactcattagtttctaagctacgtagaattgaagaaattcaaattaatggaaaaacacaaaatatcgcaaaagattttcacaaaccttgggataatttcacaaaaaaagcagaagaccaattaaatcaaaccataatcagtttcaagcaaaataccagagttatcaataaaaaggtaaacaaataccaagtttggaaagaagaagatagtacgatgaaaaaagtcattattaaacaaactaaaggaaacaattgggcaattagaaaaccaatgcacgcagaaacggtaagtggtaaagtctttttaaagcgaatcaaacaaagtcatattactattataaatgcaactgatcaagtagaacttattgttgatacagaagttaaaaaacaactgaaagaaaaaatcaagcgacacccaaacaatagtgaaggattaaaaaaacacctcaaagattttcctgtaatggttgatggaaaagttattgacaaagttcaaatttatgaaaatatagaagccacagcaacaagaaaaacacttgatattacctttgatgaaaaaagaattgagaaaattactgatacaggtattcaaaagattctattaaatcatcttcaacaagaaatctatcaaaatgctactgatgaaaatggaaaaaaaatacccgctaatgaagttgctttttctgaaaatggtttggatgaactcaataaaaatattatagcattaaataatggtaaaaaacatcaaccaattaaaaaggttagggtttttgaagaaagcggaagattttctcttggagacacagggaataaaaaagacaaatttgtagaaactgcatcaggaactaatttattctttgctatttataaaggtaatgatgggaaaagaaattacaaaactattccactgaatgaaataattgaaagtcaaaaattaggtgcttttgaaaaactaaaactaaatgaatgttctgttccaaaaaattatatagatgaaaaaactaaagaattatctccactacttttttatttaaatcctaatgatttagtatttgtccctactattgaagaaattgaaaatcctagtcaagtaaacattaaaaactttacaaaagagcaaactgaaagaatatatagatttactgatagtagtgatacgacatgtaatttcattccagctagcacttcaagtttaatatttaatatcaataaaaaagaccaacaaaaaataggattaaattatccaatacaaaatgaatatggattgggaagtcctcaatctaaaaatcaaaatactattaacgctgttcaaattaaatccgtttgttggaagatagaaattaatcgattaggtaaaataataaaaattatcaaatgataaaacgcacccttttcttcggcaatcccgcttatttgagcactaaaaatgagcaaattgtaatctcttatcctgacaaagaacaagagaccaaaaccgtcgctattgaagacataggtgttatcgttttagaaaatcaacaaattacaataaccaacggtttattagaaaaactcactcataacaatgttgctttaatcaattgtgaccaacaacatttaccaattggtttgttaatgcctttaagcggacatacagaacaaagtgagcgtttcaaaaaccagattaatgcttctgttccgctcaaaaagaatttgtggcagcaaaccatcagttctaaaataaccaatcaggcaggactattaaaagaaaagggaatcccaatgcgtaaaatggaattatgggcaaaggaagtaacctctggtgattctttaaaccatgaatctagagccgctgtgtactattggcaaagtcttataaaaatagagaatttcacaagaggacaaaaaggaattcctccaaataatttactcaattacggttatgcgattttgagagctattacagcaagagcattagtaagttcgggaatgcttccaacattaggtatttttcatcgtaataaatataatgcttattgccttgctgatgacatcatggagccttatcggccgtatgttgatttaattgtatgtcatattatggaaacggaagattcatatgacgaattaacaatcgaaataaaaaaacaattattgaatattgcaacaatggatgtgaacattgatggtaaaaacagccctttaatggtggctatgagtagaacaaccaattctttgcatgaatgttttgaaggaagttcgagaagaattttatacccaatttatgtatgatgagcattacacacgtttaaatcaatatagaagtttgtggatattagtattttttgatctgcccaacgaaacgcgcaaagagcgtaaaattgctagtaattttcgtaagagattattagacgatggtttttctatgttccaattttcgatatatatgcgcttctgtgctagtcgggaaaatgccgaggtacatttcaaaagaataaaaaacagcttacctgagcatggaaaaattggtatgatgcaaatcacagataaacaatttggaatgatggaactgttttatggaaaaaaacctgtggaaacagaaaaaccatctcaacagctagaacttttctaaaattaggattgaaaaagaacctaactaactgaacttcaacagtcaaattaatcgattttttaatttcaaaacaaacatataactgccaacatatcaaacgattaactcgcggtatgttgggaattataagtaaaaatacaattttgaaagcaattcacaacgactcctttcaatgcttttaaaatcaccgagttgggaattataagtaaaaatacaattttgaaagcaattcacaacacagacctagcgctgtatttttgtcaagtagttgggaattataagtaaaaatacaattttgaaagcaattcacaacactaacaccctatagatcatgtctgtaaagttgggaattataagtaaaaatacaattttgaaagcaattcacaactcaacagctttaataatcgcattcacattcgttgggaattataagtaaaaatacaattttgaaagcaattcacaacagggaattactccggatggtatcgcgattggttgggaattataagtaaaaatacaattttgaaagcaattcacaactatcgcttacagcatctaaatcgtctttatgttgggaattataagtaaaaatacaattttgaaagcaattcacaactaagcttctgttttgtgttgggtaaaacctgttgggaattataagtaaaaatacaattttgaaagcaattcacaactgtaatgcattcgaacgacaaacataagcagttgggaattataagtaaaaatacaattttgaaagcaattcacaacggattaatactggtaaagtaagaattgatggttgggaattataagtaaaaatacaattttgaaagcaattcacaactaacgtacacttcaaaggaattacgactgagttgggaattataagtaaaaatacaattttgaaagcaattcacaactattttgtccctcattcatttttgccttaagttgggaattataagtaaaaatacaattttgaaagcaattcacaactgagcgtcaacatcagcagaacagtgttctgttgggaattataagtaaaaatacaattttgaaagcaattcacaactcaacagctttaataatcgcattcacattcgttgggaattataagtaaaaatacaattttgaaagcaattcacaacagggaattactccggatggtatcgcgattggttgggaattataagtaaaaatacaattttgaaagcaattcacaactatcgcttacagcatctaaatcgtctttatgttgggaattataagtaaaaatacaattttgaaagcaattcacaactgctctctttctgtaaaaaaatctctgaagttgggaattataagtaaaaatacaattttgaaagcaattcacaactgatttccggcaaagaaaacaaaatgtattgttgggaattataagtaaaaatacaattttgaaagcaattcacaactgaaagataaaggcgttaaaaagactttgggttgggaattataagtaaaaatacaattttgaaagcaattcacaacacagagcaagaagttagagccttatcagttgttgggaattataagtaaaaatacaattttgaaagcaattcacaactgtaatgcattagaacgataaacataagcagttgggaattataagtaaaaatacaattttgaaagcaattcacaacacgtattcctgtgaaggagattgcggtgtagttgggaattataagtaaaaatacaattttgaaagcaattcacaacaacaatcgtaggtttaactgtctcaccatagttgggaattataagtaaaaatacaattttgaaagcaattcacaaccaaggagattgtttaatagaaagtgataaagttgggaattataagtaaaaatacaattttgaaagcaattcacaacaggctctacgcactgggctactagccttaagttgggaattataagtaaaaatacaattttgaaagcaattcacaaccttgtctcttgtcttttctgccaatattaagttgggaattataagtaaaaatacaattttgaactattttattttgacagaaagtaaaattatctctaaaaatcctttttagttttggaaagtaaccaaaatagactttaattcaattaaaagtatatccatattataacctctaaagacagcaatttcattagaaattaaaatagagaatgcaacgaaacttatacccgcatctagtttaagagatcatacttggaaagaattgaaaaaacatctgattaaagaaaatattgtgttgtatgataaagtgggtttttagtaaggaattttttcttgctcataatataaaattaaattttacaagagataaaaaataagagttagagcttcccatttaagtattagggatagtttctttctaactaaaagaacttagtttattcagaaaactaagcctgtcaaataaaatttaaatgattggctttcagaaaagaaatatgttattttgtgaaataaaattattgctttgttccatatttgtaccattgtattgtaatttgctgttaatcagttattgttatttttgaagaagtaaaataatttactcgtagagacgcacagcagtgcgtctttacaattgaatataaaaccgggtcagaaatgactcggtttttttatgcgttaaacgtagagatgcactgctgtgcatctaatcttcatcggttgcaataattgccataccttgcaattcctgaatatcttcccacattttaaatgataacacagtatttttagttaaaattacttcttggtttttatagccaatataagaaagtattattttaattccttcccttgttttgatcgaaaaattgccgtcaaaatcagtttgagttccaattttagttcctttaatatttatactagctcctggtaatggcattccgtattgatcaattacagttcctgaataatttattggttcaggtattttaggtacaattaaatcatttgattcacttatatctatttgttctgtatttacattgttttgagcctttacggtttggtttcctaagcctaaaaaggctattacagaggctgcggcgatcatccaaagtgtttctttttctttaggaacactaatttttctgtttaattgcgaaacattaaatctgccacatagattttcgtctttgttgtaggctaaaagaatttcccgatccgatgcttttgtaaaatcagtcacattttttttgcaattgctgcaaaatcttcctttttcagtaacagtcattttttgccagttttcatgacaaggttctggaattgagatttttattttttgagccatttatgtagcaggtattttttaatagttttaggtttataaatgtagctaattttatattacttcgcacttaggcgagcaaaatgataattgtcatttcgagttcgaattcttttttgtaatattactaatgtaaatttccatgaatgagaaagataaaatataagaaaggacgtaagctccaacacattactttagagtatacaggatcgcataaaaagcatgaatcagaaatgcaattatttgtatataacgacgctgaagttgttgaatatgaaaagtttaatgtcctggctttaaatacatgtatcgattattctaaaaataactggcttaatattcatggattaaatgacattactttaataaaaacaattggtacgcattttaaagtagatgattttttattagccgatattttaaatacgaccaaaagaaccaagttacaggaacaacaggatattttattctttaatataaaatctcttttaccatctgagtattccgataatatcagtgtagagcaaattagttttattcttaaggatggaatattaatttcttttcaggaaaaacgaagtgatttctttacgcatattcgagaaaggctgcgcacgcattccggaatagtaagaaccaaaaaagcagattacttgctgtatttattactggatgctgtaatggaaaacttttatattacgatcgaagatgaggaagataagattgaagagttaatcaacttaaccaaaaaaggagctgatcctattattttggagaaaattgaaaatcaccgtgataattttaattttttaaaacgttctattgttccactccgtgattctttgtattatttaaaaagtattaaagatgatgatacggataatggaatagaaaaggaaacgtttagtttctttatcagattacatcagaaaagtttagaactcttagaacagattgattctgatatgagttccttagaaagtgcttctaatttttatttttcagaacaaagccgaaaaatgaatgaaatcatgaagacgctaaccattatttctgctgtatttattccgctgacttttattgttggagtatatggaatgaattttgaaaacatgccggaattacgatataagtatggctatcatagcgttatgattgcgatgttttttttagtaatcgccctaattatctatttcaaaaaaagacgttggttttaacgtttgtttgagttataaaaaaattgaatttgtataaatataaataattatgagtaaagcaatatatatagccacaagtgattataatagtggaaagtcgatcattacacttggattgatgagtatcttaatgggtaaaactgctaaagttggatattttagacctatagtcgaagattttgtcgatggtgaaatagacaatcacattgagaccgttttgtcacactttaaccttgatatttcgtttgaagatgcgtatgccattaccaaaagcagattaattaagaagaagaataaaggcaagataggggaggttctggatttaattattgaaaaatataaaaaactcgaagaacgttttgattttgttttagtagaaggaacgagttttacaggcgaaggaacttctatcgaattagatttgaatgttttaattgcaaaaaacctcggaattccaactataatcattggttcaggagttggtaaaacgcttgaagaattagtagatagtttgtatttggtttacgattccttcaaagtaaaagaagttgaagttttatctgtttttgcgaataaagtgcagcctgaaaatattgaactggtaactaaaagcctgcagaaaagtttacctgcaaatgtgctggtaaatacaattcctcttatttcgagtttaaataatccgacaatgcaggaaattgtaaatgcactggatgctaaagttttgtttggagaaaactatcttaataatgaaatcgggcattttagcgtaggtgccatgcagttgcacaattacctggttcatttgcataataatgcactggtaattacccccggagatcgttcggatattattttaggggctttacaagctaatgaatcagctaactatcctactatttcaggaattatcttgaccggaaatattgtgcctgaggagagtattttaaagctaatagaagggctttctgctattgtacccattattgcagttgatggtggtacctatcatattacaaacaaaataggttctatcagatcagagatttacgccaataatacccataaaatagaaacatcaatcacaacttttgaaaagtatgttgcggtagaagctttgtctgaaaggctaattacttttgtgccggaaggaatgacaccaaaaatgttccagtacaatatggtaaaaagagccaaacaacatcgcaagcatattgttttaccggaaggatatgacgaacgaattattatggcagcatcaagattgttagatatggatgttgttgatatttctattattggtgataaaaaattcattgaaaataaagttacggaacttggaattacttttgatttttcgaaagtgaatattattaatccaaaagaatcagagctttatgaggactatgccaatacatattatgaacttagaaaagcaaagaatgtaagtattacaatggcaagagatttaatggaagacgtttcgtatttcggtaccatgatggtgtacaaagggcatgctgacggaatggtgtcaggagcggcacatactacgcagcatacgattttaccagcgttacaatttattaaaacaaaaccaaactcatctgtagtatcttctgtgtttttcatgtgtttagaggatcgcgtttctgtttttggtgattgtgccattaatcctaatccaacagcagagcagttagcggagatcgctatttcttctgccgaatccagttttgcctttggaatagaaccaaaaattgccatgctttcttattcatcaggagcatccggaaaaggagatgaagtagacaaagtacgttctgctacagaaattgtaaaacaaaaaagaccggatttaaaaatcgaagggccaattcagtacgatgccgcagtagatcgtgctgttggaaaaagtaaaatgccggattcagaagtagcagggcaggcgagtgtacttatttttccggatttaaataccggaaacaacacgtacaaagccgttcagagagaaaccggagctttggctattggaccaatgttacaaggcttaaacaagcccgtaaatgacttaagccgtggttgtactgtagacgatataatcaatacagttgtaattacagcgattcaggcacaaggcctttgatcaattaaaaattgagaattaaaaattaaaaatctgaactttaggacaaaataggctcagcaacttagttacttagtgccttagcggctaaaataaaatattatataaatgaaaatattaattataaactcaggaagttcttcaatcaaatatcaactaatggttatgccaacaaacgaagtgatttgtaccggtatgatcgacagaattggtttagaaacttcaaatgttacatttaaaacagcagtagattcaatagatgaaataattccgattgacagtcataaaacaggtttgcagaaagtggctgaaatgcttttagatcctgaaaaaggagtaataaaatcgacttcagaaattcaggctgttggacaccgtgtggtgcatggtggaagctatttttctgacactaccattattacagaagaagttaaagataaaatcaaagaactttcagaattagcaccgctgcataatccggcacatttagttggaataaacgtagcagaagaaattttttcaggagcaaaacaagtagcggtttttgacacagcttttcaccagacaattccggttgaagcgcacaaatatgcgattccaaatttccttttaacggagcataaagttcgtgtgtatggttttcatggaacaagtcataagtatgtttcagaaaaagcaattaattttttagagaaacattctaaaattattaccattcacttaggaaacggttgtagtatgaccgctgtaaaagacggaaaaagtatcgatacgacaatgggattctcgccggcaaatggtttgattatgggaacccgtgcaggtgatatcgatcagtcagtaattttttacatggttaaaaatttaggttacagtgctgaagaagtaaattctatattattgaaacaaagcggaatgcttggtttgactggttacagcgatttacgtgatattgaatctaaagcgcaggaaggaaataaagattgtgaattggctttgctaatgaacgcgtacagaatcagaaaaacgattggtgcttatgcagcagctttaaacggactggatgcgatagtgttcacagctggaattggagaaaactcttcctttatgcgtaatttaatttgtaccgatatggatttcttcggaattgaaattgacaaagaaaagaaccaaattcgttctaaagaaattagagaaatcaatacggcaaattcgactgtaaaagttttagttgcaccaactgatgaagaatacgaaatagccaatcaggtttatcttttacttcagaattaaaaaaatactttttatatagaaagctcctctctgcaggagctttttttatgttcctaatttcaatatttgtgagtatatttgaagataaatcagaatattttgagatcgatacttataaaattactcttctttttcttcatagcgacatcattacaagcacaagaattacttcctttcgtagaaaattacaataaatcagattatcagggagataatcaaatttggaatgtagcacagggaaaagataatgcgatgtattttgccaacaatcattatttgttgcgatacgatggtgtgatatgggaaaaatatacattgcctaataaaacaattattcgttctattttggtagaaggagacagaatttattctggttcttataaagaatttggctactggtatcgaaaagacggtaaaatgaaatacgtttcgattaccaaaaaattacgtttgtttgctgaaaaggacaatgaggaaatctggaaaattttcaggtataaaaatgccttatactttcaatcttttaatgatgttttcatttatgatggaaaacacattcagaaaataaaatttccatttttgatatcctattgctttgttgctaatgatagtgtctacgtagcttctgtagaaaaaggtgtttttaaaatggatggttcacaaatcgaaaatccaaaaggctggaatgttctaaaaaacacagtcgtacacgctattgaagaatatcaaaacaagatgtatatcttcactcagaaaaaaggaatttttgttgatgataaa

SEQ ID NO: 1052 - DNA, 24671 bp, synthetic construct
  misc_feature 1..24671: note = Synthetic
  source 1..24671: mol_type = other DNA
tgtgctaagaaggcttgtactccgtcgccatcttttgcgcacttatcccacgatggtttgatgatctcctcggttaggatttttggtaacattactttacgagagaattcgaatgcctctaatgctgagacgttgacctcttttaaaggaggtcgcttacatgtcatcatatgtgccatgatatttgaattttgtggtgctgttgcaccggttaatgtcgttggtacagggttgaaaggggaaccagggcaaagggcatagtgcatggggcaaagagcatagggcatagggcaaagagcatagggcatagggcaaagagatgggagctggtagaatggtaaagggttgaaaggtaaacggttgaaaggtaaaacggtaacgttgcgatgggtactgcatggatgcagttggagactggaaaatggaaaagggaacaaggattcgcttcgaagggagttggagatatggaatactggccaaggacacctttcagcgtctgtaagacctgtaagcgaaacaatgatggtgaaagaggaacggttgtaaggtaaacggttgaaaggtggaatggtgacgttgcctggggtactgcatggatgcagttggagactggaaaatggaaaagggaacaaggattcgctgcgctctgtgttagccgaagtttggtgctttggtgtatatagtatggaagctaaggtatagcaaaatactgcttcgatgattagtacaaggaagaataatagtaatatttttggtaatgcttgagggtacattgtttctgatgctgtgataaatagttggtaaaaacctgaatattttggtcaattaattagttgtttagaacatcgccaccgcgaattaacagtctacgacaaaaccacttcggtatggaaactttctgagaagcgatcaagcttaggactggcaaagaatgcatatacatgcactgtcatgcctggttcgtaaggtaacatgatacttgcttcctcatctttacggtaggcttctaaggtggtcatcatacaccagtcgccttttccatcggtaaggatcaacatcaattgatcatcttctcgcttcttccctgacaattgtgaagtactccaactcacatcaattgttttgggagtatctggattatcagcaattttcatgttgaaaggaattggtaaagtaccaacagtcaacttcaacaatgaccaatcaccaacattgccatcatcgccaaatgcctgcatgttcacttgagtaaacaagtttgatggagtcatctgaacggctttatgcttccaaattggattaattacttcctcgcgtagtaaactacacattccaagaattccactgaatctatttctctggttaacttgaggttcggtatgcgcatcatgataatgatcggccttgattctaaaataatcaatacctttccatgacgatccgacaagatttcccacggttccggatacacctccaaatgcgccttgagctatttttcccatgacatctaaaatttaaaagtttataaattgatttactttgatctcactgccagcaaatacaattcactgtagtacagtagatctgacaattacgatttatcgcgtttatgacgcttgctcttcttctctaacttagatttgagccacgccaccacgacagtagatagtatccctcctaccaaactcactagtgcttccacactatcgataatagaagaagggagggttgatgcggtatcaatattactgatgcctgcattgacccctaaagttgacatcgttccaataagaaagttcccaatattcttcataatacattgatttaaagattactggatcctcagacgagaagaccaacaggcataacgcctgggggtccagatgataacttaatttccagaaatttagacacgacgggttaggacataaagtatatgccaaacacagtactactaaaattctgattactcgacttccacgatggtagaaccacaacagtgcatttgtcgcctgtgttctgcgaactaattttgacctgctatccaggctttaccaacatgtccatcacagtaactggaatcggccgattctctgctgtgagataaaatttgagattcaactctcgtttttcgagtcgagagcttccctttgcatcgtcaacttaaacgattgctcttttgtaaaccaccatccgtcgcctcattgattgagatcaaaaaatcacgttgataacattacattatcaccatgaccattttccaggcattgaaaatttgaagtgatcattcaatcaacttctcctcaaaggtggataacttacagtttgcatttctgctataaagaacgcttgtttcagttgtgagatgcatcgttatcagaacctcacgatgcaagtttaaaacaaatttgtcatttctcaaagtcggggtaagtgaccggtaagtgccatgaggtgcaaaaaagtggcacagatagcaaaattgtgaaaaaagtgcacgatttttcgatttatgaagcccaaaaaaaagtttaattttttttattttttttcccagcaccccattttgaggtcatttttacacgctaatttcatgacaaatatcatataaataaattatcagacaccaatcaagggctcctaaatcttttgtcaatctcatgtcaaacttttctcaaacttttgtcaaactcttaccaaagccttactttctactactcaacattagagaatacggggttttgataagggaaagtaaggggttagtaaggaagagtaggagaattgcaatctagagatagcaattttgatatcgtgattttaagatggcaatctggagacaataatttagggtagccaggggtaaaatactgtttcattttattatgaaaaattataaatttgcggggcgaaagcagagcaataacagggggacgatttccatcatcaatagcaagctcgttatacacttatcctagcctgatcatccgcacggcgattgacggttcatcaatctttagtccaaaatcaattttaaactaatcatctgtttcggcagaacaaatttaaatcgattaactatggacacaacgaaaaatgcagagacgaagcaacaaaagaaaatgatgaaagctaaattacctgctatttatgaagccattacctctccacactttacgattgtggttgatgaagaagactattgtttggtaaccctcaatggcaaaaaaccgaacacatctatcatcacaaaattaaatgaggagataaaaggattcactaaaagggcaacacctaccaataatatcatcaagaaggaacatgagcttatctacgcattcctgctgaatcacagaagaaggacaaagaacaacgaagcgcacatccctgccaagtttcgcctctataataacaaaggtaaacgagtatacctgatcaaccagtcggagcacgtaaaggaggagattgagggctttttcaacacctttttcagtcaggttgagctaatactagccaagataaaatcaattgctaaatggatcgaagaagttcagcagaagattgcggaagaggttccggaagaggttatgaaaaagattaagaaagaggttacggaagagattaaggacgcgattaaagaagaagtatcggaagacgtaaaatttaaaaaaggagaatgccatcgcgatattgtggcctatggtttagggctgtttttcacaaaggcgataatattgcaaaaagtttctccaagggaacagtccattcctacaaagttcatcaaaaaactgttaaaacgtttaggactaaaagcaataccttcagtttcgagtataatcacacaactacaagaacgccctattgatgaatgtgctctttggcttggcgaactttatattctttttcatcaccatttccctaagggaaaggactttgcagagaaaaaaaagagagatatagctaaaaaagccgacatcgaattacaatcagttgtgctgttcgtttatgaggtaatagatgattttataagaatagtaaacagttataaagccatttacccacagaccctattcccctggatgaagaataagtaccgctttgaccattatttacatgaaaatagctcacactctattattaaaagtgtgttggctcaaagagagttggaaattagctaaaaaaccgtcaaaaaaaacagttacagctcagcttctgtataatcgactgatactcaatggtgcggttttttgataaaactatatcaatctgctgcacccattgattttacaggcattacagaagattggctgaattcacacctaagctaaggattttgtcctcgccagcggaaagtagtattttcgtaccggatttaagacagtgagtctgtcaattaccatcggttggttgaagggcattttagatgatggaaaagtccccctgatactaatcgtaaaaataataacgcaacagctgcgattaatgtgttaaagcatttttgtagcaactgctgtgattttgtaaaattatataaaaatttgattatgaaatcatttgaaaagcaaacaaatgaagagattattgctgacctaattaaaaggcaagcaatattagaagagaaacaaactgagcttgagaaggagaaagctgaaatgaaagctcagctggttgtgttagtagaacagcagatagtttgtagcgattacatcaagcaccagaaggatcaggagaataaagaaagttttactgactttatctcaaattacgcaattgctgatcaattaaagatcagagttaccgccgcagaaagggcatgcaaattgctaggcataccttgcactaaatttgccagtgtgttattatacgaaaagagtctattgattgaaagaataaaagaagaagcaagtaggggtgtttagggacgcaaaggattggggagttgtacttaccaaacgaacaggaataccaccactaactcccctctccttgctttaaaaaaggattcatctttttgttctgttcgccattagatgggcaaatggcggtagcaattggatgaaatattcctttccctatgaacttgaatactataacagcaagacgatattcaacattttccaggcactaatattacgaacgattaaatgttgagaaatgtacattaaagatcatcgattacaaggcgactgtattacgcaatatgcgtgcccgaaaaacacgcagaaaattcgtaagcatattgcattagtactacattatacggccaataacaacgctctaaaggccgttaaatacctcacattgcctggcgtaaatgcatctgcccatgttattatcggaagaaatggtgaagtataccaaacggtgccgttcaatattgaggcctggcatgcaggcaagagcgagctcgacaatttacatgaattaaaccacttttccattggaatagagctagttaaccagggcaaattaatcttcgaaaataaccgttattacaattggcataataaagtggttgattcgaaagatgtgtttataaaagaagatccgaataccggtcatcgtagtttttggcatcgctacactcctgttcagttagctatggcaaaagaagttacatggcagattacgaatcactatcacatcagtaaagtagttggacattcagagataagtcccgacagaaagttggatccgggcgaggcatttccaatggatcaattcaagcaactggtttataaacaaaacattaatcgtaaagctggtcgttaataaaatataaccgaaagatgtgccactatttagcttagcgttcgtttttaatttttttacagcacttcaggtaacagcgtaaactaaggcacatctttcgaaaaaaactcagcctcgattttggttgttaggttgccaaaatcagctgaatttccttttcatcgcaatgtcgcaagacttgcatctgtgtttttaatctttaagggccttctccggaaggctctttttgggttatcgaggaatacttaaattactctacgactactgtgattttatatttcttattgataattttgtaggtgatttaccaatcaacttcctttatgcaagataaaacgacaacacattacgataccaatcaatcaattactgtagcgatacaagaatatcagcgttcgcacgacatgactaatacattggaacagcgctggatatcaaaatatcttttacttgtggattttaaacgacaacatggacatgctgatgtacctgctcgctataagaatctaaaaactattggatattgggtacgccgacaaagattggttcataccaaaggaaagttagatccaggaagggaaagtcttctaaaattaataggttttaactttcgactattggatatgcacgactggaataagatgtatgcaaagctcaatgattttaaagtcaaatttggacatgcacacattactgaaagttgtgaagatactcaactacataactggttggtttatcagcgtaaattgtattggaaaggcaaattggagtattccaaaatcgagcgactcaaaaatcttggtgtcgacatgaggaataaaacgctgaattactgggaaaataaatatgccgaattggttgagtttaaagaagaacatgggcatctttatgtagcgggattttatggggcgaatgaacaattattgaatttcgtaaaggtacagcgccgaaatcaagataccatgtcgcccgaacgcaagcgtttactcaatgatattggctttatctgggatcctaaaaaaactacaagtacccgcatcaataaggaacgtggataccaacactggtttactcgctttgatgaattgaaagcttacaaagaagagtacggaacaagttttgtttcaacactcagtaaaacccatagctcattaggtaaatggatcgctgcacaaaaatggaagcataaagaattatctcaagagcagattgcattgttagaggaggtggatttttttaaagataatgggattgagtagcaacgaagaatgttttgaccaatcctaagactgcagtaaaaaatttactttgaccttttatttataatcattctaagaataaaatgattgattttgagtgttaattcgatcatttcaccgttgccattagtgaattacgattaataaaatcgcctatcgttcttaaacgaaatgaattggaaggtaattttctgcaatcctatttcacttcatactaccctgaaatacaaatctttgtcgcaagtaggttgtgcctacttacaacaaagatacaatctgaaagcaaatcacaaccctggtgcgcatggataagaagtacaccgcgttgtgcctacttacaacaaagatacaatctgaaagcaaatcacaacattgtatcttcactattcatttaattacttgttgtgcctacttacaacaaagatacaatctgaaagcaaatcacaactggtgtttgcagatgtagacatcgaggagggttgtgcctacttacaacaaagatacaatctgaaagcaaatcacaaccacgtggctatcaatccaccagatgacaaagttgtgcctacttacaacaaagatacaatctgaaagcaaatcacaacatgataaggccacactagaggataaatttagttgtgcctacttacaacaaagatacaatctgaaagcaaatcacaacaagctggttacgctgatgccgatatccccagttgtgcctacttacaacaaagatacaatctgaaagcaaatcacaacggcctctcctatctgtgttgcatattgagcgttgtgcctacttacaacaaagatacaatctgaaagcaaatcacaaccggtacaaacagcactttcaaattgcattagttgtgcctacttacaacaaagatacaatctgaaagcaaatcacaacaagaaggtttaacatgatttcatccaataagttgtgcctacttacaacaaagatacaatctgaaagcaaatcacaacatgttgaagatgaatgcagtatcgaaaaaagttgtgcctacttacaacaaagatacaatctgaaagcaaatcacaaccaagagaactattatttgtgaattgaaaagttgtgcctacttacaacaaagatacaatctgaaagcaaatcacaacgagggcgcatatggatattgaactcttctagttgtgcctacttacaacaaagatacaatctgaaagcaaatcacaactacctgacataaatgccgccttaaattcgtgttgtgcctacttacaacaaagatacaatctgaaagcaaatcacaactctttagtccacggaatattacctatattagttgtgcctacttacaacaaagatacaatctgaaagcaaatcacaacagtgttttcaagttagttgaaaaacgttatgttgtgcctacttacaacaaagatacaatctgaaagcaaatcacaacgtgtggttggtaccagacatgcaaggtaagttgtgcctacttacaacaaagatacaatctgaaagcaaatcacaaccacaaccaccaagaaaataaacgcgtttacgttgtgcctacttacaacaaagatacaatctgaaagcaaatcacaacacacgtgatggagtgaatggtattgatccagttgtgcctacttacaacaaagatacaatctgaaagcaaatcacaacgaaatccacatcaccatgctcagactcggtgttgtgcctacttacaacaaagatacaatctgaaagcaaatcacaacattctccaacgcctcacgcgcctccatttcgttgtgcctacttacaacaaagatacaatctgaaagcaaatcacaacggtccttacatggattgcccctaaaatcttgttgtgcctacttacaacaaagatacaatctgaaagcaaatcacaacactggattcaactggagcactcttagcagagttgtgcctacttacaacaaagatacaatctgaaagcaaatcacaacaatgtctaacggcatataaaaattgaatttgttgtgcctacttacaacaaagatacaatctgaaagcaaatcacaactcaaatgttgatataacttcagtgaatgatgttgtgcctacttacaacaaagatacaatctgaaagcaaatcacaactcaaatgttgatataacttcagtgaatgatgttgtgcctacttacaacaaagatacaatctgaaagcaaatcacaacactggattcaactggagcactcttagcagagttgtgcctacttacaacaaagatacaatctgaaagcaaatcacaacaaggaggataagaggcattttaagacactgttgtgcctacttacaacaaagatacaatctgaaagcaaatcacaacaggaagaccctatgtatttttctgaaataggttgtgcctacttacaacaaagatacaatctgaaagcaaatcacaactcatcctggcaaataacgaagcaagcgagggttgtgcctacttacaacaaagatacaatctgaaagcaaatcacaacacaccaatcctgaatgttttacctcaaaatgttgtgcctacttacaacaaagatacttctcgctgttccctaacattattactttagtttgaatatatcatagaaattatcaacattattttacggttttaattattctaaatataccaatgtcatatcggcaacgataataatccaactaagcaatcctattttcaagtatatagaagtatttatgtattattcgatattagttcccctaaataaaacttattcaaatttatatggtaatctaacaaaattatccataaattagaggatctcttctactgtttagtagaagagataaaaaaagcgactaaaaaagccgctttaaatgttttcacaacggaataatccttattgtgattttctttcagattgtataacaaagatataaatgaatatataaaatacaacctttcgcatgaaaaaagttttaggactggatttaggaaccaattctattggttgggctttaattgaacatgattttgacacaaagcaaggaaaaataattgatcttggagttagaataattccaatgtctaaagaagctctcgataagtttggttcgggacaatcaatatcacaaacagcagaacgcactagacatagaggtacccggagactatatgaaaggcaccatcaaagaagagaacggcttcatcgagtcctacacattatcaaattcctcccccaacactatgacaatgctatagattttaaaaagcgtttaggtcaatttaaaagtggaattgaagttaaactaaactataagaaaggtcgtcaaggtaagtatgaattcctatttatggattcctacatagaaatgttagacgagtttaaaaacaatggaattcagaacaatgttccgtatgactggacattatattatcttcgaaaaaaagccttgactgaaaaaatacgtaaagaggaacttgcatggatcctacttaattttaacaagaaaagaggatatcaccaaatgcgaggagaagttaacacttctgatcaaaacaaacttgaggagtattactgtttaaaagtaacagatgttcaatcaactgatgaaacaaataccaaaggtacatggtataatgttattttagaaaatggcttaatttataaaagacaaagcaaagaatcgctacaaaactggattggaaaaactaaagagttcatcatcactacaacacttaataaggatggcactccccaaatggataagaatcaacagatcaaaagatcttttcgcgctgttaactcaaaagaagattggatagctataaaaaagaaaacagagagtgatattgtttcttgtcaaaaaaccattggtgaatatatttatgataccttacttgaaaaaccagctcaaaaaatcaatggtcgtcttataacaacggttgatcgtgaatactatgaacaagagcttgtatcaattctaaaaacgcaattgaaattccatcctgaacttcaaagtaaactgttatacactgaatgtataaatgaattatatacccacaacaccaaacaccgcaataacattaagaacaaagactttatctttcttctagttaaagatattttattttaccaacgccctctaaaaagtaaaaaatcaacaatagcaaattgtccttatgaagaacgatctttcataaaagatggaaagaaagagacacagcacataaaatgtatctctaaatcgaatccatatttccaagaatttcgtctttggcaatttattcagaatctaaaaatacttaaaagaacaaagcaaactgataaacaaaccttagttaatgcagatataacaccgaactatctaacctcagagaatgatattgtaaatctttttgattttctaaatgatcgaaaagatatagatcaaaaaacattgcttaagttttacaaattaacacctaaagattatcggtggaactaccctgaggacaaaaaaatagcatgcaacgagacaagatccatgtttttgaatcgttttaaaaaggtaaagccatctggttctgatattactttgaccaaagatatggaaatgcatctttggcatattatttattcaattaccaatcaaaaagaatttgagtccgcattaactaaattcgctttaaaaaataatatagataaactccaattcgtggatgcctttaacaatgtgccacccttgaaaggagaatacgcctcatactctgaaaaagcaataaaaaggctacttccattaatgagaataggaaaatactgggctaaagaaaatatagatcctagaacaagatcaaatataaacaacatactccagagactaaaaacaatcagtttctccgaacaaaaaatcaatgaagtttcagacgatgaaattaatagcagatcattaaagaacctaatcgacttaagctctattgaagactataagggattgcgcgtgcatcaggcttgttactcaatttatggtagatattccgaaataggacaaatagcaaaatgggaatctcccaaagcaatacaaatgtttcttgataaatttaagcaacatagtcttcgcaatccgattgtagaacaaatagttactgaaacattaagagttgtaaaggaaatttgggaatgctatggaaatggagaaaagaatttctttgatgaaatccatgttgagctaggaagagaaatgaaaaactccaaagaaaaaaggagtagaatatctcaactcaacaataacaatgaaattacaaatcaaagaattaaagcattactaaaagaattaaaagaagacccagaagtaacggatgaagtccgtccattttccaatagtcaacaagaaaaactaaaaatttacgaagaaggggtatggagtaatccgagcctgaaattcaaaaataataaagaacaagaagaaatattaaaaatcaagcgcaactcaacacccacaaggaaagaactagagaaatataaattgtggttacaacagggctatttctctccctatacgggaaagcctatttcgctgagcaagttattttcagaaaaatatcaaattgagcatattattcctcaatcgagatattttgataattcgttacagaacaaggtaatttgtgaaagtgctgtaaatgcaattaaagataataagaccgcatatgaattcatcgaaaattaccaaaatcaaaaaattgatatcggaggaggagaaacagtaacaattcttagccttaattcatatgttgatctatgtaaaagaaatttcagcactctacccaaaaaactcaaccatcttttgagtaaagatacacctgaaggcttcattaatagacaactaaatgacagtcgatacatcagtaaatatattaagtccttactaggcaatattgtcagagaagataatgagttagaagcaacagccaaaaagcttatccctatcactggagctattactgctgttatgagagaggattggggattaaataataaatggaatgatataattgcacatcgtttcaaaagattaaataaactaaggaagacacatgattttggctatcaagataaccagtttttccggacaaccatcccagatgaactttctaaaggattctctaaaaaaaggattgaccatcgccatcatgcattagatgctttagttgtggcatgtattagccctctgcacattaactatattagtgctctaagcaatggaagtagaaatttcactattgaggaaaaactgagaaagaaggaaaaagtttgttataataatcctattacgggagaacctaaaaataatacaatagccaaagaatatcttttgccttggaaaagttttccgattgatgcaaagaatcagttagataaaattattgtaagcttcaaacaaaacctccgcactattaataaatcaactaattcgtattggagttataaggatgaagatgggaatcttagattcgggaaaaatggtattccccaaaaagataaagtaaaacaaacaaaaggtgacaattgggctattagaaaatctttacatgctgatacgtgtcatggagctgtccaaataaagcgagagaaaaagaataaagtaaaactagaatcttgcttagcaaattgggaacttataatagacatgaagattaagtcaaaagtgaaatcattactcagtatcttcgataatgatattcattcaattaaaaaacatctaaaaaagcacccattaattatcaacaatcaggttattcaagaagtaagagtgtatgaattacttgatcctaaaacaactactgcgacaagagttgagcttggagagaactttacaaagaaaaatcttgaatccataacggattcttctataaaggcaattctgcaaaatcatttagagaattacaaagattctaaaggtagtcctaatttcaagttggctttcaattctgatggaattgattctttaaataagaacataaaacaacttaataacgggaagtttcatcatcctatctataaagtacgaatctatgaaacaggtaaaaagttccctatcggtgagtcaattgtaaagagtaagaaatatgtagaggcagcaaaaggcacaaaccttttctttgcgatctactggaatgaagaacttcaaaaaaggatctatgaaactgttccattaaacgaagtaattgcccaccaaaaacaaacggctcattacccagcaggcgaaaagacacctattgccataaagcatgatatgggacagtttcttttcaccatttcacccaatgatttggtttacgtaccatcagattgtgaaatagataatccagactctgttgactttgcaaatctttcaaaagaacaaataagaagaatatacaaaatggtgaaagcatcaaaaaacgaatgttactttatccgttttgacatagcctcgttaatacatccttacagtgcaacaaaaaaatttggagaacttggaagtcaaaataaattacaaacaacaatgtgccctgactcagttaaaattgtagatcgctgctggaaattaaatgttaatcgactggggaaaattgtttcaataaaaaaacaacatacaataaaacaatacaattaacaccaattgcctatgataaagcgcacagtatattttggtaatcctgcttacctgagttacaaaaataaacaactggtagttgatcgcccgggagaagaaaccaaccgggcgaccatctctgttgaagatattgctgtggtggttctcgataatagccagattacgatgactcatcgacttctacaggcacttcaggataatcttgctgtggtaattagttgtgaccaacaacacttgcctgcgtctatcatgctccctataaatgggcatcatgtaatgtcggaacgcatgcgaaagcaaattgatattagtttgcctttgaagcgtcagctatggaagcaaacaattgaagccaagctacgcaatcaggctgcattacttgaacgactgggaaaggacgccgacagaatgcattggcttattgataaaatcgatcccggtgatccaaagaatgtggaaggtcgtgctgcagcatattactggaaagaattattgggtaatgattttgtacgcgatcggtttggagaacctcctaatgctttgctcaattatgcttatgcaattattcgtgcaataatagcgagggcattggtaagtagtggcatgcatcctgcattcgggatttttcattccaacaaatacaacatgtactgtctggccgacgatatcatggaaccatatcgcccttatgccgacgaacttatctacgatttatatatcagtgggaaagccttaagcgaagagcttacacctgaattgaaacgacatatattgaagcttatcagtagtgatgtttatatcgataaacgaaaaagtcccttaatggtcgctacaagtcgaacgaccaactctctgtttgaatgctacgaaggaatcaggagaaaattgttatatcccatattccatgaaacatgatgcactaaatcaatatagaaccatgtggataatggtattttttgatttacccaccgatagcaagcgccaacgaaaggctgcagctaagttccgtaaagaattaattaacgatggttttaccatgttccagttttcaatttatttacgacactgtcctagtcgtgaaaacgccgaagtgcatattaaacgggtgaaaatggctctcccccaatatggtcatattggcatactaaaggttacagacaagcaatttgggaatatggaactcttccaggcacagaaggaaaaagaaaaacctcctgtagcgcagcaattggagatgttctagatgaaatgcccctccccgttcaccattgttgttaaatcagcacttgacttaacagactcgacaatgaagaaagattttgtgttaggaacaagtcgtttggaatcatgataccccacgactcgctaatgcttcgtcgtgggtataccaattctctttatttctctacttcaactctaattcctgccattcgcctttgggaaggttcatttttacaagccgtccgtttacttctatttcagctgttgcattggtattagatttaatactcaatgcaaccacctgtttattttcccatttaaagtttaattcgtaaccgccacgggcttttaatcctttcacctcaccagcgtcccacgcattgggtaatgctggtaaaatctcgataatcccttcatgcgattgaattagcatttcggccataccagctaaacctcccatatttccgtctaattgaaatggagggtgagtggtaaataggttattattacttcctcccctatttataaaagttcctaactcctttaacttaaatggacttataagttcttttaacatactataggcgtgatttccatcttttaatcttgcccagaagtttattttccatcccatcgaccaacctgttcctccatcacctctggcagttaatgaaatcctggcagcttcagccaatttgggtgtttgactcactgtaatctgattacctggatgcaatgcaaataagtgggatacatgcctgtgctgattttgaggatcatctacatcttctttccactcttgtaattgcccccactttccaatcatcggcgcacatattttatcacgagtggtctttgctattgccttgaattcatcatcggttccaagaacatcacatgctttaacacagttattcagaagatcccaggccatttgatgatccatagatgcacctgttgagataccaccatgctctggtgaataggaaggacatgaaaccagttggccatcttcatcctcaataaggtaatcgacccaaaaaagtgcagcctctttcataattggataagccctgttttttagaaacactttatcctgggtaaactcatagtgttcccaaaagtgctgacacaaccacgcagctcctcccgggaaatagccccatgggaatttccatcctggcgcagtaaacccaaatggattgttcatcgtactaaccgtccaccctctggtattgaaaaactcctttgttgatagctgaccaggaacaacaagactttcagtataatccaataaaggcatatgacattcgctcaggttggtaacttcagcaggccaataaagcatttgctgattgatgttcatgtggtaatcggctgcccaaactggatttgttgaatcattccattttccctgaaggttcaacggcatagtacctggtcgcgatcctgcaattaacaaatatcggttatattggaaaaacaatgtttcaagctcaagatcatttccagttttgaagtactgtaaaagcctctggtcggttgggatagtatctcgacctgtaggctcacctaattgaagagatacacggttaaacaactgactgtaatcactcacatgttctttgtgaagttcttccaaagaacggtcctcaatggcctttaacaccttgtcgtttgccgccatataatcattccctgaatatttagggaactcatttttataatcagttgcacaaacctgataaattaccagtttgttgcttccttttaccgaaagtattccattcttaaaatcagatgttccttttccagcatggattttgagacggtattcaaagcccatattattaccggagactttgcccttatacgaataaactccattattaaatgcctcaacggttttattgtgaggcgatcggaattcgatctgataatcagttccctttggatcagtgctttcaagttcatagactataactttcgatgggtagttggcaaaatacgtcctttgatattccacccctccagctttgtagcgcacacgtgccgttgcatctgaaatattcaattctctggtatacccttctatattgccatggttctcaaccgttacaaaaaggtcgcccattgtttgctgagcaccataatctccaaagtgcatttctggattagcttcatcatcgttgataatgctggtaagttctttatttgccaattcatgagcctcatcaagtttaccttgtttcagaagtttacgaactggttccaacgatttccaagctcccttcctgattccaaaattatatttctcaccagttccaggacctccacgccataaggtttcctcagtaatctgaaatcgctccttactatgtccgccaaaaaacatgactcctacatgcccattaccaagaggcaaagcctcctcctgccatatttttgcaggtttgttgtaaaataatttaagactttgtttttctgacttttggctagtaccacaccctagtaaaccaaaaatagcaataattaacagcaagcttatttctcgcatttgaaatgtcatagttgttttattttagttgagttattttcagtatatcgccagcgtctaatgataaatctaatcccgtaagctgcagcttattttctatgcttttaatttgtgctgaaaccttctgtccgtttactgttactatagcatcaccactgcctgggatatcaagctcattgatgtacactataccaaaatcaacagtcagcgtaattacatctttcgactgggtataggatccccatccctcggctgctgtaaaaaacatgcaatagtcggcctgctttagtcgtggatcaaatttcatgattcccttaggtccattgtaatggtatccttctaatgctttcaatacgccccacgaggccatagcacgtccgtaatggtcgccacattcaatctcgttccaagggttatgcttctctggtcggtagcgttcgtgaacagcttttaccagcgataagccttcttttagcataccgttatagatcattcctgtggcaacctgatactcaatacctgtccatacttcgttgcggtaacgtacaccatttttattcatatgttcgctgaacggccaggtacagataaacaatcctggttcacctgctaccgcataatcgcgttcaggggtatacttctttgcttgtggtcctacgtcgggagtccagttgtatttccatattgattgataggtggtgttaactttctcctcttcgtaaagactacctaggttcaacaagtacgaccacgtttgaccgaatagttggtcactcaaacatccttttgcatattgatatttgggatgcttctcgagatctacatcctggataaaataatgaccattccataggcgctcaaccgacaagcgactgcctttggctgcaatgtcattacaggtttgggcaaattctttatcgctaatgattagggccatttgttcacatgccttaagcgctgcgagatataaactccctacataggtattggctccactaaaattgatgtcgtaggtgttcgactgtgtggtttccattaagccatcggcattgccatcttcgttaattgcgtaccccatggctttcttaattttaggccaattgcgcgacagaaataggttatcttttgaattcaaatgctcgcgataggctttgaggattgcccctaaatggccatccataaatatacgctctcgtccatcgcgtgaaagaatggctccatctttctgaaacgaaactaggaagtctgatttttcgcgaatactacgttctatttcagggaataggtttgctgttgcttgtgcgtaattgtatacatgggtgcaattaccataacacgagcctacgccttcccacaacataaacttgttatcggcataccattgtacggtttctgttgccaatattgaggcaggcatcagaatgcgttgtttcaaccagtatggaagtgtcgacttttcataccagctatgatgaaactgataggtggaggtggtcaacgattcatagttctcatcaatgtaatcggccacatctaatgaggagctgtaccaattggcatacatgttaccgcgaataagtcctttagtcttgataggcttattccagtcccaccccatatcaacctccataggtcggttaggaaaataccacgacaggaggaagacgacactcttctcctcgcccttcgcaagctttatattggcggttacctcaccaaccaactcatcacctatggcttttgtattgttgttgccggtatctacacttccatcgtggtttaacagacttaacgacatgtttccgtaatagggatgactttgatatttcggatcatcaggaacacaatccatgaacaatgttttcctttcatatgtactccggtcctgagtacgaaccactcctttcacttccccttttaagtcggccattaccatgttttgaataaagccggtaaggttaacgctaacattgccttttgaggtgttcttgagcttaaatttcaaaattgttgccggattggctgactccctcaactgcatgggaatgaagggtgaaaaagcctccatttcaacagctacaggtagctcgaatgtattactttcataggatacctttgcaataggatactcccccacaaaaccgatattatcgaaatcatgtttgttgagcgacttagctattgtttttcctttacgctcgacttgcagcttgaagccttgcttgaaataactaaagggctcaaatgattgataacatactttccacggaccatgtggggtattaaaattcatctcatccgatcgtccaggaccagtattataggcgttatttgcaatccaccagcaagccagtgttccatctccacgaacatataactgtccggcacctatgcctcccacgggcattccaatggttgttaactcttcgcctcgataaacctttcgttcatcatcaacaaagagtgatttctcccattgtgatgataactttttctgctcaggcaccatgtgcccaaagcgatgctgactgtacacatttgcggatagcagtatccagactagtacagccagtcttctcattaaaacaattttcatacggtaatatttcacttaaataaatgcatcgatcgttttgaccgactctggttcggtaaaactagcgaacgaataggtctaccatggtgtcaatatcattataaaaagtgcacttttaatgatttgccaaacgactcaatgcgcttaaccagcctccggagtgggtgatccaaccttcatcggtgaaaaccttaggtgcgtcggtcgattttcggggtgtctcaacatgaaactgtgcatcagattcaaagccattgcatatggtcccgggaattttagtccagcttccaatatactcatcacctactccatagatcatactctttgaaacatagcgattctcttcccacacaccactatttaatcctgcaatccactgtaaatttcccatggctatttttccaaattgatcatcgcctgtatatgtctgcaactcaagcgccaatgctgctgccgatccgtatgctccattaattccatgccataagccactaaaaaccaacaagccttcacccttataatatccaattggaagcagataaaaaggattgtcggaacaggctggaagaaaataaccataggcaaaattgcgaattgccttatcccatttaggtttagcgggatgattaggatgcttttgggccaattgtatcagggaaatgatataatgcggaaatgtagctcctgcatcatagcccatatgatggtgctcccaggctttttcactataattggccgatttataagccttaaaatgtccataatatttcccttcaggatgtgctttactaatctgacgatcaattactttttgcgcatactcggctgctttttcaagatatctcttttgaaaagacaattcagaagcaacccatgtcatcattaccaaatcgcgtgttttccattcctcaggacgcacaaatccttcaggagctccatgtattactggattatagccatcgttaggttgtactgttccatgaaaatcggttcctccacaatgatgaatcggaccgtttttatcgataaaattaaacgatcgcattgctcgctcgaggtattcatttgcctttgttggattgctgctgttcaatagtgttgctgctcttgcaaaacacaatgctcctttgacaacatcgcctgttattacatttcggtgctttggccattcgtggattatggcgcctctacctttacctaactcttcggctttatcctgacaaaatgcaatgtaatcgagtcctatgattgactgttcaatgagttcttctttttcctggggattgatcttgtctgctgagaattccaagagatcaaataggcctgtgatcatggtggcatgactatttacttcgcgaagataaccaccacagtcctgccacccgccaccttcggcatgcccgggaccatgtttcttgtagttgttttttctaaactctaccctgtgtttcagctgctcaatggctaccttttcccagctttcattccagagtaaatcagacgctaccttaaatggagcagtctttatctctttcccactggtatttttaaaagcacaggtgtagctgcctgcttttttaagtgcagagaaatcagcaatccaccagtattctttccatttctctccccaactcttcagctttcctgtgaatatgtttttcccattttcatcatacaactgaaaatcgtctccttctgctatgtagtcgttggttgctgatcttatgattattcgtttatctgaatctaaatcgtaacctaccctggaaaacaagactcctgcttttgcttcatccttgttatgcgcaaaactaaagttcgcacttaagcagattgctattgtaaaaagtattgttaatgccttcatctgtcctttatgatttaaagattattggatatcttgattgttagattattctgctttggtgtctaacaaaaaggaggaggcaaagacctcccccctaaaaaatcactaacactatatttattgcccaatccaacctggattttggaccatattttcattaatctgtagctgtcgaagtggcaatggtttaagataatgctttggctcccattttctcaatgaggcatcttcaattatcaagaaaccattagcatctaattcgtagcgatgtatgcctctcaaatcaaccgattcaacctgtgcggttactggattgtaaatttcaaaaggattctcgaacatggttcctccccacttcattcctttgatggttttaggcatctcaacttctgcaatcttccaacggcgaatatcgtcgtacctaaatccttccataaatagctctactgttctttctctgcgaatttcagttagcatatccagactgttatcagcaacaaaaccgtttgttagatctggcattccaactcttgctctcaactggttaattgatttattcaaatcattatcagaaatgcttccatctttctcaaaagtcgcctcggcatagataagcatcatctctgccaaacggaaaacaggatagtcgtttgcaataggctgtgctatttcattacaaaacttataaggcgtatagcctgttagtgaactaggacaccagccattatggaatgctcctgttcccaccaactcctcaggagtttcagtaaaatcgcgtgcatatggaatatgataccaatactgatcgaaaggctgaacatgattggtacgaattcgaggatcacgatcaacatactcccagttggtagcaagtttggtgtcgggatctatttctgaatcatatcctttaaagacactattagcatgagcaatcggcagtccgttactatcaagatacatatccatcatcttttttgttggagatagatcatcccatccaattacaacccatgaatatcctcggttacgtaacgactgactgtacttgttggctaggataatctcattttgatcttctttgcctagccccacaggattactctttctttcagtttccaatgtgaagaaatagcggtaactatcctctcccagcacatctcttcgatcaaacaatgcaaacttacctccatcaataatcgacttagatgcatcaattgcctgttgcagatagccattgtaattgcctcctgtactgtgatacttagcccaggtaccttcgaatagtgcaactctggcttttagggcctgaaccgcttcttttgttattcgtcctgaattatcagtaccggtaagagaaccgattggtgttttcagtgcttcattcaaatcgtttaagataaaatcagccacttcagtgcgactattacgtgctgcatacagcaatggatcttcaagtcctaaaggtttatcaacaaggataactccaccaaagtcgcgatatagatgccagtacaacaatgctctaaaaaacaatgcctcacctctataaatctgtaccttctccttcagttgctcatcctcaagattatcgaaagctgtcaacaaatcgtttgtctttctgattcttgagtatgaattattgtacaatccactacttgccgattcgaagtaggtaccattactaatcacacttgcatcatacgttatatcagcatcttcatctcttccgcaggtcccgaaacctggcaaataatcgtag

SEQ ID NO: 1053 - DNA, 24665 bp, synthetic construct
  misc_feature 1..24665: note = Synthetic
  source 1..24665: mol_type = other DNA
ttgtggaaaggaagtaaaaaaaaaggaaacatttaacgcttcgttactaccctgcgatattttatatcttcattgtttctcaaagtcaagagattttgagaaacaatataatttacctatctctaaagttcaatattggtttctcataatatttataaagtacggatgaacctactagtacaaaaaaccaaaataataggtatttgacaatgccatcaatttcattcgttggtgcaaagttatcccgaactacttctgctattaaggctaaatttaaaagatacattgaatatgatattttactaacatgagttattatcccaacaaacacccctttatgcatctttatactttcggcaaaaggcaataaaaacatagctgaaataggtcctagagcaaaataaatcacttgtttatatagagtattgtattctgcttcataatttaacacgaaaacaattaaaccaatacctattataaaactgctggttttaaacttcacccaataattattgaaataataataaacccaagaagctaataatccgtaggctatactatccaatcttgtcataacaatttttctaaatgtaatatcatacaaataaaaatcattaatggaataattcattatcccaattcgatacaaaaaaggaaagacaatcattaataccgtcactaaaataaatgattttttgggcgttaaaaattttaaaaacagaattaaaaatattggaacagaaatgtaaaaccactcttcaattgtcaaactccaagactcccaaaaaaaaccatgaaaaggtgatgaaaaattttggagaaagaaaaaaaacttccaattgaactgttgaatatcttcctgaattattccaaaataaattatcaaataatttgcaaatagaattaaataataatttggtaatgtccttaaccaccttcttctccaaaatctgatcaattctcgaattccaaatttttctcctgaattaatttcttttagtaatatacttccaattaaatacccgcttaatacaaaaaacaagtcaacaccgtcaatcattttgatactcggaaggctatctaagacggtattttttaataaaaaactcccatgctctttaacaactaaaattatggcaattgccctaaatatatcaagaccaaaaattcggtcagtatgacaattatcactatagtccttttgtatactcattaaatcaattattcttctaatatttctatacactcaacttagttgagtttttatttattccaaaagcaccctttgtccttacaaaccaagcaataaaataacttgccaaaaaacgtcaaatttgacgttgatccgcaattcacttatgttgctttaaaattgtgtcatgatataccaaacaagaatctctttcagaattaaactcataaaaggaattaaagaacgggacaacagtttgaaaaatcaggaaagtctataccttaatgatttatttacaattccttagtatatactccctttttaacttccttaaacccaagttttttaaggtatttgaaataattcaaattattgccttctgctatgacactggtatatcctgcatctataaatttttgtctcagcttaaaataaacgtatttgccattcttaaagtccttatattccggaagaacaaaatctaaaccaacatgaagaactgttccgtcctctcggtgcgctaaaaacaatcccgcaaccgacatatttctcaatataaaaaaactaacggtattcatatccggattataggcaaaaccagggagaattttttgaattctatcgttgtgaaaacttaaaaatcgttttaaatattcactttctgcattaatttcgagtatttcgaaggtttcctttttagaataaatattcactaaataataaatatctaccaaaacaataattccattgagaatcccaacaggaaaagcatgaatcaggaaaccatatgtagaaaaaagtatagctcctgtaatattaatccatctaaacttgatgatggaactcattgtcattgataatgctataatcaccgaagcggcatatcctatccatggtaaataatctgtattcataaaaattataatttattgcattccgttattgaattgctattccgtttaaacatatctgtatcattatgttttccgtttaaaaaagattagaaatttgtaaaacagaaaacatttgaaatactaattgttcccgtttttaaaaaccgacaatacaaaaaacacaaagtgcttttcatgttgtcggttctatttattgattctcaatatacgtcttttcctctataactgataaataaacgattgtaaaggagcaatactaatatgcactttcccttccccatttaccacatgaagttgtgatgtactttttccatacaattggtctttaaccgggtagattccgtcttttaatttccaagccttaatgatatccgcaggaacttttaattcaaaatgactggtgtgttccgatgaaaagttaacaatcacaactagtttttgagtattagaccaacgcacataggaatacacttccggaaaatatccttcggtagcataacggttcaaactgtgaatttcttggtatttccccatcaaggcagaactgtttatggtaaaattcaacaatcttttgtaaaaatcacgtaggtctttttcgggttgcgacaattgtccaccatcaaatttcccgccattcatccagcgttggtgattgggaacacccacataatcaaaaatagaagttctggaatgcgtaccgaaaccgccgttttcgtttccagcctctcccacttcctgaccaaaataaaccatcgttggcgaagtactaatggtagtagaaaccaccattaaaggctttcctttttcaggagatcccgcaaattcagggcttgccaaacgttgctcatcgtgattatccaagaaatgcagcatgtgatgctcgatatcggccatactgttttgaatatcagaaattccatcggtattactttttccttgaacgatttctttcattttatcgtaaaatgctaccttatcgtacaaataatccatttttcctaagttgatgtaatttctggattcatggggattataaacttccgcaattaaaaaggcgtttggatttttcgttttgattgccgaattcatataactccaaaattcgtaaggcaccatttcggccatgtcataacggaaaccatccaccccttttgccgtccagtacaaggcaatgtcacggaattttatccaggaacttggcaccgatttgtctttccaaaaagcaaaatgttccttgtatgattttttatcgtatcctgctggcagttccggaaaatctttggatccgtccggacgaatcccataatttatttttacagtttcataccaatcattgatatctggtttagccaaacgagaaccattcccagtccattttgctggattttcatcaaatttcccgtcaattaaaggatttttttcgccattcaaaggtttgtaattgtccgatgttggaacttgaaaatgttgacctggaatgtaataaaagttattgtctctggcatattctatcgaagtattatcatctgcaccaaaatcacgaacacctttcggattcgtttttccttcgtattttctggcaatgtgattcggaacgatatcaatgataactttcaatccgcttttgtgggtgcgggcaatcaaagattcaaattcttccaatcttttagcaggatttaccgccaaatcgggattaacattatagtaatctttcacggcatacggtgaacctgcacgaccttttactacttcaggatcgtcatttgaaattccgatagccgtataatcgtgaaccaaggcatgatgaggaactccacaataccaaatatgggtaacccctaattttttaatttctgttaaagctttatccgtaaaatcgttgaacttccctaccccattttcttctatggttccccaaggcttattagtagtgtttttatttccaaataatcgggtaaaaacttgataaacaactgcttttttctcggtaacctcttcttttttattcttaaccatagacttactttttttgttttgggcattcgcagatagcgttaaacctatcaatgcgaacagaattagttttttcatacgtatttaatattttttattagtaatatggaattcgcaaaacttcacttatttattctaattgaatgtccgttttgctcctttcaatatttctttattttgttaggaaaagcatacaaatataaaaatttgtactgcactttcaagcaactaataaataattcttaataacctttttcctagttccctttttcataaatttggcaaaaattatatcccttgaataaaatacattttttactgtttttaagtttctttttggcaggaatccatacgcttttggcacaagccccaaagaaaatcaatatagaattttctgattttgccgatgtcaaccaaactgaaattcccgatgctcttttgctcaccggaaacgtgcgcatcaaccacgacggagccattttaacctgcaataaagcctattattttcaaaaagaaaactacattaaggcctttggaaacgtccaaatcgttcaaggcgacactcttttcatgaatagtaaatatgccgaatacaacggaaatatcaagcaagcttatgccaccggaaatgtggtgatgcgttctccggaaatgactttatcaacagacactttaaattttgatcgaaaaatacaacaagctttttacaattctaacgggacaataaccaataaggacaataccctaaaaagcaaatcgggacgttattatgccaatgaaaaaaagttccaattccttactgccgtaacaatcaccaacccaaaatatgtagtaaaatcgaatcatttggattattataataattccggacattcctatctttttggtccatcaacaattaccagcgatcagaattttatttataccgaaaaaggattttatgacagtaagaaaaatgtggggcattttcttcgaaaatcgtacatcaaatacaaggatcgtttgatagaaggcgacagtttgtattacaataggaatatcgaatttgcatcggcaaccaataatgtcaagattacagactcgataaacaaaggaatcatcaaaggccattatgccgaaatgtacaaacaaaaagattccatgttcgtgaccaaaagagccgttgccatcaatttagtcgacaaagattccgtttacattcacggaaaaaggctcttggtaactggcaagcctgataaccgaattgttagggcttttgataatgcccgcatttttaaaaccgatatgagcggcaaatgcgattccattcattccagccaaaaaacgaatctgacgcaactcataggcaaacccatcctttggaattttgacaaccaaatgactggcgatgtgatgcatttgataggcaacgacaacacgcaaaaactcgattcactcaaagtgcttaacaatgcgtttctggtctcgaaagacactttaggaacaggatataaccaggtaaaagggctcaatcttttcgggaaatttagggataataagctctatgaagccgacattgtccagaacaccgaagttatttattacatgcgaaatgacgctcacgaactcataggcatcaataaaaatgtgagcagtaaaattaatttgaccttagacggcaacacgattgacaccatgacttttttcactaacgtggatggcgatatttatcccgaaaaagacttgcctgaaaatgccagaaaacttcgtggctttatttggcgtggcgacgagcggatgaaaaccaaagacgatatttttccgccagaagaaaatgaactcaacgacaaaatcataaaagcaagcaaagacgaattggcaaaggaaaatatacctatgaaaattcggaaagagaccttgaattatgataagaagaaaaagaaataggatttttgattttagattaacgattttagattgcaggtgtaaatgacatccgatttcccattcataatacccatttttttgaattgtcgttggctttagccacaaaaaagacatcaataaatttccaaatccacaaacaaacgtgaatccagatttcctcaaataccaagcacaaacctctctctatcctttaggaatggaaatttctcatgcaatgggttcttatatttacgacaccaataacaaaaaatatttggattttgttgccggagtttccgcttgcacattgggacaccaaaacaaacgggtgaatgatgccattaaaaaccagttggacaaatattcgcacgtgatggtctatggagaatattctcaaagtccctcggtggaatactgcaaattactggcctcgctcctacctcaacctttagaaaaaacctatttggtcaattccggtaccgaagcaaccgaaggcgccttaaaactcgcccgacgtgttaccggccgaagccaactgatttcttgccataatgcctatcacgggaatacgatgggttcgatgagcgttatgggatttgaagaacgcaaaagaatctttcgcccgttgatacctgatgtagatttcatcacgttcaataatgaagccgatttacaaaaaataaccacaaaaaccgcaggaataattctagaaagtattcaaggtggcgccggatttatacaacctgaaaatgattttttattaaaagttaggcaacgatgcgacgaagtgggtgcattaatgcttatcgatgaaattcaacctggttttggaagaacgggaaaattattcggtttccaaaactacaatgtggttcctgacgtagtcattttaggaaagggaatgggaggcggaatgccggttggtgcatttaccgcatcgacagctcacatggatctcttgagtgataatccaaaactggggcatattacaacttttggcggacatcctgtcattgcggcagcatgtttagcgactttgcaagaaattaccgaaacaaacttaatgcatgaagctttagaaaaagaaacagtatttcgttcacttttggtacaccctttgatagtatctattcgaggaaaaggattgatgctggcggcattgactacaagtccagaaatcactaacgaagtgattttaaaatgtcaagacaaagggttgatattgttctggttactttttgaaggttgcgccatccgaattacaccgccattaacgatatctgaagaagaaatccgagagggatgtgctataattctggaagtgatgaacgaaattcagttgagaaagaacaattgttaactatcaatcatcaaattgttttctgttaattaaattgttcacaacaattctccattctgacaggattacaatataaatccttacttttatttaggataactttaaagaaaaaagccatgcaattaagcgaagaagacgaagacgactataacttatccttatcaaaatttgaatcaatgttgaaaaccaacaaagttctcttttttgattccgaggagtttgaagaaatcattcttcattatctcgatatgggtaaagcctctttagcaaaaaaagccttaaaattagcattggaacaacatcccaaatcaactggtttaaaactagttcaggtagaaatgttggtctatgatgacaaactcgacattgccgaaaaaatgctcaacgagttatttgctatcgaaccgcacaacgaagaaatttacatccagaaagccaatatctattccaaaagagataatcatgagaaggcggttgaattattaaaaatggcattgaaatatactgacgattatgccgatgtatataatctcatgggaatggaatatctttttatggataatttggaactggcaaaagaaagttttattaaatgccttgaggaagatttagaagaccaatctgcattgtataatgtagtgtattgttttgagtttttagaccaaaacgaagaggctattgaatacctaaacaagtatatcgacaaaaatccgtatagtgaaatcgcctggcatcaagtaggccgattgaattatggattaaaaaaatacgaggaagccttacgtgcttttgattactccactttgatagacgatgagtttttgggtgcttttatggaaaaagcaaaaactctagaaagactaaaacgctatgaggaagcaatagaaagctacaataggacgattgaattggacgaccccacttcatatgccttgcttcgaatagggaaatgtcacgaaaagctgggaaacaaagcgttagctttaaaattctttaacaaaactgtacatgaagatccattgttagacaaaggctggattgcgattaccgatttctatgttcgtcaaaaaaactataaaaaagcgctgttctatgtgaacaaagcgttgagcattgacaatcaaaaccgtttttactggaaacgttttgcgacaatcaacaaggaaatgaacctatttgaagaagcggaatttggctacaggaaagcagttgaatatggagattaccaattggatacttggttattttgggtcgatatcttacaatttcagggagaatttgaaagtgccattcaaaccttattacaagcttctgaatatttcccggaagaatacgaagtggaataccgattggccggtttgtattttatgattcataacgataaaaaaggaaaattccatttgagtaacggattgcgtttgaatttcaagaaccacactcttttggaagaattatttcctgcggtatggctaaggagaatggttcaaaatgcgataaaaaaggataaaaaataacatttattcacgtctcttatgagacaaaaaccatcacgaatttcacgaatttaaacaaaataattcgtgaaatttgtatttaaaaaaagaactccatgttaaaaaaatgctttggtttactgggacgcaacatccattattcgttttcaaaaggctactttaccgaaaaatttaatactgaaaacctcgtaggctgttcctatgaaaatttcgatattcaagacatcaatgaattcccggaaatgataaaaatcaatcctgatttggtgggcttgaatgtgacgataccctataaagaaaccgtaattcccttcttggacgaattgtctgaaaatgctgctgaaattgaagcggtaaacgtgataaaaattaccaatgaaggcaaactgaaaggctacaattccgattactacggatttaaaaaagcattagaaccgctacttcaactacatcataaaaaagctttaattctaggaaccggaggcgcttcaaaaggtgttgcctttgccttaaaagagctaaacattcagtacactttcgtttcaagaaaagcatcagaaaacgctattggttacgaccaaattgatgctgccatttttaataattatcacatcattatcaacagtactcctctggggacaagccccaatacggctgaattccctcctattccctaccaattttttactcaaaaacatatcgcattcgatttaatttacaatccagcagaaaccaaattcctaaaaaaggccaaagaaaaaggagccgttattaaaaatggcttggaaatgctggtttttcaggcagagaaagcttgggagatttggaatgaataaaaaataaattcttcaagaatatctaaatatcttgttctaaaaaagtgtacttcatttgtagctcttttagaacaggatttttttcataaaaaaagcgacccttttgagaccgctttgaatgttttcacaacggaataatccttattgtgaattgcttcaaaattgtagtacaataatacaacaaaagttttaatatttgaatgtgattttctgtaaaggagtaactattttattcgtaagtttcaagctactaaaaaagagcagaaatgaagaaaatattggggttagatttagggacaaatagtattgggtgggcgttaacaaataatgacttcgataataaacttggaaatattgaaggattaggaagccgaataatccctatgagtcaagatgttcttggtaaatttgatagtggagtgtctatttctcaaactgctgaaagaacaaaatatcgtgggacaagaagattagtacaacgatttttattaagaagagaacgacttcatcgagttttaaatatccttgattttttacctaaacattattccgaagcaatcgattttgataaaaaatttggacaatttaagcccgaaagagaagaaaaattatctttttacaaaaatgaaagtggtaaaaaccaatttttatttttggaaagtcaccaagaaatgctttctgaattcaaattaatatatcctgatttaaaaaaagttccatacgattggactatttattatttgagaaaaaaagctttgacagaaaaaatcactaaagaagaacttgcctggatattactgaatttcaatcaaaaaagagggtattaccaattgcgtggagaggaacaagaagagaacaaaaataaattagaggagtttcatacccttacagttattaatgtaattgaaagagaaaaaggaaaatcaggtatttggtataatgtaattcttgaaaacggctggatttataaacgtgaaagcaaaatcgcattatttgactgggttggtaaacaaaaagattttatcgtgactaccgaattaaatgatgacggaactataaaactcaataaagacaacgaagaaaaaagaagttttagatctccaaaggaagacgattggggattagtaaaaatcagaacagaacaaactattaaccaaagtggtaaatctttaggttcttttatttatgataatttacttaaaaaccctaatcaaaaaataaaaggagaattagttcgaacaatcgaaagaaagttctataaagatgaaatatcaaaaattcttaaaactcagatagaatttcataaaaacattttaacagataaaaatctttataaaaaatgtattgatgaattgtacagacacaatgactctcataaaaacaacattaaagaaagaggttttgagtacttgttcttagatgacattatcttttaccaacgcccacttaaaagtaaaacttcattgattagtgattgtagtttagaacacagacctattaaagataaaaaaggtattttagtaaaagatagtagtggaaagcaaattttaaaacctctaaaatgtatcgcaaaatcaaatcctatttttcaagaattccgattattacaatttgtcaaaaaccttaaaatttttaaaaaagaaatcatagacgatattgatgtaactattgattatttaaaaacggaagaggatttagtagaattattccattggctaaatgacaaagcagaaatcagtcaaaaacaatttttagcttacccaaaattcaaattaaaagaagataaattcagatggaattttgtagaagacaaaatctatccttgtaacgaaactagaaatcaatttttgaatgcaatttcaaaaattgatgtagataaatctttttttgataccaaaaacacccaagatttatggcatattttatattcggttaccgataaaattgaaatcacaaaagcaattacaacttttgccaaacgacataatttacctgatgaatttatagccaatttttcaaaattaaaaccttataaaaacgattatggttcttattctgaaaaagcgataaagaaattattaacgttaatgcgttttggaagtttttggaatgaaaataatattgattccaatgcattgagtagaattgacaaaatacaaacaggagaatttgatgaaaacattagaactcgtgttcgagaaaaagcaattcatttaagtgtactttcagatttcaaaggcttacctttatggttagcatcctatattatttacgatcgacacagcgaagctagtgatatttcaaaatggaaaacccctgcagatattgagcactttttaaaacacgatttcaaacaacattctcttcgaaatccaattgtagaacaagttattacagaaactttgcgagttgtaaaagatatttggcaacattatggagaaggaaaagaaaacttctttaatgaaattcatattgagttaggtcgtgagatgaagaacgacaaagcaactcgagaaagaatgaccaaacagatttctcaaaacgaaaacacaaatttgcgaatcaaagccattttgatggaattgaaaaatgacgggattaatgaggttcgtccatattcgccaagtcagcaagagattttaaaaatatatgaagaaggagtttatagtagtgaaaatagaaaagaaagactagaagatattgataaaatcagaaaaaatgcgaaaccaaccacttctgaaattatcaaatacaaactttggttggaacaaggttatatttccccttatacggggaatatcataccattaagtgaactattttcaaccaaatatcaaattgagcatattattccgcaatcaagattttttgatgattctttatcaaacaaagtcatctgtgaatctattgtaaatgcaagaccttacaaagacaatcaaacggctatggaatttataaataatcaaggtggtcgaattgttaccgagttatctactaattcgagaacagtgaaaatcttaaccaaagaagattacgttcaacacataaatacctattacggcaaaaacaaaaacaaacaaaaacgattgttaagtgaagaaattcctgaaaagtttatagaaagacaattaaacgacacaaaatacatcagtaaaattgtgaagaatcttttaagcaaaatagttagagaagacgacgaacaagaagtaacttcaaaacacattgtttcattgaatggctcaatcacatcaagaatgaaacaagattggggcttaaatgatgtttggaacaacataattacaccacgttttgaacgcttgaatgcaattactaactctagtgattttggtaaaatagaacttaaagcagatgaatttggaaatagaggcaaacaagtttttcaaaccacagtacccgatgcaattgcaaaaggatttactaaaaaaagaattgatcatcgccatcacgctttagacgctttggtaattgcttgtgttaatagaacacacatcaactatttaaataatctaaatgctaaagatgataatgacaaatcagtcaaacacgaattaaaaaataaactttgttttaaaaccaaacctgatgccaacggaaattacaaatgggaattttacaaaccttgggagaattttacaaaaaaagcagaagacgaactgaatcaaactatcattagtttcaaacaaaatacccgagttattaataaaacggtgaacaaatatcaagtttggaaagaagaagatggtgcaatgaaaaaagttaccgttaaacaaactaaaggagacaattgggcaattagaaaaccaatgcacgcagaaacggtaagtggaaaagtatttttaaagcgaattaaacaaagtcatattactattacaaatgctattgaacaaatagaattaattgttgacaaggaagttaaaaaacaattggcagcaaaaatcaagtcatatccaaataatcctaatggtttaaaaaagcacctcaaagtttttcctgtaatgattgatggaaaagttattgataaagtacagatttatgaaaaaacagaagccacagcaacaagaaaaacacttgacattacttttgatgaaaagaaaattgaaaaaataaccgatactggtattcaaaaaattctattaaaccatcttcgacaagaaatttatcaaaatgctattgatgaagatggtaaaaaaatcccagctcacgaagttgctttttctgaaaatggtttagatgatttaaacaaaaacattacagcattaaataatggcaaaaaacaccaacctattaataaagttagagtttttgaggaaagtggaaggttctttcttggagatgcaggaaataaaaaagacaaatttgtagaaactgcatcaggaactaatctattctttgcaatttacaaagacaataatggtaaaagaaattataaaacgattcctttaaatgaagtcattgaaagtcaaaaattaggtgcttttgaaaaaataaaatcatacgaatgttctgtcccaaatacttatatagatgaaaaaactcaagaattatcttctcttctgttttatataaaccctaatgatttagtatttgtccctacaattgaagaaattgaaaatcctaacagtgtcaatattcaaaacttctcaaaagagcaagctcaaagaatatataaatttaccgatagtagcgatacaacttgtaatttcatacctgcaagctcttcaagtttaatattcagtataacaaaaaaagatcaagaaaaaattggattaaactttcctatacaaaatgaatatggcttaggaagccctcaatcaaaaaatcaaaattctttaaacggaattcaaattaaatctgtttgttggaaactagaagttgatagacttggaaaaattaaaagaatcatccgatgataaaacgaaccctattcttcggcaatcccgcttatttaagcaccaaaaacgagcaaattgttatctcttatcccgacaaggaacaagaaacaaaaaccgtggctattgaagacataggggtcattgttttggaaaaccaacaaatcacaattaccaacggtttgctggagaaactgattcataacaatgtggcgttgataaattgcgaccaacagcatttgcctattggcttattgatgcctttgaacggacataccgaacaatcggaacggttcaaaaaccaaatcaatgcttctgccccactcaaaaagaatttgtggcaacaaaccattagttctaaaattacgaatcaggcgggactactaaaagaaaagggaattccgatgcgcaaaatggaactttgggcaaaggaagtcacttcgggcgatgcactcaaccacgaatcgagagcggcggtgtattattggcaaaacctcgtccaagttgaaaattttacccgtggacaaaaaggaatcgcacccaacaatctgttgaattatggatacgccattctgcgagccattacggctcgagcgcttgtcagttccggaatgctcccaactttgggcattttccatcgtaacaaatacaatgcctattgccttgccgatgacattatggaaccttaccgcccatacgtggatttgattgtttgccatatcatggaaacggaagattcgtatgaggagctgactattgacctcaaaaaacaattgttaaacattgccagtatggatgtttgtatcgatggaaaaaatagtccactgctagtagccatgagccgaacaacgcattccttacatgagtgttttgaaggaaccgccagaaagattttatatcccgtatattcgtagatacaacggtttaacctttttggaacttttgacattagattttaagacattcggactattatgtatgatgcacattacacccgtttaaatcaatatagaagtttgtggatattagtattttttgatctgcccactgaaacccgcaaggaacgtaaaattgcgagtgacttccgcaagaaattgttggatgatggtttttctatgtttcaattttcaatctacatgcggttttgtgccagcagggaaaatgctgaagtacactccaaaagaataaaaaacaacctacccgaacacggcaaaattggagtcatgcaaataaccgataaacaatttgggatgatggaacttttttatggaaaaaaacaagtagaaactgacaagccttcacaacaattagagttgttctaattttataggattaaaaaagtgcataactacctgaacaacaacatctaaaaccctcttcttttttattttaaaataaactcataactaccaacatatcaaacgattgcatcgcggtatgttgggaattataagctaaaatacaattttgaaagcaattcacaacttaatgccagaagattgcattaaaaaatttgttgggaattataagctaaaatacaattttgaaagcaattcacaacagatgggagcaacaacaaacgaaggttcaagttgggaattataagctaaaatacaattttgaaagcaattcacaacggcattgtctttggaatttcacatacccatgttgggaattataagctaaaatacaattttgaaagcaattcacaactgaatcttgttaataatacttaatttaactgttgggaattataagctaaaatacaattttgaaagcaattcacaacgcagggcgattgataaccttgaacttctttgttgggaattataagctaaaatacaattttgaaagcaattcacaacggaatcacacccccgattagttgaaattttgttgggaattataagctaaaatacaattttgaaagcaattcacaacgtaaattacaaagtgtgagagataggcttggttgggaattataagctaaaatacaattttgaaagcaattcacaactagaagtagattctttaaacttcaacgtgtgttgggaattataagctaaaatacaattttgaaagcaattcacaacagataaccagtataaatagtcttattaccagttgggaattataagctaaaatacaattttgaaagcaattcacaacgaaagcgcgattctaaaagtctgagaccccgttgggaattataagctaaaatacaattttgaaagcaattcacaacctattgttgttttattatttattattatatgttgggaattataagctaaaatacaattttgaaagcaattcacaactatgctcgtagtcgtaaccgtaatctttaagttgggaattataagctaaaatacaattttgaaagcaattcacaacaacaaagaagcgtttaatgtcgtcaatgaagttgggaattataagctaaaatacaattttgaaagcaattcacaacattgaaacaaaatgtaaatagaataagaatgttgggaattataagctaaaatacaattttgaaagcaattcacaacgaattgtcagcaattgcaaggcattcgtcagttgggaattataagctaaaatacaattttgaaagcaattcacaacttcaaaatatttttatcttttagccaaacagttgggaattataagctaaaatacaattttgaaagcaattcacaacaaggtatcgaggtggtttataacgaactcggttgggaattataagctaaaatacaattttgaaagcaattcacaacctggcacacttcaaagaaaaagatagcccagttgggaattataagctaaaatacaattttgaaagcaattcacaacgcaacctaaacgctactatcttacttcctgttgggaattataagctaaaatacaattttgaaagcaattcacaacgatgctaccgatactattcaacataagtttgttgggaattataagctaaaatacaattttgaaagcaattcacaacgaaccaatatagcaaaactcatcatttaatgttgggaattataagctaaaatacaattttgaaagcaattcacaacccactagcagaaggtatttcttcatctaaagttgggaattataagctaaaatacaattttgaaagcaattcacaacttgaaatcgttataaaggcataacagctctgttgggaattataagctaaaatacaattttgaaagcaattcacaacagaaatacagctaaaataaatttagggcaagttgggaattataagctaaaatacaattttgaaagcaattcacaactaaaattctccgaaggcatgaagggaatgtgttgggaattataagctaaaatacaattttgaaagcaattcacaacttgattgtctttgcattgttgtatttctttgttgggaattataagctaaaatacaattttgaaagcaattcacaaccttcttctggttgtagtactattgttttagttgggaattataagctaaaatacaattttgaaagcaattcacaacctaaacgtttcttttgtgtttcttcttcatgttgggaattataagctaaaatacaattttgaaagcaattcacaacgacaaatgagacttatgcgggggaatatttgttgggaattataagctaaaatacaattttgaaagcaattcacaaccaatgtccgcaatggatcttccttggtatagttgggaattataagctaaaatacaattttgaaagcaattcacaactacatctggatttataaacgagagcttaaagttgggaattataagctaaaatacaattttgaaagcaattcacaaccgcacatagctttttgttttaacgacccagttgggaattataagctaaaatacaattttgaaagcaattcacaactatagtcaagctagaaacataaagaattttgttgggaattataagctaaaatacaattttgaaagcaattcacaacatgttgctctttcctgtaggattggtcattgttgggaattataagctaaaatacaattttgaaagcaattcacaacacacacggcattcttttacacgctcaatcagttgggaattataagctaaaatacaattttgaaagcaattcacaacaagtgttcccataattgttcctcatttagtgttgggaattataagctaaaatacaattttgaaagcaattcacaactgagtgtctaaatgttgtagtatttcttgtgttgggaattataagctaaaatacaattttgaaagcaattcacaacatggtttaagtttttcttcaatccttgtaagttgggaattataagctaaaatacaattttgaaagcaattcacaacaattttgcatcggaaccaaatgggtaaaaagttgggaattataagctaaaatacaattttgaaagcaattcacaaccaaaaatccgtattgaattatgataaaatgttgggaattataagctaaaatacaattttgaaagcaattcacaactgtcctcacccacataaatacctacatgggttgggaattataagctaaaatacaattttgaaagcaattcacaacggccattctgacattaaacaaacaatgatagttgggaattataagctaaaatacaattttgaaagcaattcacaacaagaaattgattgttgctaatcctttagttgttgggaattataagctaaaatacaattttgaaagcaattcacaacttaaagataactattttactgttaatcaaagttgggaattataagctaaaatacaattttgaaagcaattcacaaccaggagcaacaaatggttgaagacccaaaagttgggaattataagctaaaatacaattttgaaagcaattcacaaccttgcgccgacatcaatactaagtcaccttgttgggaattataagctaaaatacaattttgaaagcaattcacaacacaaaataaagagttttaccaaaatggaaagttgggaattataagctaaaatacaattttgaaagcaattcacaacaggccagtagaagaaaccaatactaatgaagttgggaattataagctaaaatacaattttgaaagcaattcacaacaccccattacatacggcgttcattccgtttgttgggaattataagctaaaatacaattttgaaagcaattcacaactggtgttctttacgtcgaaacgtgctatttgttgggaattataagctaaaatacaattttgaaagcaattcacaacaggcacttttttaagtaaataaaaaaatggttgggaattataagctaaaatacaattttgaaagcaattcacaaccaaaaatcggtattaaattatgataaaattgttgggaattataagctaaaatacaattttgaaagcaattcacaaccaaaaatcagattgtatcttaatccgcaatgttgggaattataagctaaaatacaattttgaaagcaattcacaaccttgtgccgacatcaatactaagtcaccttgttgggaattataagctaaaatacaattttgaaagcaattcacaactctgcgtacccaaggagcattttattaacggttgggaattataagctaaaatacaattttgaaagcaattcacaaccatttgttcatgattaatcccaaatcctgagttgggaattataagctaaaatacaattttgaaagcaattcacaacttatctttggttcaataaaaagtaactggcatgcgacttcgacccaattggcacaagaaccatttgccataaatactacgcaaaggcacaatcttaaaaaagcattgctccttttttatcagcagtttgcttgagcacctctattaatatttccagtttaataggttttgatatatattcattcatccctgcttccaaacagacgacacggtcttcggggaatgaattggctgtcatggcaacaatttgtggctgaaaactcatggtacttcttattacctttgttgcttgtaaaccatccatctctggcatcaggatatccatcaggatcatgtcaaatgatttagctgcctgcatatctaccgcttcttttccgttattggctacttgcggttcataacctaatcgattcaaaacccgaatgatcaacatctggttgattaaattatcttcaacaattaaaatattaagcggataatttttggcaaaatcttcggatagttccgtttgtttgctctttcctctatgtacctgctccccgttaggtctaaactcgtgctgaatctgttcatataattgcgcttgctttatgggtttggtgagtaccgaatggaacaaatgcgggtattttaatttgctttcatttcccactgtactcaacagaataatgggtatttgtggttgttgggctttgatttccctagcaagcatcaccccatccatttcgggcatttgcatatcagtaatgataagatggaagacctctccttgttccaaaatttcgagtgcctgttttccagatgatgccgttgttgggttcagtttccaagtctctaattgcatttttaggatgcttaaattggtggcattatcatctaccagcaacacctttttatccccattccagtctatcttaaagtcatcatcctgatgtaagtgttttttagttattttacttttgatgtaaaaactaaaagtagtaccgaccccttctttactgctaacactaatcgctccccccatcagttttactaaacgttcgctgattaccaaacccaatccagtacctccatatttacgggtggtggaagaatcaatctgtgaaaaatctttaaataagcgggacaatttatctttagggataccaatacccgaatctttcacttcgaaataaatccgaaagtcgtctccaacgctttttttcgggtatatgtttacaaatacttcgcctttatgggtaaactttatagaattactaatcaaattcattaacacctgccgcaatcgaagactatctcctataatcgtggctggcagtgatggatctatctgacaaaccaattctaaatccatttgggcagcttttatggcaaatacatccagcacattttcaacgcattggtgaaggtcaaaatcatgttgctctatttccatgctaccactttcgattttggtgaaatccaaaatgtcattgataattcctaataaggcatcaccgctcgttttgataacattgacataatcttcctgctcataatttaaactggtacttgccagtagggatgccatgcctagtactccgttcattggtgtacgaatctcatggctcatggaagccaaaaatgcacttttagcttgattggcccgttcggcatccaactttgcgacttctgcttctttactcttttcatttagattttcatttagcatttgtaaattctcagattgggaatataatacttttgattgtgattgaagttcgttatttgcatactgaagagcttcggtttgaacacgtaactcttcggcctgaacttctaattctttcgatttacgcactacttcttccgtacgattttttacttgtttttcgagctcttcctttttggcttttatattggccattctatatttggtttttatattggccactttaaatttaaaaaattcataaaccgctccaaaaattaatgaaaaaacaataattctaaaccaccaagtggcccagaaaggtttagtgatttttatttttagcgtggctcctttttcattccaaactccatcattattagacgctttaacatgaaatatataattccccgggttaaggttggtatatgtggctttcctttgatcttctaaataattccaatttttatcaaaaccctctaacatataagcaaactgattcttttctggatggatataattaagagctgaaaattctatcgtaaatactgattctttataggaaagaactatttctttagtctcactgatatcctttttcaatggtgaattattacttcccaccacttgatccttattaaatatttgaaaattagtgaatactacttccggcacaaggaggttatcttttattttatcaggataaaatgcattaagccctttagcaccgccaaaaaacatttcaccatccacagcattataacacgcattacgaccaaattcttttccctgaataccatcagatatcccataattcctgaatcttttactttcaggattaaactttgaaattcctttattggtaccgagccataagtttcctttatcgtcttccaaaataccagcaataatatttccggagagaccgtccttttctgtatataccgtaaatgtattagtcattttgtcgaatcgatttaagcctcctcgagtaccaacccatacatttccctttttatctgaaaaaatatgatccacataattgtctgaaaggctattcttgttcttacggttattcctatattgggtaaagcgctggctggatgcgtcaaacctgcaaagcccatcttctccaccaaaccacatagctccatctccatcttgacaaatggaattaatcacatttcctacaagggagttcttgtcataaggatcatttacaaaatgtgtgaatttcttggttttaatattataacaatttaatccacgatttgacaaaccaagccaaagattcccattattgtctttataggaatacagaattgttgaacttgccaaactattgggattaattgtatctgcaaggtgatgcgtgaattttccagtctttttattgtacaaatcaaaaccctcatttagaaaggtaattgcaaggatatctcgattaatttctgctatagaaagtatataatcactattaatactattcttatcccgttcgcttttaaaaactttaaacgtttttttctccctatcaaaaaaattcaatcctcccccatcagttcctatccaaattttcccctcactgtctccagcaatgcacagaatattactactgctaagagagttagtagtattcggtttttctttatagaggtctatcttgtcccgatatttaggtaagaagtttattccaccagcataggttccaacccacatattgcctgaatgatcttgatataaactatggatcgaggtattattaaggctacgcgggtcgttaggatcatttgttaaattatagaaattgtctttatcgctattataaatgctgatacctccattttcagagccaaaccagagcttaccgtcagcatcttcagcaatggatatgatcttatctaaacataagcttttggggtcgttaggattatgtttgtatctcttaaatgaatcttctttcttattgtatatgcatataccatccccataagttcccatccaaatattgcctgccttatctgcataaatgactcttacgtcattcccagaaatgctttttgaatttctagaattagtaagataatgaactattctatttgttttataggtaaacttgataagtccatgctgtgtagccagccacaaatttccttctttatcttcaataattttttttacttcacaacctccaaatctaacttttttttctctttcaaaaaatttacattttccgattttcgtattcaataaaccaaatccattagaagtccccaaccaaatatttccgaccctatcctgaaaaatggtattaatgatagacccttctaaatctaaattataatgcgtaaatttatttgtatctctattaaatttatctaaacctaatctgttggatattaatatgtttccatatttatcttctgaaatatcagtaacataattattactgagagttaagggattatcaggatcatttttaaaaaccttaaagtcgtatccatcatatctgtttaagccatcctgtgtaccaaaccacataaatcctttactatcctgtaatattgatttgatattactttgagagagcccttcat

SEQ ID NO: 1054 - DNA, 24665 bp, synthetic construct
  misc_feature 1..24665: note = Synthetic
  source 1..24665: mol_type = other DNA
tcatatcgaagaggttgccataaaggacatcatggatcagtatggttctcctttgtatgtgatttcagagccttgtatccgcaatacttatcgacaagcccaaaaagcctttgcttctcgttatccgcgagtgcagttcgcgtggtcatacaaaaccaactatctaaacgcggtttgtaaaatttttcattctgagggagcctgggccgaagttgtttccggatttgaatatagtaaagccgttgaaaatggaatttcaggtgatcagatcatatttaatggccctgaaaaatctaaggcggatttagaaagggctataaatgatggagcgatggtccatttggatagtttggatgaattttattttctgggagaactggctcaaaatctcaataaaaaagcaaaggtagcccttcgaataaatttagatgcgggcatctatcctcagtgggatcgttttggctttaaccttgaaaatggggaagcctggcacgttctcactcgtgtcatgttacatgattatatggaattattgggtttacacactcatatgggaacttatatcactgccgtaagtgcatatgctattgcggcaaaaaaaatggctgacttggctattcgcttgtttcgaaagtttaaccatagtgttaagtatcttgatttgggcggtggctttgcatcgaaaaacaccctcaagggtgcttaccttcctggctcagacacttgtccgtctttcgatgattatgctgaagccttaacctctgctttgcttgccagtgaattacctccagaaagacttcctcttctgattttagagtgtggtagggccttggttgatgatgccggttttatattgggacgtgttttggcaaacaagcgcttggtggatggacgcagggcaacggtgattgatgtcggcgtaaatatgctttttacctctttctggtatgagcatgacgtactgccaactcgattgaaatcggaacaaacagaaaatacgacgatttatgggccgctttgtatgaatatagatgtgatacgggaagccgttcaatttcctcttcttcaaagaggtgatgctgtggttattccacgtattggagcctataatatgacccaatggatgcaatttataaagctaagacctcctgttttgctgattgatgaggatcgaaaagtacacctcattcgaaagcaagaaacctatgaacagttcaatgcaatggaaacgattcctgagcatcttaaaacataatgggaacgtataaaaagaacatattatttttgggagaggccatcctaaacagttatgctcaggtgtttttttcacgaaacaaaacctttgccttactgctgcttttggttagttttttcgatatctgggctggggtagccgggctgatttcattggtggcggcaaatgtcattgcttttataatggggttttccccattttatatcaaagatggcacctatggttttaatagcctcctggttggattggggataggtttgtattttcagccaggtattgaaattgctttacttgttatcctgtcctcagttttaacactattcatcggactgtttctacagggagtgcttacaaaatatgccttaccttttttaagtgttccttttttgttaggtctatggatgattatgatggccaatagtgatctaagcactcttggtattagtgaaagaggtatttatgaagccaatgaattttatgatattggggggcagtctctggtaaatctatatcatagtattcaaaattgggaattgcatgcttcggtatctatttttcttaaatcgcttggtgccattttttttcaaagtaattggctggccggcctactcattctcttaggcttacttttttattcccgaatcgcctttacacttgcgatatttggattctatgtcgcttatttcttctatggcctgattggggcaaatatcaacgagttgagttatacttatattgggtttaattttattttaacttcaatagctctgggcggattttatattattccatccttttactcctatttatggatagtgcttcttttgccaatagtggtattaattaccctaagtagcatgcagtggtttgcaccttataggctatccatttatgcacttccgtttaatgtggttacacttctattcttatatatattaaaattgagatataagcctaatgcgaacttgcaggaggtaagcgtgcagcacaattcccccgaaaagaatttgtatttctttagaaataatgcccttcgaatagcctccataggattaccagattttcagttgccttttattggagaatggacggttacccaggctcatgatggggaatacacacataaagatgaatggcgtcatgcctgggattttgccattgtagatgatgaggacaaacagtataagaaacagggtaatcttgtagatgattactactgttacaataaaatgatcttgtgcccagctgatggggaggtcgtaaatattctggatggtgtttcggataatgaaataggcgaagtcaatttagatcagaattggggaaatagcttggtcattcatcatcacagtggcatttattctcagttgagtcacttcagggaagatagttttaaggtgaaaaagggagatcttgtaaaaaaaggggacatactgggaacctgcggtaattcaggaaggtcaccctttcctcacatccactttcagtttcaaacgactccctacattggttcgtccactttagagcttgctctgcctcattatatggagcgaatagagaagcaagttgtgcttaaatcgtatgctaagcctgcaaaatcggctaaactacttagaggtgaagctcaccctttattggttcaatctttgggatttcaggcgggacagaagtttagcttcgaggtgctagcagggagtgatcagagaaaggtttttgagcaaaataaatgggattttgaagtgaagtcggacacattggccaatacctacctatattgtagttctactcattcaagggcgtattttagtttggaggctaatgttttgcagttccataattatttagggaatagacgttctcttctgtattatctgtacctgtcttgctataaagtttacctgggtttctacccaaatttgaatgtagaggcagaattacctcccaacctgatttatggggcgagaaacctctttgttcaggattttatagctccattctacatttatctgcgttcggagtatcaaatgaattatttgaataaaacggatggaataagttccgaaaaaattgaactggaatctaaagtgatttgtagttatcctaataagaaggagtatttgaaaactgaaattagtgttgaaagtggagcttcactacgaattaagattcataaaaaaggtaaaatactggaaataagatgtggaaatatgcaagcatattaattttggctattttgattagctcattagttcatgctcagaaaactttgagcgttagtaaggtgaacatggaaacttacgccctttatcaaaaacaggaatggaaacaattgattatggtcggtgaaaattccattaaacaaggtattgacttttacctcttacgtttgcgaatgggtatagcctattacgagttggagaagtatcgcaaatcagctgtcctttttaaagatttatatcgtcaaaatcctgaggatgcaagtgtaaaagagtatttgtatttttcttatcttcttggtggtagaagcatggatgccaggcgtctgcaaaacgatttagcccaatctattcgcgataaatacgatatagataaaataaagcttatttctggaatttatgctgaaaccaaatatgaatttctggatgattatgccattgattccgaccaaattcaacaacaaacggttcgcaatcaatttcatcattatagtgtggggttaaatcatcagctgggcaaaagaactgagatattgcacgcctatagccgcgtagatttaaagaattctatcgtgtcggagggcttccattttaacgaaaaggtcaagcaaaatcaatattacctgaagagctcttttcaaatagactggggaactgagctggctcttgcaggacattgggtacagacaaaggtgaaaggatatcaattaaacgcaaatggtgatggacgaaatggagctgtaggatctgctcttgaaattgctccctatgctatcagtcaaaacagttttgttggttatttggggcttcatcaggaactatccaattggaaggtgaatcttggactattgtattctaatatggatgatttgactcgttggcagcaagaggtatctgttcatttttatcctcaggggaatcttaagttttatttgctagctagttttaccaatcagttggaggagaaactggaaagaggctggttgaatcgtagatattggaaaggcggagcaggttttcaattagcaaaaaatacctgggcacaagtgggatatagttttggagatatgttcaagcatgtagagaacgaagggtattctgtatttaatggcgtaaacttgataaaaaacaaaaaagagataagtctctatcaatatctggttaaaggaaagttgaacctatttcttctgtatcaaaatcagaaagaaagaaacggctatataataaacgataagataaatcgtcaggacattaatgtacaatcgataactggaggaataacatggaacttttaaggataataaaacacgtatcattcaattttcttattttgttaatggtgtgcagcaagttgtcaggacaagactttaagactgttagaacagcttttgagaaaagttatgaatatgagaaggaaggcgacttttcgcatgctcttgatcagttgaaagaagtttatgacgaggattcgtatgaaattaacttgcgtttaggctggctcaattatcaggcaggtgtatttattgagtctattgcgcattatcagcgtgcgattaacctgaagccctatgctgaagaagcaaaatttggtttggtattgcccaaagccgctattggaaaatgggctgaggtaacaaatctttacaaagaaatactagagatatcgccaaaccaaaccgtggctaattaccgattgggattgatctattatggacaggaagcctatgaaaaagcacatattcactttaaaaaagtagttgatttgtacccttttaaatacgatgcccttattatgctggcatggacgaattatcgtatgggaaaaagtcgtgaggccttaatccttttcgaaaaatgcctgtggtattttcctcaggatccttctgctcttgaaggactcagattattgggggctgatgccaactgattttttttaaatgtggtttaagccaaatccttctttttgcttgtagtgtaatctgctagaatcaagttgcaagcacaacttagttgattatataggagagaaatgtacaggcttagcttaatcctttgtcacgaatttgtccagaaaaactttggcgctatttggtgcgagagtgaaataggaaagggcacaagcttcttttttaccatcccttgtgagaaacggaaggtttagtctgagatctgagtgttttaatttagccgatgattcaatacatcccaaacctcaaaagtttgggattttttattggttttaattataaccctaaatacatggagaaagcaataattcccataatggcaattataaagacataagcgtaggggctagcaaagttcagggtccaacctctcataggatcttgcttaggaacacgtatcctggggtctttgggattataataaaaaacacctcgccaatttgcggggtttctatccataggatcgttaaaattattttttgcgttcatgatctgtaatatttattgggtttaaaactaatcgggttgactaaattaatcaatttatatggcatgtcgtatatcccaagagtcgtttttattgtaaagctaaatttagaataagtttagaataatgcttgtgttttattcgaaataaaatacaagaaaaggcgacccaattgagccgcctttaaaatattacaaatatcgtgtttggtttagaaaatacccggaatacctggtagttgaccaaccatggctagagatacaatacagatgataaacatagcacctggaataattagtttctcttttaaagataattctttagcacgctcgcggtcaccaatgagtcccatattatcaagaagcatagtgaaagcccatccaaatacaggatttacaaaggcacaagcgaaaatacaagttcccgcactaagagaatctttgtgcttgtgaaccatctgcattcctgcctctaatagaggtaagaaaacacctacgatcaatgcgactcttaaaacaggttcccacatagctaaatccataggataaccaagaacagaagccagtacacaaaggatagccgttagaacagcacctccaggaataggacgcttagcaatagcagcaggaatcatataggttccccatgaagaggcgatattaccaccacctaatgcaacaccaataacctggcgaatagaagcgacagtcatggtatcatccacatccataagaacacttttagcctttttagggtaatttaactcctggaaaacacggtgtcctaaatagtcaggcgtccacatggcaacagcaagaatagcgaaaggaatcacagctataaagtgacccaaattaggcaaaccaagcttccatcctgtatcttcaccccaccaccacataggattcatatgaggaagcccaggttcagtagtaaaagcgaaatcagctcccatcgtaaaggcaataacaccagctagtgcagaacaaagtggaatcgctaaccagcgcttgttaacacgcgccaagtaggcataaatcaaaatggtgacaccaataacggcaaaagataaggcattaatacccgtacccgatgaccaaatttctagtttgctaatctgaccgattagtccaacagcacctaagtagatgaggagaccaccacgaacaccaacacctgttaggttcatcaatttggaacctcctttggtaatacttaatgttagtccaaaaaccccaattaaaatacccaaagcaagaggatgtcctccagcggcagcaataattggaataagcggtatcataggaccatgagttccggcaaggttagctgttgggtttaggatggccgaaaaaagaaggacaaaaataccacctgcaatcagaagttcgtaacgaacgttctctgcaacaaaatcgggagttagtccgaattgagcagcaaatacagcaaccattgcggttaccatcaccactttaccaatagtggctgcaagagctggaaccaagtcttccagttcgatgttgaaatctctgaatggcaggtgaatgcgccagcgtctgagtttcataatgattaattcgtgttcaagatactcttctcgactctcgaattcgttcgcttttttacgttgcgatttgtaggatttttgatcttcctgcatgattttcttttctattaggtttgtttgctgtaggtctgtttcgcagctttttaattgatttcacatcagtgaagtcatcctacagtaaattattatgcgcggtaaaactagtcaatccacatgatagtgcaaatgaaaacaatcagccagacagtaagttgaggaattaagtaaaataagatagagaaagccaatttaaattaatctcttaatttcagatttactgttaagaatttaaaagatagacgatttggaaagtgatttacatactaaatcgaaccattttgattttaatgttttttgacaattagatcatgagaggggctacggatagctgtttgaatcatctttaaatctagatgtttagatgtttgttttaatcataaaaaacactttaagcgagtagagtagaatgtttgcagtaaaacaatatttagtctttcttgtaattaagttaaatattgatctcttgattgaaatcattaaaaataagcattgagctatctaaagagtctcggtgtctcatttaagaatttcatgaggcctttcaatacgcaagccattctttatgtgaataccattatactaatggctcctccacgtttacggcactgtgatttattccttagagtgggagataaaggtgacggctggcttttaaattcaaataaatatttataaagaattatttctttatcaattcaacttatatactattctatagaacgagcgagtggatgtttatttaaatctagctagtttaaacaaacacctgtttaatgatcgaaaaattgtttaaaatggattaattttattgactaaaattcattataaaaacacagcctctcattattcttgactggaaacaagatatatgtaaaataatgttaatgttctaattgattgttatggaatattcattaaataagaattatttaactccaacgccagatgactgtgttgcccgaccctcaagcattgggatcatgggcaaggaagatttgatacgaaagatttcacaagagggcacaggtattacctcttatgaaactgaaagtttatttaagcgtttggaaacggttgttatcgattgcctaaaaaaaggctatgcgattaatacaccacttctcaacatgacataagggcttttaactgaacatacaaacaaaaatgaccagacacagttccatgactatacctattgactccagattgtaaagctgtgtcttcagattgtaaagctgtgtcttcagattgtaaagctgtgtcttcagattgtaaagctgtgtcttcagattgtaaagctatgtcttcagattgtaaagctgtgtcttcagattgtaaagctgtgtcttcagattgtaaagctgtgtcttcagattgtaaagctgtgtcttcagattgtaaagctgtgtcttcagattgtaaagctttgtcttcagattgtaaagctgtgtcttcagattgtaaagctgtgtcttcagattgtaaagctgtgtcttcagattgtaaagctatgtctccagattgtaaagctgtgtcttcagattgtaaagctgtgtcttcagattgtaaagctatgtcttcagattgtaaagctgtgtcttcagattgtaaagctgtgtctccagattgtaaagctgtgtcttcagattgtaaagctgtgtcttcagattgtaaagctatgtcttcagattgtaaagctgtgtcttcagattgtaaagctatgtctccagattgtaaaggttttattccagatcgtaagatcttgcaaatagggtaattaaataagaccctgattgtaagctaaacaaaaacaattcttctacttgaagagtcggctatgtcgactcttttttatgccctggttttaacaattttttcttataaggaaacaaaaaatatcagggctgagctcaaccccaaagactagtgagtgtggcactaaaagactagaagatcccaagtacaaaaaggagtgagctccattcttggtgattctagtctctaatagtgaggccttagagtttttgggagagagtgattaggctctttgggatttacatattccggtcttatatgtaagttaaaaatttaaatcatcttagattgaatctagatagtaagatacttttattttacttaagaattagaaactgtttgtaagttagttttcataaattagtctttgctacatgactagttcttatgatatagatttattaatgcttttttttaagttttaatagggatgtgtgattttaaaaggaggagttcatgaaacattcagagatgaagaaagcgactgattagagccgctttaaatgttttcacaacggaataatccttattgtgatttgcttactgaatgtgattcaaacttaataacaaaatatataatatacaagtgttatgaaaaagattttaggacttgatttgggaaccaactcaattggttgggctttagtagaaagtaattttgaaaataaagaaggccaaatactcggtatgggatctcgtattatacctatgtcgcaggatataatggacaagtttggttctggtcaatctatttcacaaacagccgaacgcactagatatcgtggtgtgcggcgtttagtagaaaggggtttgttgaggagagaacgcttacatcgtgttttaaatagattaaaattcttgcctgagcattatgctgattcaattgatttcgagaagcattttggacaatttaaaaatggtgtggaagtcaagttaaattatagaaagaataaagatggtaagcatgagtttctgtttatggattcttttaaagagatgattaatgagtttggtgcaagaggactgcagacaaaagtacctttggattggacactttattaccttagaaaaaaggcattaagggaaaaaatatcgaaagaagaattggcgtggttgcttttaaactttaaccaaaagcgaggatattatcagttaagaggtgaggaggaagaagtcgctgaaggaaagataaaagagtttgtttcattaaaagttaaagaggttatagattctggggacgttattaagaagacaggagataagctttatgatgttgtttttgaaaatggttggcaatacgataggcaaataaccaaaacagagaattggataggaaagacaaaagagtttattgttacaacaactacaactaaaaatggggacttaaaatattcctttaaagctgttgattcagaaaaagactggattgctataaaaactaaaacggaacaggatattcagaaatcagacaaaacagttggtgaatatatttttgataccttactagaaaatccttctcaaaaattgagggggaagcttgtgaaaaccatcgaacgtaagttttacaaagcagagttaaatgcgatactaagtaagcaaatagaatgtcatcccgaattgcaagacagagatttatataaggcttgtgttgaagagttgtatccaattaacgaatcgcatagaaatgggattatggaaaaagggtttgggtacttatttgttgaggatattctcttttatcagcgccctttaaaaagtaaaaaatcgagtattgcaaattgtccttacgagaaaaaaacatttgttaaagacgatgttaggcaagaggttcccataaaatgtattccaaaatcaaatccgttgtttcaggaatttcgattatggcagttcctgaaaaatttaaaaatatatcagcgcgaagcaattgtaggaagtaaaagtgagattgatgttgacgtaacttgtcagtttataaaaactgaagatgactggggtgatttgtttgattttcttaataacaggaaggaaatcgatcagaaagcttttttgagaaaatataaactaaatgagaatgcatatagatggaacaatgttgaggatagaaaatacccctgcaatgaaacacgagcacaatttatatcgcgattaaaaaaagttaaagactcaagttatgaggaatttttaacaacaaagaatgaacaagaactttggcatttgatttattcggtaaaagacaagttggagtatgcaaaggccttgggaacatttgccaatagaaaagaacttgacgaagctacttttgttgaaagctttattaagtttccaccttttgatagtgactatggtgcttattccgaaaaagcaataaaaaaactattgccactcatgcgcaaaggaaagtattggagtgatagtttaataaacaaggaggtaaaaggccgaattttaagtattcaggaacgcttggaaagtattgattacgacgaagaggtttttgcaaaggataaaaacaataaattacaaactattgtagatgacgatattcctaaacaattattgaaaagctttctcgattatcctaaaaacacagcattaaaggggttaaacacctatcaggcttgttatgccgtttatcaacgtcactcggagataggcgatatcctttgttggaaaaatcccaaggatattgatgtttatttgcacgagtttaaacaacacagtctgcggaatccaattgtagaacaggtggttacagaaacactgcgtgttgtaagggatatctggcaatatcatggtagtggtcaagttaatttttttaatgaaatacatgtagagcttggacgggatatgaaaagctcaagcgataaaagaaagtctattgctgccattcaaagtgaaaatgagaataccaatcagcgaattaaagctttgttgcaagagcttaaagaggatagtactgtaaaagatgatgttcggccttactcaccatcgcaccaggagatattaaagatttatgaagagggtatttttaatcaatttgaagcggatgatgatattttaaagattagaaaaaatacatcaccaagtaaaaaggatatcgaacgctataaaatatggctcgaacaaggttatatttcgccttatacaggtaacccgatacccctaagtggtcttttctctgagcgttaccaaattgaacacattatacctcaatcgcgctatttcgataattcgttgagcaataaagtcatctgtgaaagcgaagtgaatgaagataaaagcaataaaacagcttatgaatacattaaagagaacagtggtaaaatactaaatggttctattaagttgcttacgattaaagcttacgaagaccattgtaatagaagctttaagaaatcgagaacaaaactaaaatatctgttaagtgaagatattcccgaaggttttattaaccgtcaattaaacgatagtcgctacatcagtaaaatagtgaaagccttgttgagtaatgtcgtgagagaagagggtgaaaaagaagcgactgccaaaggcttagtgcctgtaacaggtgctattacttcgaaactgaaacaagattggggattgaatgataagtggaacgaattaattacaccacgatttaaacgactgaacgaaatgaccaagtctaatgactttggttattgggacaaagacatgaataggttccgcacgatggttccggacgaaattgcaaaaggctttagtaaaaaacgaattgatcatcgtcatcatgctcttgatgctctgattattgcttgtgtaacgaaagatcatacgaattatattacatcgttaaataccgaaaggaagaaccatagtttggttgcaaagttaaggcaaatagagaaaaaacaaattacagataagcatacccaaaagccaaaaacaatagaggtggcaaaagcatatcatcagccatggtctggttttaccagcgatgcaaaaacagcactagaaaatatactcattagttttaaacagaacacaagggttattaataaaaccaacaacaaatacctctcctataaagacgaagacgggcaaatacgattaggtaaagatggtaagcctaaaaaagaattaacgaagcaagtaaaaggagacagttgggccataagaaaagcgatgcataaagataccgtttcgggtgctgttaccattaaaagaaagaaaaaaggcttggcaaacttaacggcgtatttagagcaatggcaactgattgttgataagccaatacgtagaaaagtacgtaacctaaacgatttgtttaatggtgatgtaaaggcaatgcagaaacacctaaaatcgcaccccattacgattaatgatgaagctgttgtaaaaattgaagtatacgaaacggttgaagcaactgcaacaagaggaataagcacagccttaaccgggaattttacacgtaagcagttggaggctgtcaccgattcgggtattcagttgatctttgagaatcatataaagaactataccgaagaggatggtaaagaacgttttgatttggcttttaacactgaaggcttagaagatttaaataataatatagcaagtctaaacagaggtaagtttcataagcctatctataaagtgcgtttatacgaagttggcaatcgttttgctgtgggggaaacaggcaataaacaagataagtttgtggaagccgcaaaaggaacaaatctcttttttgccatttactgggatgaggaaaagcaaaagagagtgtacgatactgtgcctttaaatgaggtgattacgcatcaaaaacaaacagctcatgttaaagctaaagataatacacctattgccgtaaaagcagaaaaaggacaattccttttcactttatcgcccaacgatcttgtttatattcctactaatgaggaattagaagataccagtttagtcgattttaattgtttgaataaagatcagttagagagggtttataaaatggttagcacaactcaaaataaattgcaatgccaacctgtttattatgcaagttcaataattgaaaaagaaaatggtagtggtaataaaactgaacgaatactcaaatattttaattcgaatgatgttttggatcaaggaggtgaagctgtaatgattaaagaacgttgttggaaattaaaggttgatcgcttaggaaatgtaatagaagtgaagaaacatgtctctgcacaattgcagacagcatattaactaaatttcgtgttatgattaaacgcacactgtattttggtaatccagcctatttgcgtcggcaagatgggcagttgaaggttttgctgcccaaagaaaaaaccgaattggctagtattcccattgaggatataggagtgatggttctcgatcatcctcaggtaacgcttagccaagcgttgttgtcttatcttatatcaagcaatgtggcactaatctcttgtaacgaaaagcaccatccggtcggtttatttttaccactggatggtaactcggtacaatcggagcgttttaaagtacagttagatgccagcgaacctctaaaaaaacagctttgggcacaaaccgtaggggctaaggtcgaaaaccaggctcgtttgcttgagcgatttggactggatgccaaacgcctgcatgtcttgattccccagataaaatcgggcgatagcgagaatgtggaggctcgggcggctaagatctattggggagctttgttcgagaatcacgattttgtacgcgagcgatttggggatgtgcccaatccgcaactcaattatgcttatgccattatgcgggcctgtgtggctcgtgctttggtcagttcgggattgctgccaactctgggtatttttcatcgtaataagtacaacgcctactgtttggctgacgatattatggaaccctatcgcccgtactgcgacgaggtggtgatgcaaatgttttacgatggagaattggaagatgacaagttgactaaggaacaaaaagcgaagattttatcagtattaactactgatgtggtgtttactggtaaaaaaagcccgcttatggtgggtataagccgaaccacctcttcgctttacgaatgttttgcaggtgagagacggaaaatagtatatcccgagttttatgacacagtatgcacgcagtcaataccgtaatatgtgggttttggtttttttcgatttacctaccgaaaccaagaaagagcgaaaggaagcatcgcgctttcggaaagaactaatgaaagatggctttaccatgtttcagttctctatttatatgcgcacttgccccagtcgtgaaaatgctgatgtgcatgccaaacgagtcaaatatttattgcccgaacatgggcatgtgggcatacttaaaattaccgataaacagtttgccatgatggaactcttctatagtcaggaagctgcggataaacccggtgtggttcagcaattgcaactgttttaattatccctgtcattgcgaggaggcacgacgaagcaatctcacgaaagacttattgactagaattagaaatatgaacttaaagaataaaaacgaagccctgaggcttcgttttttttatttctgttgtttggtacaagttgttgactgctagcttgtagtagccgacaccttgtgattccacacatcaaagatacattctgtaagcaaatcacaacggctctctgctttttaattctttttcaatacttgtgattccacacatcaaagatacattctgtaagcaaatcacaactctactaatgtaaagatagtatttgttttgcttgtgattccacacatcaaagatacattctgtaagcaaatcacaacactcctgcaaaagcattcgagaagctttcgcttgtgattccacacatcaaagatacattctgtaagcaaatcacaacacagtgggaagctattaccaccaaagcttacttgtgattccacacatcaaagatacattctgtaagcaaatcacaacccccaaaagcagtcaaccctacaaatttaccttgtgattccacacatcaaagatacattctgtaagcaaatcacaactcccacaactcttcatcgtgcattcggagtcttgtgattccacacatcaaagatacattctgtaagcaaatcacaactctcttcgttgaaatagtatttaaacaacacttgtgattccacacatcaaagatacattctgtaagcaaatcacaacaaattgtcatcgtttaatcttttatttgggcttgtgattccacacatcaaagatacattctgtaagcaaatcacaacaatgtgtaggccatttttgttttggttgtacttgtgattccacacatcaaagatacattctgtaagcaaatcacaacagctgctttaattaaaggctttgcggctttcttgtgattccacacatcaaagatacattctgtaagcaaatcacaactagacccgcctccgagctttttaacttcggcttgtgattccacacatcaaagatacattctgtaagcaaatcacaacattgaaaggttaatgatgtcaccttctttacttgtgattccacacatcaaagatacattctgtaagcaaatcacaacccgtcaggctggaggcttaatttgtatgcccttgtgattccacacatcaaagatacattctgtaagcaaatcacaacaataaatggggcttcttttttgagtcaggacttgtgattccacacatcaaagatacattctgtaagcaaatcacaacaaagctaccctttatacaagattagagcgtcttgtgattccacacatcaaagatacattctgtaagcaaatcacaacacaattctatcatccatataaaaaggatgacttgtgattccacacatcaaagatacattctgtaagcaaatcacaacaatgacgccacgcgtaacgggtgaacttcccttgtgattccacacatcaaagatacattctgtaagcaaatcacaactaggttacagcctaagatatttggcggactcttgtgattccacacatcaaagatacattctgtaagcaaatcacaactcttaattgaattaaacgcccatgcgcccacttgtgattccacacatcaaagatacattctgtaagcaaatcacaacattgaaatggggattactttttgattgtaacttgtgattccacacatcaaagatacattctgtaagcaaatcacaacgcatttcctcagctgatgcagctaaaggagcttgtgattccacacatcaaagatacattctgtaagcaaatcacaacacttaaaaaaatagagagctaaattgttggataatttgttctatcatgtttcttaaaaagcttatttattcaatttccaaccatttctctaattgcatcgtttcaacagctttgttgtgcatatatttaaagttggcttcatcgttgaaccagtctattgtttcattgcgcttcaatttcgttggcttatgactaaggcaagtcaaataggaactccatccatattcaatagggtgagaacagaacccatggtgcactgggttgttgtgaatatagagaaccaattgtttaaaatagctttcatcttcaatcagctttcgcttaaagggacgctcgaataaagcaccgtggcggttgttgcgtttgttataagccttggtgtaagcattaaataagtttgaaaaatattgatgtggtggtttcagacctgacaggtctatttcattaacatcctttagcctgaccaacaaatgaaaatggtttggcatcagtacccacgcaaaggtatctgctatcggatcgatatacttttcgtacaagtttatgaaatagttgtagttatcttcttcagtgaacaaatcgcagctatttattccacgattgtagatgtgataatatctgccggtttcaagaggatatatggcttgcattttaacaggtcttgcagtataagtttcgttttttttctgatcgtaatactcttaaaattaaataattattatagaattctgttgatgctcactatttattctataagcttaatccagttaaatagctttattgaaaaatataaagagaatgctttaaggagatactattctgttagttttggtttaacactgatttttattgcagactgagggttgtttacttagatgggaataaggtgtaactggtattgaatcgaaaggtttgataaaatatataaatgaagagtcaaatgaattacagcgaaatagaaaacgggttaaaagtgtctaaagacaggtattataccttattaaaggggagtccttcggtataccgcatgcgcttgctactattctttttaaggctgctctttggttcggtggccattgcttcgggcctactgcttttgttttccttatttatgaatattgggcagagcatcgccaatgtctttaatctaactgatgtgccactttacgaagaagggaaattgagttttttaagtattaccttaggtatacttatggctgtgtcactatttagtttgtggctaattaagctggttcgtcgcagaaacgatcacatgtctgatttgtatgagctattggatacccactttgcagagggcaaaaagctcttggatgaatacaggcatacgataagctaaaagggcgttctaacaggttcacaaggagactaaaaataaagagagaagaaagacttatgacttatagagtaggcctactgttaataataaatgttatcgagcttgtacaatagatgtgatggtgcttgaataaaaggagtgaattatgtgcaattttttatgaaggaatggcagcttggacaattttgatcggtttaataaggctagtaaggaattatctgatttgtattgtacttattagggtggtgagattataaatgtatgacaaataggtgtatagttattttttttcaagttgataagatcacacaagcaagctctttttgtccttgtaatttgaaatagatctgttttttttgctaaattggtatgtgtattcatacattttaaaaaagagattatggacttagaagaaattcaattagttgacataagagatatgctttcaaatagtgtatataatattttgattgataataatatcttaactgttggtgatgttatgaatttttctatttcctcctttgaagctattgatggtgttggaccacataagggacacgattatgagctatttaaactgttgttaaagaaaaagcctgaaaaagtaattaaaagatataaagaaacattgcctcgggtaatacctgataatctttgtgctattgatattgaatgcgtagaacatttaatgcacaagtctgtttttaaattgcttattagcaatgaatataaaaagctgggagatcttactggtctgtctgttgaaaagtttttgcattttaagtcttcatgtagtatcaaggctgaaaaatatgctgattttcttgttgttgctcttaaaaaaccagacttgataattcaggcttatcaagagagtttacctgtgattattccatctgagtttcatgtcgacgatttttttaatggattttcaatgtttattaatgagtgctacaaattaagaattcgtcatgctgtttcatctaaacaaaagggtattatagaaagaagtaaacgtatcgttcaaaatcattttgctgtcgcaaatgataaggcacaaagttgtatagaaatatctaagctgttgaatgatttatctgtagagagggtaagacagcttctacatattgaaatagattattttaaaaaactatttgctgaaggaaaagattcagacagtcgtataattatctcagaagctttattatcattttacacagatttaaaggcgtgcttattttcaaaggtttatgcagaggatctgttgtataaaatagtgagcgataatttttttaatcttaattcggattcaaaacagcatggttatttgatgtttatgctgcgaattttagggttttatctagaaagaagctgtcatgctctcttaagccatgaatctgttttcctaaaattatcagaacttagagatccatttaaaaaaagatattttaatctatctgcacaagtctgtcgatttttaaataactatgttttatctattgatattaattctctttttgtagagataagtaagacgcttgattgttctttagatgagattttgttggtttgtgagaacagttcttttattgataatttgtctgttaatgatgcttacttttttcaaatgaaattctcacgtttatcctctttagaaaaaatggcatatcgggtattaaaagaaggtgaagagaagcctatttccagatatgagcttgcaagaaagattaatgaaagactagttgagacagatagacatgtaacagcagataacttagttgctcagttaactagtcataaaagatttaagtgtcaggggagagaatattgggtgcttaaagagtgggatgtgaatgttgataaaataaaagatgtgttggctaagtgttttcgaatagaaaaaaagccattaagtattattgaaattcatgatattctattacatgtctttaaaagagacaatattagtattaaaactgtgcgccagtacatgtatcgacctctttttttttcaattactagtgatgatgaaaggaagtatatttctaaagaatatgctaatgtttattctgccttttcagttataaaaaatagcaataagcttaattggagattagttttagatattttaaataaatatccagacttaagtttaaggaatctatttacacattgtcagcgtgttaatataaacgttagtatgaggatgttatcagaatatctatctaaaaaagattgggttaaaataagctatggacgtcctagaaaatacgctgttgtttctaattatattgaaatgtttgaggctgaagaacaagctaaaccagtcaataagataaagttttctattttggaaaaattagatagaaatgataaaaaaccattgtctgatataattaaattctgtgagctaaagcataatatgaacaagccatctgcatataagttggtaagtaaaatggaggatgatatggagattattaaaaacgttattgaccataaaacttatgtgagaaaatattaaagcttagtttaatcaacagaatccaaatgttttttaatgaaattacaattaaaagactgcattaacagataaagacacatgcatggttgataaaatcgtagacagtgttactgtaagcaaatcacaaggctataaattggtctaactcatgcttttgaaattattgaatgattgatctgaaaaaaaagtcgctcccgtgggaagcgactttttatattcgagattgcctttatctattagttaaggcaaggatccgtttcttgcttctctttaagcaagttctcctttttcttaagctccgatacgatgatgttgttcttaaccgttctaaagacaatatcctgggcttcagcaaaagaaatatcgtagatgcgatccacctggcgatactcttcagggtattttgccagtaatttatcgtaaaaaccatccagtaaatcattgctcgggtttctgaattccaatttcaactcgaaacgacgaagcagagccgaatcaatcatatcaatttgattggtcgccgcaatgataatggaatgtttcggcaaggtgtcaatcagttgaagcatggtgttgaccacacgtttcatctcattactatccgtgttatcgtagtcacgctctttacccaaagaatcaaattcatcgaagaaaagaacagcctcttgagattcgaccaagcggaaagccgaagcaatattcgcagaggtttctcccagttttgaggaaacaataccacccaggttaatcaccttaattttcttacccagcttacgagcaatggcacgggctgtcatggttttcccacaaccacttttaccgtggagcaggagtttattactaagcgggagattgtattttgataagatatcgcaatgctcatactctcttaagaattgattgatttcagcacctagcttttcatcaaaaacgacatcttcgaaaacgacatgacccctgttgggaacatataatctttccatttctttaaaaattttgtgttgttgtgtttagactgcaaacctacattttttttggaacagattttcagtttaacaacatattttaacttaaggctattcctatagtcggaaaagtcaaaggtcataagagttaaaaggtcgaaaaggttatgaatttagactctggcaacacttttgattaatgctgactaatcagattatgacttgtgcagtttgtttatagtcatagcctaatagagatattattctgcgtcaatctgccttatcagcgggaaaccatcgctgatgtaaatcagaccatgacatgtgcagcagcttatagtcatagtctgatggggttgcgctatcagcgggaataatttaaagcttaaaaagaggagagaagtctacttcaggtgattccccaatcttgaattctggaatttctaccacagggcagtcgtagccatactttttcaggtaggttttaaagacctgaatggaatcttcaagaatcacatcgctattgttaggataatggttataaatcagaccatgaataggcagtttgcggtttgctgccagttccagagtcattaaagtgtggttaatactccccagcttggatgatgtgatgagaataagcgggtgttttttttcttccagataatccaaaagagaataatctagagtgataggtacatgaataccgcctacaccttcaattaaaagggtatcgtaagctgattccagcttctctgttgaatcattaatcacattcacatctatttcctcaccatctatcttagcggctaaatggggcgaagccggataggtgaagacataaggacaagttgttccatctttgtcaacctcatagggctctacacccataatctcacgatgagcaagtatatcttctgaaatgccgacacagcccgtttgagcaaacttctgtgtcatcacgttcacatccttatcaagaaggtatttagccattaaacctgtagcaaaggtttttccagcgtctgtgtcaattccgcttataaagtaagtactcatatataattagtgatttacgattgataattaataattcttcattactaatcgttaattgatttaggtttcgcaataaagtaaatgggctgatagcttaaaggaactccaagttctgttccatacaaatctttatagcgctcttcgaagttctttaggtctgattttgtccacaccttacctggtaagccgtttacgcctgtttgtttcatatgatgcaagacaccaatgggctcagggaaatggcgggtgataatttctttttcgctccaaacaacatcaaaatacttatccagaagtcgtaagtgtgcgttataagtgaggtaatctaagccagtgccgtttaccgaacgaatctcacggtaattttcaggaccaaagctgctaaaagcgagaaagcctgttggagataaagctttagcacatttttcaagaaaagcatccagattatgaaaccattgaaatgtggagcccgatagaatcaaatccaaattctgtggcaaagccttagcttcaatatcaccacccatgaattgaatcttcgggttgagagcttccagtataggcgcgtattcttctacaatatcattagccagatacttgtttgcatcgaagaactgaaaaaacttatcggtaagcacagcaggaccacaaccaatctctaaaacggaattgtgatgttcaggacaacgccatctcatctcagcaatcagccgagaagcaatagcttcctgaacaatagcatgcttgcgataagtggtgatgctcttcacaaaccctttttgtaccttatccttatctatcttttgttgattcactatctatttatctctgtgtattgcctttttgacctttaagacatatcgacttctaatatctcatcccaacttctccattctgagaaacagaaatgaggtagattgaaaataagtttttgagatttattttcccaggccttttccaggttcttaaaagggaaaatcatatctcgagacgaaagtaataccttatcgaa

SEQ ID NO: 1055 - DNA, 24650 bp, synthetic construct
  source 1..24650: mol_type = other DNA
  misc_feature 1..24650: note = Synthetic
attgcttttagtagattgagaaataaatatgctgttactgagttatttaaagaggtttcagtaaaggtaggcgatagaccaggaggatatactcgtattatcaagttgggaaatcgtttgggagataatgctgaaatggcattgattgagttcgttgattataacactacgtacaacgtagaaaaatcagcagctaaaaagaaatctacgcgtcgtagtagaaaaaaagctgagacaacttcagcttctgagacggaaactactgcaactgaagagtagttaaaagtgtaaagaaaaaacaagccatctaattttttagatggcttgtttcgtatttgaatgttttaagcgttttggattatgataagatacagggcttaaattcgttcttttactttgtagcgtttttctttgcgtttgttacgtaggataatttcgcctaaaaatcctgcaacaaagaattgggttccaataatcattgttgttaatgccatgtaaaattcaggtctgttagcaatgagtcggttgctaggatttatgaacagtttgtctactcctaggtagaaagcaaataaaaaaccaataaagaacattaaaactcctaaagcgccaaaaaagtgcattggtctcttaccaaagtgggaaataaaactgatagtaattaaatccagaaatccgttgatgaatcggttcattccgaattttgtttgcccgtattttcttgcttgatggataacaactttttcagttatttttttgaatccagcattttttgctagtacaggaatatagcggtgcatttcgccgtttacatcaatatttttaactacttcatttcggtaggctttcagtccgcaattgaaatcgtggagctttagccctgatgtttttcgtgctgcccaattgaataatttagaaggtagatttttagttaattttgagtcatatcgttttttcttccaacctgaaactaaatcaaatccatcgactttaatcatttgatataattcgggaatttcatcggggctgtcttgtaagtcagcgtccattgttatgactacatcgccttttgcttttttgaatccgatgttcaaagcctgtgattttccgtaatttttgaggaaacgaataccaacaacacaagggtcttgagattttatgtctttgatgatctgccacgagtggtcggtactcccatcatctataaaaagaatttcgtaagaaaattcgtaagaaatcattgtccgacgaatccattgatgtaattcaggcaatgattcttgttcatttaagaggggaataacaattgatatgtttggagtttgattcatacagacacagattacttaaacacgaattcctacggaaagcattccttggtattctttgttttttctgaaaaaggaaaccgcttttgagcaagttggaactacttttaatcggcgttcggctatgttttcgagtacttttttcatgaagtcatcaaaaaaagtggcttcagcattttcaggaatatatattcttgttaaaaaaatcttgatgtcttgcaccgagtattcaatgaaggcggtttcattgttaacttttgtttgaaactggcgagaaaattcgctgtcaataatttcaatcatatttattttaattcgtatgattagtgattaatgaagtgtcaatgttgtttttgattttggcaaaaaaaatagtatttttacgtcctgaaaaaaaaacaaaaagccaacctcggcacaaagttacaaaataaaatttaatttagaatggaaaaaaacaaaaagcatatttatctaatgccaggaatggcagcaagtcctaaaatttttgaatttcttgaatttccatcgaattatgaaactcatttattggactggattttaccgattgaggaggaatctctttcggaatatgcttttcgtttggctcagcaaattacacatccgaaacctactttattgggggtttcgttcggaggaattattgtacaggaaatcgctaaaattattgattatgaaaaaattatcgtagtttcaagtgtaaaaactaaatatgaactgcctaaaaaaatgctattggcacgttatacaaatttgcataaattgttgcccgttggtttagttaattcattggaatattggaagcaattttcttttattgattccattacaaagcgtatagaactttatgaaaagtacattgggatgcgatcaatctcttatttggactggagcattgataaaattgtaaattgggagcaaacagagcctttgccgaacacaattcatatccacggtgataaagatgcagtttttccaatgaaatatatttctgatgctattgtagtaaaaaatggcacacatattatggttattaatcgttacaaatggtttaatgagaatttttcgaatctgttgtaataatttccgtataccatttctacttcaattttgctgaggtaaaaggaatagtaaacgctttgttttaggatgtttattattatggaagaatgttttttgtagggaagttttgtatattttgtttcatagtatcaacggtattttacagttggtttgtgtttagaaatattctattattctgctgtagttttaaaaatctgtgaaaataaccctttttttcttgcaaatcttcaaaaaaaatagtaaacttgcacaatgtttcgagattagaaaaactcgaatttaattcattaatcaaaaaaacttcttatattttgaatgaacttgttttagaactaaccgatattcatccacagcagttcttcggcgaagatgaggtaaatattaaaaagataaaatcttgttttccgaaattgaagattgtagccagaggtaataaaattttagcttttggagaggaaaacttgttaaaagattttgccaaaaaaatagaattattgcaggcgtatttcagtaaatacaaccgattggatgaacgtagcattgatagtatttgcaatgctgatgatactgagcctatagaaacaataaatcagaaggaaaccgatgtgattgtccatggagtgggggggaaggttattcgtccgcagaccaaaaatcaattcaagttggtagagttgatgaaaaagaatgatatggttttcgctgtaggccccgcaggaacaggaaagacctatgtaggtgtagcacttgcagttaaagcactgaaagaaaagcaagtaaaacgaattattcttacccgacctgcagtggaagcaggggaaaatttagggtttcttccaggggatttgaaagagaagctagatccgtatatgcaacctctttatgatgctttgcgtgatatgattccttatgaaaaacttagtggttttattgaatcaggggtaatagaaattgctcccttggcgtttatgcgtgggcgtacgcttgataacgcttttgtgattttggatgaggctcagaatactacccatgctcaaatgaaaatgttcctcacacgtatggggcgtaatgctaagtttatgattacgggtgacccgggtcaaattgatctacctcgaaaggtatcttcagggctgaaagaggctttgttgattctgaaaaatgtcaaggggattggtatgttacatttggatgataaagacgtggttcgacatccgttagtacgaaatattattgaggcgtacaaaagtattgagaatatagaataaacgtaagtgcgattcagtaaatgacatcagaacatttagatattaaaattcagaatgttatttcacaacgtgtaacataaatttttctgcaccttaagagctaaataattgaaaaataatataaaacataaatatattacataaaaatatgaatacaacattagtaattttagcggcaggtttggggagtcgctttggttccgacaaacaattagaggaaattcataacggaaatgctttgtttgattatgggatttatgatgcgattgaagcggggttttcggacgtagttttgattattagaacccagattgaagagcttactaaaaaacatttagaaaatcgtttcaaagggttgcctgtttccttcgtatatcaagatttacaaaatccagaaggaattgtgcgtcaaaaaccttggggtacaggacatgcgatgctctgcgtaaaagacgtggttaagaatccgtttttgattatgaatgctgatgattattacggaaaagatgcgttttcatacatggtaaaagccttaaaatcaggtaaagaaaaaactttttattcagcaggttatttgttgaaaaacacattgagcgaaaatgggacagtttcgagaggagtttgtaatgtgaatgaaaataatcatctgcaatcgatagttgaggctacaaaactcagaaaaattgacgaaaatatggctattgatgaagaaacaggcgaaaaatatcctttaggaacgttcgtttcaatgaatttttggggattcacaccagaaatttttccaatggcacagaaattatttgctgaatttgtagaagctaataaagaaaatccaaaagcagagtttttcattccgttagtggtacaacatgctattgaaaaagaagggtatactttggaagtgttacctaataacgatgcttggtttggaatgacctaccgcgaagatttattgaaagtacgagaagaaattaaaaatttgactgtagcaggaggatatccagagaatttctaattaaggaatcaaatttcttacttgctcaactgtgaaggtttcacgagattttgacttattgagataaggagtttattccattttgctaaaattagagattttttaaaactctcaattagtgttacaatctctgaatgtcgaatttacatagatttttttgttatacacaaaaatcttcatatacatttgatttaccaattaaaaatataaaataaaatgaaaaatacagctgaaagaattgctcctttgtttgattttaaaggagatatcgtttccgttgagccttttggaaatgggcacatcaattatacttttttagtgaaaactactgaacaagagtatgtgcttcagggaattaataccaatgtgttcaaaaaaccacatgcaatcatcaaaaatattgaattgctttgggaaactgttgctgataacactattattttgaatatgttaccagtcaaaacgggaggtttttcggtagaagcagacaatgctttgtggcgtgcggttccgtttgcgaagaattatgtggcatacgaatttgttaaagaagcatggcaggctgagaaagctgcatcggcttatgcaacgtttatgaaaacatttgaaaagatagatacttcaagattggaggatactattcctgattttcataacgggatgaagcgttttcaacaattagaagatgcttttgcacaggcgaagtccgaacgcatcgaaaaggcacaacatctctatgattttgcaaagtcgcacaaggtaatatttgatgaagtacagaaagctgtggatgaaaaacgcatccctattcgtgttactcataacgacacaaaaataaataatgtattgattcacaaggataatccgaacgatttcaaagttattgacttggatacagtaatgcaaggaattttattgtatgactttggagatatggtgcgtacctctgtgagtcctactaatgaaaatgaacctgatgattcaaaaattgtgttcaatgaaactttctttgaagccatttgtaaaggattttcagtgatgaaagacgtaatgacagagaccgaaaaacgtatggttttggatggtgctaaatatatgatttttattatcggagtacgtttccttacggattattttaataatgacatttatttcaaaacttcattccccgaagaaaattttgttagagcaagaaaccaatttgttctattacaacgtttagaagataaagaacctgcattgagagcagttgttgataaatggtttaaataaaataaacaataaaaggtaaaaactgtctgaaaaaaagtgtacatttgcaacttggttcagacagttttttttatgataagaaatatttttgtactcctattaaccattcttcccatttatatttattcccaaactcaagtttcaggtaaagttattgatgatcaaggaaaaccacttccttttgcgaatatcatttttgtgaattctacgaaaggagtagtgtcggatgcttcaggaaaattctccttatactcagagaaaaaccataattatattgaagtttcttccttagggttcacatctaaaaaaatacgattacaacataaaatcacaaaaaatcttattgtagaacttactgaaggagaagagcttgaagaggttgttgtagtaggaaaaccaacgaagtcactttcgaaaaaagaaaatccagcctacacagttctacaaggtatttggaaaaataagagtaaaaaaggacttaaaaattcacaggcatatgagtataagaaacatagtgtctcagagttgggtatcaatcaattagatacgattttcctaaaaaaggttttaggaaatgattatgctgagtttgaacaaactcttatggaacgaaaaaacaggggctttttttcaatgccgatttatattaaagaaaacgtacaaaaggtctacggtaacaaccaaatcaataaacaacgagttgatacagaagcagaacgctcacaaggagtagctcaaaatggttatggtttagagcgaatcaccaaggcatttgatgaatttgatatctacgaaaattcatatttgattttaaatcgcccatttgtaagccctctctcggaatatggctacgggacgtatcactatgttttaaaagatactttagtagaagagaatcgaaatttctatcgcatttatttttttccaaaaatagatgctgatttggctttggaaggaaattttattgtggatactaaaacttttattatcaaaagtatagagatgaaaactactcccaaaaccaatttgaatatggtgcggggattgtttttcgaaaagcattttaccattgaaaatgatagtatttattaccttgaaaaagaaattcaagaagctgattttacgattctttctaaggacatagaagagaaaggcttgtacattcgtaataccataggatactctgatgtggtcctgaatcaaccgaaagcgactcttttttatgaacaaaaaatagttcaaaaatatagggatcaatttgttaaaggggatacatattggcaacaagcaaccgtaaagtcggcaaatatttctaaaacaactcggttgattaaggaagtagctgataatccgaaagttaaattaattactacacttgcagatattataggtacagggtatgtatcgttaaattcaatccctttgggtaaaggactgcaattcggcacatattggcaggtgtacgaatcaaacgatgttgaaaagcatcgacttagattaggcttcagaacatttaattcaattgaagatcgttttcgctcttatttttacggagcttatggcattggagataagcggtttaaatatggattaagtgctaaatatttactttcggaggaacctcgagtgacgtttggaggtgcttatcaggatgattatttgcaattaggaaactatttgattcacgatgatggtaatttcacattccgaagaggaagtaacgccattattaatcgaggagaaaactattttttgaccagaaatcaaaagacatcagcggctataacgtatgtgccgttaaaaaacattgaggttagtgtttttggagtatatcagcactcacaatctgccgatcctgaacatttttttatagcctttcgcgatttgaagaataatcaaacatataccaattataccgatttcaacacagggttgaatatcaaatttaccccaggaagaaacgtctttggctatggggtggagcaacgttatggagagaaaatacatgatacttacgtgttaaaatatactaaaggagcatcaggagctttaggaagccaatttgactatgataaagtacaggttttaatcaaaaaacctattactgtttggaatttaggaatgctgaacacaacttttgaggcagggaaaatttttggtaccgtaccgttgactattttgacaccaacgcctgccaatcaagcctattcgattatacctcagtcgtttgcgttgttagattattatgattttataaatgatacctatcttaatggttattttgagcatcattttaacgggtttattttgaataaaattccacttgttgacaaaacaaaattacgaagtttattatttgctcgttttgcttatggtactataagtcagcaaaatagagatgctcaccaaacgaatctaatatacaatacgcctgaaaaattgtattgggaatacggttttggtattgaaaatataggttttggaaatattcgcccgtttcgtttagattttatatggcgtggtgattttaatgatgttaacggtactcggaatcccaagtttggcattcgttttagtgtcatgcctaatttttaatgtcagcagtacaaaaattatttttcgactaaaatactcacagcatttcctccaaaaccaacagcgttaatgagtattttttctattttttcaggtttcttttgtttttcaacataaggaacgctataaacttcctgtttttggagcatacatattgccatttcaaggctcaaagcaccacttgcaccaaatgtatgtcctattttccatttattattagtcataaaaggaacagattctttgaaaacttctcggatagctgtgatttctgctaaatctcctttaatagtacctggagtgtgggtgataataacgtctatatcacaaacgtctgtatttcgtaaagccatcagcatagatttttgtaagcattcgccattggccgaaagagatacattgtgagttaatttctcagaagcaaatccgattcctgttattcctgctaatcgattgtctttcaatccattttctaagcaaaaaacagaagctccctcgcctaaaaccatcgtatttagctttttgtgtacgtccattgctcggcagggaaaatcatccgttaggctgctgtaaatttttaaagctttggcttgagctatagtaaagggagttaacggagcttcgcttccaccgactaaaaatcgctgttccataccactttgaagccatgcaataccattaacgacagcgtgtaaagatgttgaacaggtgatggaatgagacatttcaaaacctatactccctaaatcttgaccaacccacgaagcaatatttcctaacgtagtagttggagaagctaaagtttcacatgctttattttcaatgaaataggagtgatgtttttcaaaaagagttgtcgctccgcgagaagaaccgatgtttacaccaaaattaccatcacaccaattagcctgtttgactgcttgtcgggctgatataattgcaaataaaactgtatcgtccaagttggtatatgccggtgatgatagtcgtaagttgtttacagcagtcagaccgctttcagagagttttcccatgggaacctcaccataaggctttaataaagatattggattttgatatgacaggcagacttctgtaaaagaatttcctaaagcagaaatcgatcccattcccacgattgatatgttcacagtttaaaagttttatgtgcaaaagtaaggaatttttattatttaggatttgaaaggtgtgatttttcccaatttcaaaggcttaataggaaataattaagaggatgtaaaataaaagccccgcagataggcgaggcactagatgttttcacaacggaataatccttattgtaaaatcctttcgatggtgcaaagttaactaaaataatttgaataaacaaaatattttttataattttacctcataaaaatttaataagaataattatgaaacacatacttggtctcgatttagggacaaactctattggttgggcattgattgaaagaaatatcgaagaaaaatacggaaaaatcattgggatgggaagcaggattattccgatgtctcaggatattttaggaaaatttgatgcaggtcagtctatttcgcaaacggctgaaagaacaggttttagaagtacaagaaaactatatcagcgagataatttaaggagagaacgactacacagagtgctgaatattttaggttttttgcccactcattatgccaatgccattgattttgaaaaacgattgggacaattcaaggaaaatcaagagccaaaacttccgtatgctaaaaatgaagatgggaaatttgattttattttcaaaccaagttttgaagaaatggtggcggatttcaagcagtatcaaccgcaattgttttatataaaacctaatggaaaagaaagtcaaatcccttatgattggacgatttattatttaagaaaaaaagcacttagtcaaaaactctccaaagaggagttggcttggatattattgaattttaatcaaaaaagaggctattatcagttaaggggtgaagtcgaacaagcagacgaaagtaaatctgtaaaattctatgcccttagagtggtaaaagtagaagaagacggcaaggataaaaaaggggatacttggtacaatgtgcatttggaaaatggttgggtttatcgtcgcaccagcaagaattttttggattgggaaggaaaagtaagagaatttattgttaccgaaaaactcaatgaagatggcaccattaaagtcgataaagaaggtaaagaagacagaagttttaaagccgtaaattcagaagaagattggattgcaattaaaaaaagtacggaggataaaatcaaccattccgaaaaaacagtgggtacttatatctatgacatgctactgcaggaacctaatcaaaaaataagaggaaaactcatcagaaccattgaaagaaaattctacaaagatgaattgataaaaatccttaaaaaacaaatagaattacaacccgaaattttcaccaaggatttgtacaaggcttgtattgaggaactatatcctcacaatgaggctcataagaaaaatatttcagaccgagggtttgtatatctttttgtggaagatatcattttttaccaaagaccactgagaagtaaaaaatcgctgatagcaaaatgcactttggaagagagaagttttgttgtagaagaaaacggaaaacgaaaagagaagactgaaggaataaaatgtattgctaaaaccaatcctatctatcaagaatttagattattacaatggtttcataatttgaaaatctataagaaggacgataaaacagatattgatattacggatgaacttttacctacaatagaagctaaagagcaatttttggaatggctgaatgataaggctagtatatcccaaaaagaattgttgaaatatccaccttttcaattggaagaagcggtgagaaaaattttggttcaaaaattagaagaaaaacccaaaaagaaagatattgaaatgggattggaagaatattttcgttggaattatgtacaagataaagtttatcctctgaatgaaactcgtggtgaatttttaaaagtattgaaaaaaaataagttatccccaaactttttaaacaaagaaacagagtacagactttggcatttgttgtattctgttgaagataaagtggctatcgaaagtggtttaactaaattcgcccaaaagtataatttacctaaggaatttgtacttgctttttcaaaatttcctcgaatggaaaagaattatggtgctttctccgaaaaagctattaaaagactattgactttaatgcgttttgggaaattttgggattttgaaaacatagatgataagacaaaagaacgcattgataaaattcaaacaggagaatatgatgaaaaactcaaaaatagagttcgtgaaaaagcaattcatttaactcgtgatgaacactttcaaggacttcctctgtggttggcaagttatatcatttataaccgacattcggaagtctcggaaattaaatattggaaaacagccgaccaaatagaattgctcaaacaacattcacttcgtaacccaattgtagaacaaattataaatgaaaccttgcaaactgttcgcgaaatttgggaatattatggcgaaggcaaagaaaatttcttcgatgaaattcacatagaattgggaagagaaatgaaaaatcctgccgataaacgcaaaaaaatgacagaacgcattactgaaaacgaaaatactaatatccgcataaagcttttattgtcagagcttttaaatgacggagtggaagaggtgcgtccgtattcaccgatgcaacaagagattttaaaaatttacgaagaaggtgtctatgaaaatgaacaagatgaaaaagttttggaggaaattactaaaattcgcaagaaaaaccaaccgacgacaaaagaaatcaatcgttataaactttggttagagcaaggctacaaatccccttacacaggtgagatgattcccctttccaaattgtttacttcagcgtatcaaattgagcatatcattccacaatcacgctattttgatgatagcctgtcgaataaaattatttgcgaagcagaggtcaatcaattaaaagataatcagttggcttatgaattcattcagaatttcggtgggcaaaaagtgcctattggcggaaatgaaacggtaaccattctcaaaaaagaacattacgaggattttgttcaaaaatatttttcaaaaaatagtttaaaacgaaaaaaattattgatggacgaaatccccgaagattttattcatagacaattaaacgacagtagatatatcagtaaaatcgttaatctgttgttgtctaatatcgtgcgagaagacggcgaggaagaagcaagagccaaaaaagtaattgtttcatcgggaggagtaaccactagattgaaacaagattggggcttgaatgatatatggaacaagctgattacgcctcgtttcgaacgattgaatcaaatggcgggttatgaaaaatatggttcttgggaaaataaagagggtaaaaaagttttccaaattaacacgaccgaacaagaattgatgaaactcaataaaaaacgaatcgaccatcgccaccacgcgttggatgcgttgattgttgcgtgtagtacagctgaccatatcaattatctgaataatgaatccgcttcggaaaacaaaaaatccgaacgatttgacttaagaaaaaaacttcgccgaattgaaaaatacattaaagacggcaaggagcgagaggctgcaaaagaattttacaaaccttgggaaacctttacacaagatgctaaagaagcactggaacacattattgtgagtttcaagcaaaataacagagtcattaacaaatcagtaaactattaccaaaaatgggagcaacaacctgatggctctatgaaaaaagtttttgtaaagcaaaagaaaggaaacaattgggcaattaggaagccgttgcatgatcctatgccttatggaatgaaggaatatgagataaattatttgaagatagttgataatatatcaaattacaagtttattttggatgattttgttagagtacagatagagaaaatctttttagaaaatgataaaaaggtagggaaaacaaaaaattatttaaaacaaaatccgataaggaataaagaaggaaatatagtagaaagtacagattttaaaattaaattgtcaaaataccgaaaaagaaaactcatatcagttttgtctgttagaaagggacaaggagctataagaacattaaatgaaatggtaaattacataaataataaaatagctgatgatgtcttgagaaaagatttgttaaaccatcttagaaatgtaattgatgataataaagatattgaaaatgaagaatatattttggatttggcgttttcagccgaaggaatagatatttttaattctaatagaaataagcctgtttataaacttccgatagttgaagagggagaaaaacgatttcaacttggtactggagaaggaagcaaacacaaatatgttcagacagccaaaggaacgaatctattttttgcaatttatgtcaatgataagggagaaagaagttatgaaaccatacctttaaatgttgttattgaacgccaaaaacaaggtttaccttcttgtcctgataggaatgaaaaaggaaatagactattattttcattatctcccaacgatttagtgtacatacctaccgaagaagaacaagagcatccacatttggtagattttagcaaattgagtaaagaacaagtgaaacaaatttacaagatagtaagttttacagggaataggttatatgcagtgcctaataccgtagcaaaatcaattgttgataaggttgaatttactcaactaaataaaatagagtttattaaagagaaacagatgtgtattaagatagatgtagatagattgggaaatataattaccttaacatctaaaacgattcgtgaaaaatttgataagtacaaataaaatttttgtagatactaatattatcctttatgctattgaaaatcaacatgaaataaaatctaaaatagctatagaaatattagagaagagaccttatatatcaaataaaatattgaatgaactaatgaatttgttacataacaagagaaataatagtaagtttcaaaaatcaaaagaagaaacaatagctattattttagaattattaaaaatatgtccactaacgataaattcaaaagatacatatttcaaagccagatatttgatggatagatataggttgtcacttcatgattctatagttgtttctgatgcctttttagaaggatgtgatattctatattccgaagacatgcatgatggattattagttgataagaaaatgaaaattataaatccttttaagtaaaaagttatgctctaccgctccatttatattggcaatccagcatatttgaagttgaaagaccaacagatgaaaatcgtttgtcccgaaaccaaagcagagaaagggagcgttccggtagaagatttgggtttgttgatgctcgaccactttcagattaccatttcccatcagctgatacagtggctgatgggaaacaatgtggtgattatcagttgcgatgctcatcatctcccacacggacaaatgctacctctgcacggaaacgccatttattcccaacgcataaaagatcagatagaagccagcgaaccgctcaaaaaacagctgtggaaacaaaccatagaatacaaaatagccaatcaagccgctgttttggaacgacttggaacttacgccagtcctatgtatgagtatctcaaccaagtgaaatcgggcgacaccagcaatatggaaggcatcgctgcacagcactattggaaatacctcattcaccccgattttttacgcgaacgctacggcgattcgcccaatcagtttttcaattttggttattccgtattgagaagtatcgtggcaagagccattgtagaaacaggtttactgcccgttttggggatttttcacaaaaacaaatacaatgcttattgtttggcagatgacctaatggaaccttaccgtccttttgtggatttattggtcatccgatggttggaaaagaatcctgaagccgaagaactgaccaaagaagcgaaagcctattttttgcaaatcgctatcaaagatgtgaaaatagacgaacaggtgcgtccgctattagttgcggtaaaatctaccgtttcctctctgtacaaatgctatacgggcgaaaaaagacaaatttcttatcctaaaatgttatgaattccgaacgatttaacgcttatagaattatgtgggtaatggttttatacgatttgccaaccgagaccaaggcaatgcaaaaagcagccaatctcttccgaaaacgcttggaagatgatggattttctttatttcaattttcgatatatacgagacactgccctagccgcgaaaatgccgaagtacatataaaaagagtaaaatcgtgtctccctaaatacggtaaagtagcaattatgtgtataacagataagcaattcggagaaatcgaattattttattcacaagtcaaagagaaattacctcccacatatcagcaattggaactgttttagtaagtagattaagatagcttctaaattacgtgtagtatctgtatttaagacgtgttgtactgatttatattttgtttgtatacaaggtaaattcggtatagaagggcttatttatgtaaatcaaaaggacaaaataggaataaaaaaatgtagaaaatatacaatttttagatactttccatgtgtttttttaattgaataaaaaggggcaatcctttgatttttagtagattgtcccttttgaggttgtaactaatcacaaagttacagattttgaaaggattttacaacgatctaattttcaaggtattcttatgtggggttgtaactaatcacaaagttacagattttgaaaggattttacaacccgactaaaattgaattaaattgtaagacagttgtaactaatcacaaagttacagattttgaaaggattttacaacacccccgaccttgtggctgtggggacaagtgttgtaactaatcacaaagttacagattttgaaaggattttacaacatagaaaacatattattgtcaggaaacaacgttgtaactaatcacaaagttacagattttgaaaggattttacaacttataatttcttctgttgccattcgtatatgttgtaactaatcacaaagttacagattttgaaaggattttacaacaatgctaaatagcttaaaaataccctacaagttgtaactaatcacaaagttacagattttgaaaggattttacaacacgtactggtatcggctcattacggaatgggttgtaactaatcacaaagttacagattttgaaaggattttacaacattatgaatttgaagtaaatggagatggttgttgtaactaatcacaaagttacagattttgaaaggattttacaactagtttggtttcaatggaaagcggtttgatgttgtaactaatcacaaagttacagattttgaaaggattttacaactttattttcgcaaaattaaaatatcataatgttgtaactaatcacaaagttacagattttgaaaggattttacaacactgccattgtaagtgataaaatagaagccgttgtaactaatcacaaagttacagattttgaaaggattttacaactaaaaaacacgaccttaccaaaggcatcttgttgtaactaatcacaaagttacagattttgaaaggattttacaactattttcattttgtcttcaacaggtttaatgttgtaactaatcacaaagttacagattttgaaaggattttacaactcttcgtactcaacagtgatatgcagtgctgttgtaactaatcacaaagttacagattttgaaaggattttacaacttagactttgaaacagcaaacagaaatagagttgtaactaatcacaaagttacagattttgaaaggattttacaactaaagatatattatactcttgataagtattgttgtaactaatcacaaagttacagattttgaaaggattttacaacaaaccctccttgggtctccaagaactaatagttgtaactaatcacaaagttacagattttgaaaggattttacaactcgtatagcttcaaatattttaaaattctggttgtaactaatcacaaagttacagattttgaaaggattttacaactaaaaaatgttatgacagtggaactatcacgttgtaactaatcacaaagttacagattttgaaaggattttacaactatcgtacagcggtgatcaattacaatcattgttgtaactaatcacaaagttacagattttgaaaggattttacaacggttattctgatggtgcatttaaaccaaatgttgtaactaatcacaaagttacagattttgaaaggattttacaactactacagaagcatctgatacttgcggtgggttgtaactaatcacaaagttacagattttgaaaggattttacaacgtagaaccatcattgtatatcaatgtaaaagttgtaactaatcacaaagttacagattttgaaaggattttacaacaaagtttaaaggataaagggcaaagtcgtagttgtaactaatcacaaaattacagattttgaaaggattttacaacatagtttttttgcttataataaaaaaataggttgtaactaatcacaaagttacagattttgaaaggattttacaacatagtttttttgcttataataaaaaaataggttgtaactaatcacaaagttacagattttgaaaggattttacaacaatgacaactatttggttgcagtttacaatgttgtaactaatcacaaagttacagattttgaaaggattttacaacacgaataagcccaactccctttcttttccagttgtaactaatcacaaagttacagattttgaaaggattttacaacgcgtgttgattagcgtcgtgttcgttctcagttgtaactaatcacaaagttacagattttgaaaggattttacaacagcaatgccgttgaaaagcgaataatggcagttgtaactaatcacaaagttacagattttgaaaggattttacaacacctctgttgcagaacttaaaaccttgttggttgtaactaatcacaaagttacagattttgaaaggattttacaacatattaaaatttaacgagttcaacatcacagttgtaactaatcacaaagttacagattttgaaaggattttacaacttaaatttataatttgatttaattcagttagttgtaactaatcacaaagttacagattttgaaaggattttacaacgagcagacttggcgtacgtgtcggggtgtggttgtaactaatcacaaagttacagattttgaaaggattttacaacatcatttgacgggacaaagataatgataagttgtaactaatcacaaagttacagattttgaaaggattttacaactaaccatttcaacctgttgtcctgctccttgttgtaactaatcacaaagttacagattttgaaaggattttacaactcaaagggttgctgtgccatttccactaaagttgtaactaatcacaaagttacagattttgaaaggattttacaacttattttacgtaaacctatattaaatgttggttgtaactaatcacaaagttacagattttgaaaggattttacaactccactcttcaatagcttgaattggaggcagttgtaactaatcacaaagttacagattttgaaaggattttacaacaacattcaatactgtatcaaatgacaataggttgtaactaatcacaaagttacagattttgaaaggattttacaacattaaatattaaatgacttggattgtaatcgttgtaactaatcacaaagttacagattttgaaaggattttacaacttgtgagttgttcactattttttttattacgttgtaactaatcacaaagttacagattttgaaaggattttacaactgttattttgtttataaaagatttgtaaagttgtaactaatcacaaagttacagattttgaaaggattttacaactcgtttatagcaagtaacgctttagctcttgttgtaactaatcacaaagttacagattttgaaaggattttacaacactatcaaaataggctcattggcggtttttgttgtaactaatcacaaagttacagattttgaaaggattttacaaccagggaaagatcctcaaaaaaataggcgatgttgtaactaatcacaaagttacagattttgaaaggattttacaacaagaaaaaagaatattagattttattttttgttgtaactaatcacaaagttacagattttgaaaggattttacaacgtgaacgaaatatttttatatttcatcacaagttgtaactaatcacaaagttacagattttgaaaggattttacaacatccactcaatattttagaagtttgatctggttgtaactaatcacaaagttacagattttgaaaggattttacaactacattttccttttggctcattcaaggagggttgtaactaatcacaaagttacagattttgaaaggattttacaacaaaacgttccacttggaacctaaaatattggttgtaactaatcacaaagttacagattttgaaaggattttacaaccccgtgttagtgctattcaatggcaacatcgttgtaactaatcacaaagttacagattttgaaaggattttacaacacagaactttacaagcagaaagaggttgttgttgtaactaatcacaaagttacagattttgaaaggattttacaacctaatgttttcattgccctttatttatcgcgttgtaactaatcacaaagttacagattttgaaaggattttacaacttgacagaacctttgtcagtcgattaataggttgtaactaatcacaaagttacagattttgaaaggattttacaaccaggtaaaggttgtgaagcgataattccgagttgtaactaatcacaaagttacagattttgaaaggattttacaacgtatagctactaccttaaatttttttccaagttgtaactaatcacaaagttacagattttgaaaggattttacaacataaatcccactttataataccgtaatcgcgttgtaactaatcacaaagttacagattttgaaaggattttacaacatctctgacgaacaagctaaaacgagcgcagttgtaactaatcacaaagttacagattttgaaaggattttacaacaggaactagttactttaaaatattggttgagttgtaactaatcacaaagttacagattttgaaaggattttacaactagcaagttataaaacgcaaaatcttacatgttgtaactaatcacaaagttacagattttgaaaggattttacaacaacgctctcaacaaacaaaaatttcatttcgttgtaactaatcacaaagttacagattttgaaaggattttacaacgctaaaatgccacaaagtcatttagaaaatgttgtaactaatcacaaagttacagattttgaaaggattttacaacaaaatacatcaagtaatgatacttttcgatgttgtaactaatcacaaagttacagattttgaaagggttttacaaccgccagaatctctgtaggttacttcaaacagttgtaactaatcacaaagttacagattttgaaaggattttacaacgaccccaattccattacgaaagcgtcgaaagttgtaactaatcacaaagttacagattttgaaaggattttacaacaaatagtagcaatgccactgagtgagctgggttgtaactaatcacaaagttacagattttgaaaggattttacaacatttcggtttgtttttttgcggtattactcgttgtaactaatcacaaagttacagattttgaaaggattttacaaccgtcttgtcgtagcaaagtagaaagcggacgttgtaactaatcacaaagttacagattttgaaaggattttacaacatgacttattataatgaaaagttaggaaacgttgtaactaatcacaaagttacagattttgaaaggattttaacaagcacagaataataataatgttgtaactaatcacaaagttacagattttgaaaggattttacaacaaagtagaaaagtataattaatcaatacctgttgtaactaatcacaaagttacagattttgaaaggattttacaacgctttttgtaaatgggagaattttggtaatgttgtaactaatcacaaagttacagattttgaaaggattttacaactctccctatattcttcggttttttgacctggttgtaactaatcacaaagttacagattttgaaaggattttacaactccaacatccctctttcaattccattaaacgttgtaactaatcacaaagttacagattttgaaaggattttacaacgctgaaccgacagagcaatccttattatcggttgtaactaatcacaaagttacagattttgaaaggattttacaacctatccacttgccctaaaagttttaaaaaggttgtaactaatcacaaagttacagattttgaaaggattttacaacttaacttcccattcttcaagttcttctttcgttgtaactaatcacaaagttacagattttgaaaggattttacaacaaatatttcacatcacagacacggcacattgttgtaactaatcacaaagttacggaaaattgaaagcaatttacaacaagtaagctacaccgcccacaatcgcaatggttgtaactaatcacaaagttacggaaaattgaaagcaatttacaacaggttttacaacaacttttcggtaagttttgttgtaactaatcacaaagttacggaaaattgaaagaattttacatctggctattagctaaccgttgtaactaatcacaaagttacagacgatttaatatgcccgctctttgtacgacttcaaataatgaaggtttaaagtatccattacaaaagatttcaagcagtaaattatgtcctcgtcctttttttgacgtaagatgtcgagaaagataataaaaaccatcctcttgcttttcgtatttgattttttttagccaaaatcctgaacgtgttatgtatagccaatcttgaaattggaaaggtgcatagcgacagtcccaatcaggaggataaccttgaagtaatgttctgtactctatgctggaaagacgaaagtcgatgcattcttctgcttcctaatgcacactatcggaatttgggtattggactccgtagatgattatattatcgtgcttattcattttataaagaattaaggtttttattttcaacgtgttaactttcgtgttttggaatttagaactaaggttttgttcgtttgctattgaactttagagaacttgtttgtgtaaatttagttgagcatcaaatgtttttatagaaaggaatttacataaacttagagattattaatataagatattagttcaataggtttacgactcacattaagtttacaattccaaaaaaatcgctgcgaataacggaaactccagtatctttgactaattggaattgaatttatttttgttatcaaggaaggcttatcaatccatgctacaaaaaaggttgtgtttaaatattgatctgcctggaatttattatagagatattcagaatcattatgaaggttgatgtcttgggtttttagccagttgtcgcgttcttttgttttatgggaaaaataaatttgcatatgaatatcacctcgtagttgctctatgctatcattccctcttttaataagctttatgtctcttttggaaatagtagtagcgaggtttttgtctgcgtcggggataagagacgttttcaactctatatttttaccctttaccaaaaaatcaatatctatattttccccatcttccaaataattcgtggagcttaaagtgatatcattatttgcaaaccattttgcaatcgctaattctccaatatatccacgcaatttgcaatcaaactgaacatttttatgtctgtatctgagattgttaataaactcgtgcttttttgttttttcaatacacaatataacatcctcttttgatatttctaacttgattatgtcttctattgtgactatattcattttattggtataaaattcattatttttgtcttaaatttcatgtaaattgcaaatctaaatgtacaagaaaagaaagtacattttttttgaaagttacgctccacgttagcaaagatatgcaaaaaataaagaacataatcaaaaaatcctttttgtttggtgctttcattttaagtaatgctactgagatgtaaacctaattaactcgttaataattttttagcttttccgtattttaaatacacttttatttcatacctttgctccgaagttaaatgtttatatttcatcgtcttaagtaattattcgataaaggaactacaaccaagagacacatttcaaaattatgttagatttaaaaattcctcctatcgttgttctttctattttttcgggagtaattatctccattccttttgtttttcctttttatgaagtgaaatccatttggttatctactatttttattatttcgggaatagtagttgcactgatgggagtttcggaatttagaagattaaaaacaacggttaatcctacaacgcctgaaaaaagtagtcgaatggttagtacaggaatttatagattcagtcgaaatccgatgtacttaggaatggcatttggattgataggattggttttttattttgg

SEQ ID NO: 1056 - DNA, 24650 bp, synthetic construct
  misc_feature 1..24650: note = Synthetic
  source 1..24650: mol_type = other DNA
aggccctccggaccatgatacaaggcatagaagcccgacatgatggcgagcaaagcttgagctgtgcagatgtttgacgtggctttttcgcgcttgatgtgctgctcacgggtctgaagagccagacggaaagcaggattgccaagagcatccacgctgatgccgatgatacggccgggcatctcgcgcttgtaagcctcggtggtggcgaagtaaccggcatgaggaccgccgaatcccatcggcagaccgaaacgctggttggaacccaagaccacgtcggcaccccattcgccgggaggcgtgatgagggtgaggctgagcaggtcggcggcaacggccacttgcatgcctttggccttccattcagcgaccttggcgcggttgtcaacgatctcaccaaactggttggggcactgaatcagcacaccgaagtattcttcactgcagtcgaacttgttgatgtcgtcgatcacgacctcgatgccttggaagtgggcgcgggtcttgatgacttcgatagtctgcggaaacacgtcgttggcgacgaagaacttcttcacgccagccttcacctgggcgcggctgcgggcgtgccagaacatcagcatggcttcggcggcggcggtgccttcgtcgagcaagctggcgttggccaacggcagggcggtgaggtcgctgatgacggtctggaagttcacgagggcttcgagacggccttgcgagatctcagcttgataaggagtataagaggtgtaccagcctgggttctcaaggatgttgcgcatgatgacgcctggggtgatggtgttgtagtagcccaagccgatgtagctgcggaactgcttgttcttggcacccagggccttgaggtggctgatgacttcgtattcgctcatgccctcgccgatgttgaggtctttcggcagacggatttcgggagcgatgatttcgtcgacaagttgttcttgcgatttcacgccgatgaccttgagcatcttttcagcatccgatgcggtggggccgttgtggcgtttgatgaagttgtttctgatcataacaattcgtttatataattgataatttgttgatatttcgtttattggatttgttgttgcaaggcatcaatggtagtgatggactgaaggtcgctgtcagggatgttgaagagcttgcttctccatgctttaaatgtggcggtattatgaagaatggttttgcgcaagtattcatattcctggcatttggtcttgcctctgtacttgttgaaaagtgcatcataggaattcatttgaccattcttgttgtgaatcatcttccaaaactcttgcttgaatttggcagtcggggtgttgtcaggtgattcagcctcctgggtctgcacagtgctctgttgctgctcttcaacttttttgttttctttttccgcaggggttgcttcttttacagccggagttgtctctttggcagccggtgttgtttccttaacgggtggagttgtttctttagcagcgggagtggtggcttcctctttttgaataggtttttcctctttgacagctggaacctcaacctttggttcgtctttcggagttgtgctgttgtcagcaatcaaggctacggtgtctgagtttatgacagagtcagctaacgcaagggtggagtcgaccacgggagcgtctgcacgcaacgagtcggtcgtcaccaatggccgaacgggtggggtatgaggaggattcggcttcgaaaacacgccgaggatgtacaatactgcgatgataatacctatggcaagcaaggcgatgatgtatttccatttgttttgctcaagccttactaagaaaggagctctttcgtactcggcaataagctttccatcgtagtatttgtcagaggaatggggctcgaatttgaagcctttcaacacatatccttttggtgggatgatgtcttccttggcatccctaccgtcttcatagcaggaataggggcatgtgtatttcttttctccttttccggggtcaatataatatcgcttttctgtaatgtttgacatttggcatttaatttatatatctactcaattcggtgatggaatagatggaattcaactgtttttcggggatggtcttcagcttgtcgtaccattttttgaaacctgcgaagttttccaagatgacggtacgcaaatattcgaattcttctccgctggctttgtccttgtaattaacatacaaattgtggtagtcatccatggaggcaacacgttggtgaatcaaggcccagaactcttgcttgaaatagacattggggtcgttcgcctcgttttgtggcttctcctcgggtttggttaccgcgggagtctcttgcacggtctgggtgttctcagtctcgttggaggaagtggcttttgtcttgtcttcctttttctctatcaacgattggtcggtctttttgtcctttttctttttcttgtcaacgggtttcgctttgatttcggttttgggttccttggcaggctcgtttgtggtgctgctctttttgaaaacactgaaaaccaataggatgataagaccgatgacagcagcgacgatcaatgccaacatcagcttccaaaggttcgatttcagacggatattgaacggttcttttgtataaatggcatataacttgccgtcataaatctggttgctggcatcagggtcgaatctgaatccggaaaagacataaccttttggggggatgatatattcctgaacatcatgaccgtcttcaaagtttgaatacggacatccatccatttttttcccttttccagggtctatgctgtaacgcttttcttcaaagtctgccattctttggtgggtttattgtaaggttttgttgatggtaatgtaattggggtaggaaagttgttggttgttgatggtgatgtaaggcttcacttgcaggcctaatttgactgggtcgctgctggcaccggccaatttgaaggccaggttgagaatggcatcagccgattcaccgctgaacaactggaacaaatcggtagtgacgggaatggtgatggtgtttttggatttggctggaacatttatgctgttgctcatcgtggtgctgatgacttgtttgccgttgagactgacaatgtaatccatctttgacatggcagccgcgatggcattggggttttcgacatccagattcacgttgaaagtcaccggaagctctctcttcatgagggcattggccagattgagcagttgcgtggcgttgaggtcgtctttcgtcatgcctttgctcaggttgacacccaacatttggattttgttgatactattgaaatcaaatgtgcaattggcgaagttggccatctgagccacttgagtcagcaagtcacaggaggaaagccctaacgcgacaaagaggataatgagtgttcttttgattttcgacatagctctattcgctgatttataattaaatacaataataataaaacatttttacggattgttttatccgctcgtcttcaattttgcaatattacgaaaaaagtcggacataaagcccgacttttagaaatatttttcaaggttattcttcaccacgacgcgaggcgcgtttgcgctccagctcgtcgaggataatcttgcgcagacgcaggctcttgggtgtcacctcaagatattcgtcgtcacggatatactccatgtattcctccaacgagaaacgcacgggcgggatgaggcggatggcttcatcgctgcccgaggcacgcacgttggtgaggtgcttggtcttgcaaacgttgatgacgatgtcgttgctgcgggtgttctcgccgatgacctcgccggcatagacgtcttcgttagggttgacgaagaaggtgccgcggtcttgcagcttccagatggcgtaggggatggcttgtcccgtctccatcgaaatcaaggcacccacattacggctcggcatctcgcctttccaaggctcgtagtccttgaaacggtgcgaaacgatagcttcaccctcggtgacggtcaacaatgtgtttctcaagccgatgagtccgcgcgacgggatgtcgaaatcaaggcacatgcggtcgcccttgggctccatctgggtcatctcacccttgcgggcgctgacctgctcgatgacacgacccgagaagtcttcaggaacaaggactgtcaatgcttcgataggctcacacttcacatcgtcgatgtatttcaggatgaccttgggctgaccgagttggaactcatagccctcgcggcgcatggtctcgacgaggatgctgaggtgcaagatgccacggccgtaaaccatcaaggagtcgggcgagtcggtgtcttccaccttcaaagcgaggtttttctcggtctccttgtagagacgttcgcgcaggtgacgcgaggtgacatatttgccttccttgccgaagaagggtgagttgttgatggtgaacagcatgctcatcgtgggctcgtccacatggataggcggcagtggctcagggttttcgtagtcggccacggtgtcgccaatctcgaagtcatcgatgcccattagtgcgatgatgtcgccagcctcgacgggtttcttggtgcgctccttgcccagaccttcaaaggtgtaaagttccttgatggtcgacttggtcacggagccgtcgcgtttcaccaacgagacgttctgtccggcctgcaaggtgccgcgtttcagacgacccacggcgatacggcccacatacgagctgtaatccaacgaagtaatcagcatctgaggcgtgccttcctcgaacttcgctggcgggatggtgtcgataatgacgtccaagaggtaggagacgttgtcggtgacattctcccaatggtctgacatccagccttgtttggatgaaccataaacagtggggaagtccagctggtcttcagtcgcaccgaggttgaacatcaggtcgaagacagcctcttgcacctcgtcgggacggcagttgggtttgtccactttgttgatgaccacgatgggcttcagccccaactcgatggccttttgcagcacaaaacgggtctgcggcatggggccttcgaaggcatcgacgagcagcagcacaccatcggccatgttaagcacgcgctccacctcgccaccaaagtcggcgtggccaggagtgtcgatgatattgattttgacatctttataacgaacggacacgttcttcgaaaggatggtgatgccgcgttcgcgttcgaggtcgttgttgtccaaaatgagttggccaggggcttcgtctgattccttgaagagttgggattggtaaaggatgcggtccacgagggtggtcttgccgtggtcaacgtgagcgataatcgctatatttctgatattctgcattttagtaaaaattgctgcgataattgaaggtgcaaaaatacaaaaaatcaaaaatactgaatatagaaaaactttagtgcttggatttttctgcccaatcttcaatctgaaggtttgggatatggctggaataagccatatcatttaccagctttcaacgttcctgccatagttttcattgtttcttagcgaattagtatcaatgtcactccaatcaccactaaaacaggtttttaaatcgggatgtttggaagtcatccaataaaactcctccttggccacaataggcttgaaatattcatcaataatccctcgctcaaccaattctttcggtgtgccttgtcgcaaaggctgttgcggtgcgacgacccacataacatcggcgtgacggagcaacaaatcgagatcatggctgctgaagaggatggtcttgtgtttctcgcgcgagagcttgtgcatgatgttgaccagctcgatcttgctcggatagtcgaggaaggcggcgggctcgtccatgaagatgaggggcgtgtcctgcaccaatgccttggcaatcattaccttttgttgctcgccatcgctcaaggaaacgaagttccggttgactagatggctgatgccgacggtttcaaggctgtcgtagatgatttgctcgtcttcggcttttagtttggccagcaggccgaggtggggatagcgtcctgctgccacgatgtcgaagaccttcaaaaacaggtcgtcgggcttttcggtgagcacgaggctgaagagcgagctgcgctcggtgggggagtagtcgcgcaagtccttgtcgaacagcttgacctcgccgccgacgggcttgaggctggccgacagcgtcttgaacagcgttgtcttgcccgagccgttgggacctgccaaggccacaatgtcgccttcgttgaggctcacgtcgatcgcgggcatcagggcttggcctttgtagcctatgagtaggttcgtggtatggagcacttcgttcatctcatgactttttggcggtggaagattacccaaagcacgataggcgcaccaatcaaagccgtgaccgagttgatgggtaggttgccttcgaaagagggcaggcgtgcgatgaggttgcagaacagggctaagtccatgccgaggaaggccgtggcggggatgagcagtttgtggtcgctgctgcggaagaggaaccgtgcgatgtgtggcacggccaagcctaagaaggcgatgggaccacaaaacgccgtgatgagggcggtgaggaagcccgaggcaaggatgatgagcatgctgctccgcttaatgttgacgccgaggttttcggcataacgctcgccgagcagcaagaggttcaaggtcttgaagagcaggaacgagcctatggtgtcgaccgcaaccgcgatggcaaagaagggcagttgtgccttgctcacgttggagaagctacccaagccccaaatgacgaaggagtgcagcccttccttttggctgaagaacttcaggatgtcggtgaccgagccggcgatgtaggcgatcatgatgcccaccaacacgaggctgactatgctgcggagcctcgaactaagggcgaggatgagtagcagcaccgcgaaagcacctaaaaaagccgcgatggtgacaccgaaggtggaccacagcgacagcgtgctgaccgaaagcccagtcgccgtgccaagcaagaccacgaaggccacgccgaggctcgcgccgctgctgatgcctaatagggaagggtcggccaaaggattgcggaacaaggtctgcatcaaaaggccagaagccgatagacctatgcccgccagcagtgccgtgatggcttgtggcaggcggtagtcgaggatgatggcgcggtaggttgacgtgtcgccatgaaacagtgcgtcccagaattcattccacgggatcgacaccgatccatagcgcagattcaggacgaacagcacgatgccgacagccaggatcgcgatggagaccagcgcgatggatggcgttttgcgatggagggtatggtcggtattaggagccatttctgggtgtttttgcgttgcaaagatagggtttaatttgattgaaaggacaatcaatcatcgtcatcatctttcggaccggaaacaagcagcgtcgtatcgtcgcagcggatgccgtaatacacatccctcatgcggccttgctgtggttcgagaacgcctttttcgacaaggtctttgatgtcgcgagaggccgtgtcgaccgaaaccttgcaatgcttggcccagtttttcacggtcaatttgcctacgtaaccatccaaatagatgttcaacaccttgttttgtcgctccgtaaatgcaagatgagcatggttttgccaaaacgcggctttctgcaagatgcgtgaaagcacttcgtcggaagcgttgatggcgcgtgccatgcagtcgagataccagacgagccattccgtgatgtcagcatccgtttgtcggctgacgcgctccaacacgtcgtaatacgatttcttgtctttgttgatttgtcgcgacatgctgaagaagcgcatggcagagtcgtcggcttgcgagagtgccatgtcggcgatggcgcgaccgatgcgcccattgccgtcgtcgaaagggtggatacagacaaaccaaaagtgggcgatggcagatttcaggtaagtgggcgagtcgatgtcggtattgaaccaatccaagaaaacatccatttccttctgcacgtcttgagcgggaacggcttcataatgcactttttcgcgaccgtaattgcccgacaccactttcatctcacctttgcggtattgtgccacgtcgattttcgaataaccacttctgccagaaggaaacaggcagttgtgccatccgaagagccggtcgtgggtgaggggttggcggtaatggctcacggcatcaagcatcatttccacaacaccttccacatagtgactggcgggttcatcggcatcagaagggatgcctaactttctggcgatagaagaccgcacttgtttggcattcaatgcaatgccttcaatctcagaggagctgatgatgtcgttggagagcatctcggcattggccgacaggcgggcgtcgacccctatggcgtcgagtctgcccataaggaaccccgatgccttgttgacggaagccaatctgtctgcgacaagatctttgtcccaagtgaaatgcggccattgtttgctctgatggatgtaggatgccatagttacacgagtatttcggctgcaaaaatacacattattttaataatccgcatgttttgcggttagttatccgcagattttgcggattattggccgcaaaggtcgtgcgtttctaaagaggaagctatttcttatatcgttttaatgcattcgtcaattcatcgagaatggttttgcgtaacgattcaggttcgattacttccaattcgttgccttcttttaaaatggcttgtcggaggtcgaaagttgggacgagatagtattcaaaatctgtgtatgtgtcggtcttgcatatttctttttgcgagtgatgcaaggggagtgttcgcagtagattgggcatgttgtaataggctcgcaaaacgatgcgttgggcagggatttcctctccgatgaacacgccgaaatagtttttgaaaaaggcttcggcatcaaaatcggtggctaattcatattgtgcatctgtatctgttgttttggtcatgcggtcaagggcatagatggccatggcaccgcctttcctttcgcttttgccaagcaggtaccagcgttggtggaacagtttcaagcaataaggctcaattagagtagtgtagggctcggagtcgttgaatttctgatagcccatttgcagggtgtggtggcatttgatagcgttgataatggtttcgaggtgttcgaggccggcaggtacgtcttcaagcaggagttggtccttgatggagaggctatcgaggaggatattgctgacggtgagggtgcggaacatccagttttgggtagagttgtctcgaagtgtctctgggttgttaatataataatggtgctgtttgtcgcattcgatgcggataccgaacatgtcgatgatggattgtcgcaagcggtaaaaggtggtgcgggagaggggtttgccttcgttcaggtcattgacaatccataggtgtccgatgcgctcgaagctgattctttcgttgcggagtatggtatccaccatccatgtgtactgtctgaaagtgtctgtgtttttcatggtgatttgagatttttcgcaaaaatatgaaaaaacaatgatagtgtttcatgttttgaaacagataggttgtatttttggcgcgaacaaagaaaagaggaatgaacggtgacgagatttgggcaaaaaaagacgaggcgaccgaaatcgccccgaacttgatgttttcacaacggaataatccttattgtgaattgctgcatatcttgtgctgcaaaaataggtatttttccaatactgcaagagttttttgaaaaaaatactaattttgacaaaaatttgaattgataaatagttgacttatgaagaaaatactaggacttgacttaggcaccaatagcattggctgggctgtggtgaatgcggaagaaataactcgagagaacgagacaaattatttgaagccgacaggcttaagtacggcaggaagtagaattattcccatgtcggctgatatactgggcaattttgatgctggcaattccgtgtcgcaaacttcggaaagaacaggatatagaggtgtgcgccgtttacatgaaaggtatttgttacgtaggcaacgtcttttgcgtgtcttgaaactaatgggatttttgcctgaacattttgctaagcagattgatgaacaaggaaagttcattgattatggtgagccaaagttagcttggaaaaaggatgaatatggcaaatatgattttgttttcaaaggctctttcaatgagatgttgacggattttgctcaacaccagcatcaaatccttgccgacggcaagaaagtaccttacgactggactatttactaccttcgtaagaaagctctgacacaaagacttacaaaagaagaacttgcttggattctattacagtttaaccagaagcgtggttattaccaattgcgtggcgaggatgaggatgaacagcatgacaaacttgtcgagtttatcgctcaaaaagtggttagagttgaagcaactgatgagaaaaagggtgatgatgtttggtacaatgtgtatttggagaacggcatggtctatcgccgcacgagcaaaatgcctttggactgggagggaaaagttaaagagtttatcgttactactgatctcgaaaaagatggaacgccaaaaaaagacaaagaaggcaacatcaaacgctcttttcgtgctccaaaagaggatgattggactttgctaaagaagaaaacggagttcgacatcgatagcagccgcatgaccgttggttgctacatatatgaccacttgctccaaaagccggaccaaaagattattggcaagttggttcgcacggttgagcgtaaatactataaagatgagttgcgacttattcttgaaacacaggttgccttgatacctgaattgaaggatgatgctttatataataggtgtcttgaagagttatatccaaacaatgaaccgcaccgcaaaaacatagctaaacctgacttcattaatctattcatcaacgacattttgttctatcaacgtccattgaagagcaagaagtcactcatcagcgattgtccatacgagagccatttcgacaaggatggcaatgaacatcccgtgaagtgtattgctaagtcgaatccattgtttcaagaattccgcttatggcagtttgtgcagaatttgcgcatttaccaacgggaaagagttgtcagcgatggtcaactggatttgtttggaaacgtttcggcagggagacttcagacagatgtggatgttacagatgagtttctgaaaactgaagatgattatgtgaagctctttgattggctcaacgatagggcatccattaaacaggacacattgctcaactcatactttaagttcaaaaaggagaagggcaaggatgtgtatccctatcgttggaattatgtggaggataaggaatatccttgcaacaaaacgagggcggcaatgcttgacggattgctgaaatgcagcattgatgctggtttcctcaccagagaaaaagaaatgtcgttatggcatgttctttattctgtggaagacaagatggaaatagtcaaggcattaaaaaagtacgctcaaaagaataatcttcccgatttgtttgctgaggtgttcgccaaagtcaaaccgtttaaaaaggactatggatcgtattccgaaaaggctatcaagaagttgctgccgctaatgcggatgggcaagtattggagcgctgatgctattgacaacaagacaaaagaacgtattgacaatatgctgacgggcgaatacgatgagaacatcaaaaaccgagtgcgcgaaaaggctgttaaattgactgacattgatcatttcaaaggtctgcctatttggttggcatgctacattgtctatgaccgccattcggaggcaaaggaaatcgggaaatgggaaaagcccgaagacatcgactgctatttgaaggaattcaaacagcattcgctacgcaatcctattgtggagcaggtcgttacggaaacactacgtaccgtccgtgacatctggaaacaggaggaacaaattgatgaaattcatttggaactaggtcgcgagatgaaaaatcccgccgacaagcgcaaacggatgacagaaaatatcctgcaaaatgaaaacactaacttgcgcatcaaggcgatgctgatggagttcacaaatcccgaaatgggcattgagaatgttcgcccatattcgccaagccagcaagacattctgcgaatttacgaggaaaatgcgcttgaaaatctgaccaaggatgacaaggattttgatttcgttagcaaaatttccaagtcggcacagccttcaaaatcagatataataaggtacaaatgctggttggagcagaagtatcgctcaccctatactggcgaaatgattccgcttgccaagttgtttacatcggcatacgaaattgagcatgtgattcctcaatcacgctactttgatgattcgtttaccaacaaagtaatttgtgagaaagaggtaaatggacttaaagaccgtcagcttggttttgagtttatcaagaatcatcatggtgaaaaagtgcaactgagccaagacaaagtggtggaaattatgtcggtggaggcatacgaaaagtttgtgaaagaacattatgccaacaaccgcactaagatgaagaaaatgctgatggacgacatcccagacggtttcattgagcggcagttgaacgacagccgatatatcagcaaattggtgaaaggactgctttcgaacattgtccgtgaaaaactagaaaatggtgagtatgagccggaagctgtctcaaagaacttgatttcgtgcaatggctccatcaccgaccgactgaaaaaggattggggaatgaatgatgtttggaatagcattgttttaccgcgtttccgccgtttgaacgaactgacggaaaaggattgctttacggcaattagcgcggaaggccacgaaattccagctatgccgctcgaattgcaaaaaggcttcaacaagaagcgcatcgaccaccgtcatcacgctatggatgccatcgtgattgcatgtgctacaagagaccatgtgaatttgctcaataatgaagcagcacactcgaagcacaatgccaatcgttaccaactgcaacgcaagttgcgccgattcgagaaattgaccatcgatggcatggaaaaagaagtcgccaaggaattcttgaaaccgtgggattcgtttactacggatgccaagcaggttttggaaaacatcattgtaagtttcaagcagaatttgcgcgtcatcaacaagactacaaacagttaccaacactatgacgagacgggcaagaaagtgatagtaaagcaagagaaaggcgatagttgggcgattcgcaagtcgatgcacaaagacactgtttttggtgaggtgaatctgcgaatgagtgataaaaccgtttcgcttaacgaggcattaaagaatccaaaaacaattgtaaacaaggagtttaagaagaaagtaatggaactgatggaagcaggtcgagatgctaaatacatcaagaaatatgtggaggacaacaaggatatttggtcagatatagatgttaagaggatacaggtttattatttcacaaaagaaacaaaagaccgatattttgccactcgtaaaccgcttgacacttcgtttaattgtaagaaaatcaaagaaagtgtaactgacacaggaattcagaaaatcctattggcgcacttggaagctaagggaggagaccctgaacttgctttttcgcctgatggcatcgacgagatgaatcgaaacattgttgcgctcaataagggcaaattccatcagcccatcttgaaagtgcgtgtctatgaaaaggctgataagttcgctgttggtcaaaatggaaacaaatcagctaaatttgtggaggccgccaagggcaccaaccttttcttcgccattttcggaacggaaaagacaaacaaggaaacaagtgagacagaaacagttcgttcctatctgaccattccgctcaatgtgatgattgactgtcaaaagaaatacggttcacaatggcgcaacaacattgaagcctatctgcaagaacaacaattagctacatccgatgccaagctcttgttcatcctctcgccaaatgatttggtgtatttgccgaatgaagacgatacattaaatccaagtcgaatatataaatttgttgattcaagcggtacaactgctaattttattcctcaaagaagtgccaatgtgattttctctatcccaacgaaaaaacaaaaagagatgggagttgattttataatacaagatgagtttggcgtgggtagtccgcagtcaaagaatcaaaaagccatcacaggcgaaatgattaaagaaatctgtgtccctatcaaagttgacagattaggcaatatcatcgaactaaacggaaaaaaactatgaccaacataaaactattccaagacaagaaaatccgttccgcatggaacgaggaagaagaacaatggtatttctctgtagtagatgtggtggaggcattgacggatagtgttaaccccactgactatctgaaaaagattcgtaaaagggatgaggcattaggaagtttcctagggacaaattgtccccaggtagaaatgcttacagaaacaggtaagaaacgaaagactttggcggctaatgtcaaaggcttattccgtatcatccaatccattccatcgccaaaggcagaacctttcaagcaatggttggcaacggtgggttacgagcgtatgctcgaaatcgaaaacccggaactagcgcaggaacgcatgaaggaactctacgagaagaaaggctatcccaaagattggattgacaagcgccttcgtggtatggctatccgccagaatctgaccgatgaatggaaaagaagaggcattaccttggaacaggattatgccattcttaccgcagagatttccaaggccacctttggcatgacaccctctgaatataaggagttcaaaggcttgaccaagaagaaccagaacctccgcgaccacatggacgatttggaactgattttcaccatgcttggcgaacgcgtcacaacggaaatctcccaaaaagaagatcctgagacttttgaggagagccgaaagatcgcaaaacgaggcggaaatgtggcaggcgtggcaagaaaggaaacggaaaaagagcttggtcgaagtgtttcaactcccaataactatttgccaacacaaaacactttggaattagagtcagatgattaagcgtaccttgtttttcggcaatcccgcctacctctccatgcgcaacgcacagttggtcatcaaattaaccgatgcccaaacgcaagaggaggtgatgaaaaccgtgcctattgaagacattggcgtggtggtactcgaagatcggcaaatcaccattaccaatggtgctatgaacgccttgcttcaaaacaattgtgccgtcatcacatgtgatgaaaagcacatgcctgctggtttgttgttaccacttgaaggtcacacggcgcagagtgaacgcttccgttggcagattgaggcttctctgccattgaagaaacagctttggcaacagaccgtacaggccaaaatccgcaatcaagcctcggtgttgaagcggttgagtggagcagaggtgggctgtatgatggcttgggccaacgatgtgaagagtggcgacagcgaaaaccttgaaggtcgagcggctgcctattattggaagtccgtttttcctgaaatggagcggtttgtacgcgaccgcgagggtgaggctcccaacaaccttttgaactatggctacgccatcgttagggcggtgatagctcgctccttagtggccagtggcttgttgcctacctttggcatccatcatcacaatcgctataacgcctattgtttggcggatgacgtgatggaaccctatcggccttacgttgatgagttagtgatcgaaattttgcgtagtggagctgattgtggtgagctgactacggatttgaagcgtaagttgctgggcttgcctgttaaggaagtagttatcgaaggtcgccgcagtccgttgatggtggcgtcttctcaaactacagcctcgttggcaaagtgttttggcggggaattgcggaaagtggtttatccaatgatggaactctgatggaccgtttcagtgaatacaggattatgtgggtgctagtgcttttcgatttgccgacggagacgaagaaggagcgcaaggcgtatgctgactttcggaagcgtatcatggccgacggcttcaccatgttccagttttccatttatctgcggcattgtccgagctatgagaatgccgaggttcatatcaagcgggtaaagtcgttcatgcccgagtttggcgacatcgggattttgtgcattaccgacaaacaatttggtgagatggaaattttcagtaattgtaaaccgaaaacagtggacacaccttgccaacaattggagttgttttgaatcggaaaaaatggtcataacaaagaaaaatccaactcgaatgagctggatttttcttttctgaaacaacatctaaattgttgtggctctttgttttacccatatcgtggttgtttcaaagagcaaagatacaagataaatgcaagcaattcacaacacactctgtggaactatttggagcctgattggttgtttcaaagagcaaagatacaagataaatgcaagcaattcacaactgagcagctgcagcttctttctgagctgcaggttgtttcaaagagcaaagatacaagataaatgcaagcaattcacaacaggtgtctacactggttatgtggttaggcaggttgtttcaaagagcaaagatacaagataaatgcaagcaattcacaacgcaacaaggtcgaacagataacttcggtagggttgtttcaaagagcaaagatacaagataaatgcaagcaattcacaacagattttgcgtttgcatcttattttgatgggttgtttcaaagagcaaagatacaagataaatgcaagcaattcacaacagatttgtttcttcgcctgttcgatgatgtggttgtttcaaagagcaaagatacaagataaatgcaagcaattcacaacgcgaatcgcatcacgccgtacctcccgagggttgtttcaaagagcaaagatacaagataaatgcaagcaattcacaacaaactcaaatacggatacatgccaaaggtaggttgtttcaaagagcaaagatacaagataaatgcaagcaattcacaacaaaatacgattatattggtcagcatcatcaggttgtttcaaagagcaaagatacaagataaatgcaagcaattcacaacgtcgtggacttgtcacgagcgtcccaaaatggttgtttcaaagagcaaagatacaagataaatgcaagcaattcacaacaagcgggatttcgtaccgataacggcgatgggttgtttcaaagagcaaagatacaagataaatgcaagcaattcacaactagatgatgaaaaagaaaaagaactatctaggttgtttcaaagagcaaagatacaagataaatgcaagcaattcacaacgagggtgatgaagtatatgttgtgtatactggttgtttcaaagagcaaagatacaagataaatgcaagcaattcacaacccacttgcgcttgtagattgtcaaatctgaggttgtttcaaagagcaaagatacaagataaatgcaagcaattcacaacaagaaagccgctatgccgctggtgacttggggttgtttcaaagagcaaagatacaagataaatgcaagcaattcacaacatttagtttgtttctgtcttcgttctatcgggttgtttcaaagagcaaagatacaagataaatgcaagcaattcacaacaagcaggtaaagactatgtcaaaggattgtggttgtttcaaagagcaaagatacaagataaatgcaagcaattcacaacagcaatggtggcagcctcctgtgcccctatggttgtttcaaagagcaaagatacaagataaatgcaagcaattcacaacgatcaggaatttgttcgtaacgcagattcaggttgtttcaaagagcaaagatacaagataaatgcaagcaattcacaacgccgattgtgcacaacgtttcggccacttcggttgtttcaaagagcaaagatacaagataaatgcaagcaattcacaacgatgatggaacagtatatgaagctgtaaaaggttgtttcaaagagcaaagatacaagataaatgcaagcaattcacaacaggtgtcttacattatcatacttcctttccggttgtttcaaagagcaaagatacaagataaatgcaagcaattcacaacgcagacttcggagaggacttgcaacctatgggttgtttcaaagagcaaagatacaagataaatgcaagcaattcacaactcagtgaacataaataagtaatccccatagggttgtttcaaagagcaaagatacaagataaatgcaagcaattcacaacatgacgagatatgacaaacataccgagtaaggttgtttcaaagagcaaagatacaagataaatgcaagcaattcacaacgatactcttacctacactgattcttacgttggttgtttcaaagagcaaagatacaagataaatgcaagcaattcacaaccgccagtcggcacggccagcatcgctgttggttgtttcaaagagcaaagatacaaaataaatgcaagcaattcacaactgctttgcttgcgtatgctaaaaatatagtgttgtttcaaagagcaaaaatacaagtttttgaaagcaaattttcaatcttcaagaaactcttgtatttttgcccaataattctgtttgacatgaaaacgctatccaaatgtattctgcttttccttgctgcctttttgctcctccccatgcttctgtcagctcaacaccctcaagataccttcaaagccaagaagcctggcatcgtagcccatcgcggatttcacagttttgaaggctcggtcgaaaacagcatctcatccatgcagcatgcctttgcccatgactttgaaggcaccgaattcgatgtgcagctcacaaaagatgacgtcgccatcgtgtttcatgacagcaaaatgcaaggccacgtcatctgtgacacgcctttcgacacgctgcgtcagttgcaagcatttacgttgaaaaacggtgagaccgtccccacactcgacgagtttttggaagcatgttccatcgcaattaaggaacaatttcctcgtgaaaagcatactcagttgttttttgagatcaagccactgcaacgcaaggaacaacgctatcatcttctcggccaaatcattgaggccatcgggaaatatcaacttcacgacgacattttcttcatttccttcgaccttgatgcttgcgtgatgatggcccaattgctgcccgacatccctgtggcctacctcgaaggcgacctctcgcccaaacagcttcaagaaaagggcatcaccgacatcgactaccattggagcaagttcgctgcccatcccgaatgggtgaaggaggcgcacgacttaggcatgaccgtcaacgtgtggactgtcaacacgcctgaaaaagctctggagatgctgcaattgggcgtggactacatcaccaccgatgaaccccttcagatgcgggaatggttaggtcgagctatgacagaataatgtttaattttgcaaatcactaaaacatatactatgaacaaaactatgcatatccaagaagaggcggcgcgctgcctgctgtgtgccgatgcgccgtgcagcaaggtctgcaaaaacggtgaccctgcccgcgccatccgtgctattagattcgacaacgaagccattgcgggacaatggcttgacaagtgcaacgaagctgaactgcaagccgccgaagcagcctgcatccactacgaccgtcccatccgcatcaaggaattggcggccgccgtcaaaggcacgaagccacaaaaggatctccccagtctcgccatcgatttctgtggcatcccttgcgagaatcctttcttcctcgcctcgtcggccatctgcaccaactatgagatggtggcacgggcctttgaagcaggatgggcgggcgtgttctacaagaccatctgcatggaggacatccgcgaggtgtcgccgcgcttcgacgccgtcagcgagccgggacgttccgacttcttcggcttccgtaacatggaacaactgagcgaaaaccccgttgaggtggacttcgacatcctgcgaaggctgaaaaagaactatccatcgaaaatcgtcgttgcctccatcatgggcaatgctgagacagagtggatcacgctggccaagatggccgaggaagctggcgtcgacgcggtggagctgaatttctcctgcccacagatgaagttggctggtatgggtagcgacgtgggacagaactctgagctggtgctgttctacacggcctacgtgaagcataacgtcaagattcctgtcatccccaagatgacgcccaacatcacccaaatcaaccagcccgccatggccgcccacttcgctagcgccgatgcggtgtcggccatcaacaccatcaagagcgtgaccatgaacgatcgcggtgccgtggccaacaagaagaccgtttccggactttcaggccgtgccgtgaaacctatcgctttgcgtcatatcctcgagatggcgaagaaccccatcttcactgccaccaacaatggcaaacgcatcgagttgagcggcatcggtggcatcgagacctggcgcgacgcattggagttcatccagctgggctgcagcaatgtgcaggtgtgcaccgccgtgatgcagtacggctaccgcatcatcgacgacctcgtgcttgggctgcaaaactatatggcctcaagggacattgagcacttatcggatctggtaggcgaggagctgcccaatttcgacacgcccaccaacctcgaccgcgacaccattgtgtatcccaccttcgaccgtgagcggtgtatcggctgcggccgttgctacacctcatgccaagacggtggccatcaagcgatttcttttgactacaacctgcgtcagccgcatctcgatggaaagcgttgcgtgggctgccacctttgccgactcgtctgtcccacaggcgccatcggcgtggcgaaacggattgcaaagaaggaataaaatgaacgattaaaacagactgggattccttaacgggaatggagaattcttccaactaaaatgcggcggcatgtagcgtttacaccgggtaaacatcacttgccgccgcttattatacgggtacattactccattcccctaaggggaatctatgccagctttagaacctcagcgtcagattccccatgacatggaaacctgccatcgggatgaaaccgatttggtagtaacggttgtcgttcggatggccgtagctgtcgcagatggcagaatagacccagccgctggcagcgtaacgcttgttgaagatgttgttgaagttcaccttcacaatggcttccttgacgatctttttaggcttcagcgtgtagccaaggctcacgttcgaggtgctataggctggcagtgaacgatccagattttgggtgttgtcgagatacatgcgtgagacgtagttcgtgtgccagacggcctcgaagcctttgtggtggaaagtgatgaagccgttcaagatggccgaaggcgagaaggccaaggtcgagttgtcgtagtgaatgacatcgaagccatcgccatcgtaggcattgccgttggcatcggtgttgccttcccaatcgtcccagttctcgacatattcgtcgaagtctttgatcttgtttctgctcaaggcggcgttggcctcgatggtcaaccatttggtggcgttcacgcctgcttgcaattccacgcccatgcggtacgaatccttgatgttggtggtcagggcctcaccgatgtcgctcaccgcgccggtctgtacgaactggttggtgtagtccatataatagaggttggcgcctgcctgccagatgttgccgttgtagttgtaaccaagttcatagtcaaggagttgttcgggcttggggaagggataggagccgttgtcggtgaagttgttacgctcgggctcgcggtggctcaaggctaccgaaccgtagatgtgatggtcgtttttgttccatgagatgccacctttcgggttgaagaaatgataggtctgatggatgtccaaaggttggttgtagtaaccgctctcgtcgtcgtagaacttgtcgttgatgccgtcggtcttgtagtccacatagcggtattgcaagtcgccgaagaggctccaatgctcggtgatgttgtaggcggctttcacaaaggcgctgccatcgagtttgtgggcatcggagtcgtagtatttgtgcttgccgttggtgaggtatttgttggcgacatcggggttggcaatgtaggtgacatagccgaagtggttgccgtcgaatttttgcagtgataggccgccaatgacatcccatctctcatccttatagttggcgttccaattgaggccgtaggtgtgttgggtgaggcctttcctgcgcacgaagtcggtccttttcacttggttgccttcagcatcgtagtaggtcatgccgaatttcgagagcttgttgttgggacggaactcttcgtagtagccatagccgtaggtgtagtgcaaagtggccgaggtcttccagtgttcgttgatgttccaagcggcggagaggaggttgtggtcctgccagaagttgtcggtggtacgattccagaaagtaccatcgttcatttggtagcgttgggtcatgtagtggccgttttcgtctttgacgaagttgccgtcatcatcggtgacgaggtattcgtatagcgagttgtattgtcccaagcccacgttccacatgtcggcgtaggtcttgatgccggtgtgctcgccgtatgtgccatccatgaggctgaggtcgtcgttgcctgccacgacaccgttccaggcttgtccggtcttctcgaagttgccgatgttcttgtagcggagttggaagttgttattaataaaggtgatgccgccataatagcttccgctacggcccttggtgccgtggatgaagccgtcggtgtgggtctcgtggtaggctccgtcgatgatgaggtggttccacaaaagccctgtggaggcttttgcaccgaagttgagcgtgttgaacgagccgtaggatcctgtgatttcggcactcggtacgaaggaaggcgttgccgacgacaaggccactgtgccgccaaaggcgccgtcgccattggtggaggtgcccacgccgcgttggatttgcaccgagcccaacagcgagccatagctgttcatgttagcccagaacacgcactggtcttcgggtgagttaagcgacacaccgtcaagggtgacgttgatgcgcgagtcgcctgcgccacggatgcgcatgtagctggtgccagtgcctacaccgttctcgctccatgcaaggatgccaggtgacttggcgaacaggaagggcagctcctgacccgtctttgaaaagtcgttcagttccgctttctcgatgttggtgacggcaaaaggtgcgtttttctgaacgcgcacgccgctgactaccacttcgttaagcgttttgtagttggtagtgtcgattactactgtgttttgagcattcacatttgccgcgataaacaatgcggcgacaacaaaagaaaatcttttcatctcttgaacttttaatttataaaatgtgaaggggaatgcttgaatctatccaatccctacgccggcattatccggatcaggttagagggtatgttctcagccgtttcaccctgccaaagcaggaaaggcacccctttgtaattctgcggcaaaaataggaattattttcggaacgatgataaaaaactgttatttttgctagataaaacaaaggcaaacgagatgcagattaatcgatttggatattattggctggatacatgggtgatggccaatgtcatacaattggctacgcaagacttttgcgcccgcaatctcaatcacatcaacgatccttgcgggcggcagtacgaccaaatgacacaggcagcacggtcagttccagccaacattgctgaaggcaattcgcgacattcaacttcaaaagaaaccgaaatgcgccttacagatgtggctcgtgcaagtttgtcagaattagccaacgactatgtgaattggctcatgcgacatgaggagattccgtggtcagtgaagtcagaagaacacaaaaatgtaagcaacattcacctcgaccatcccactta

SEQ ID NO: 1057 - DNA, 24647 bp, synthetic construct
  source 1..24647: mol_type = other DNA
  misc_feature 1..24647: note = Synthetic
cttgtcagcttgtttgctcgtcacttgtcaactaaaaaagaattatggccaaaaaagacaatgagcttactccgatgatgaagcagtttttctcgttcaaggcgcaacaccctgacgcaatgctgctgttcaggtgcggcgacttctacgagacttacctgcaagacgccgtcgacgccagccgcatactcggcattacgctgacgcggcgcagcaacggcggacagcagaacggcgcgcctacggagatggccggcttccctcaccatgcgctcgacacctacctgccaaagctggtaagggcagggcggcgagtggccatctgcgaccagctggaggaccccaagctgaccaggaagctcgtcaagcgcggaattaccgaactggtgacgccgggcgtggccatgaccgacaatgtgctcaactacaaggaaaacaacttcctggccgccgtcaacttcggcaaggcggcctgcggagtggctttcctcgacatatccacgggcgagttcctcaccggcgagggctcttacgactacgttgagaagctgctcgtcaatttctcgcccaaggaggtgctctttgagaggggcaagcgcgacgtgttcgagcggtatttcggcaacaagtacttcaccttcgagcttgacgactgggtgttcaccgagcaggccgccgagcagaaactgctcaagcacttcggcgtgaagtcgctaaagggcttcggcgtaaaccatctcaggagcggcattgtggcctcgggggccatactgcagtacctcgagatgacacagcacacgcacatcggacacatcacctcgctcgcacgcatagaggaggagcgctacgtaaggctcgacaagttcacaatacgctcgctcgagctgctgcacccgatgcaggacgacggctcgtcgctgctcgacgttgtcgacaacaccgtcaccccgatgggcgcccgaatgctgaaaagatggctcgtgttcccgctgcgcgacgccaaggccatatccgaccgcctcgacatcgttgacacgttcttccgccatcccgacttccgtgagctcgtagaccagcgcttccgccgtgtgggcgacctcgagcgtatcatatccaaggtggcagtgggccgcgtgtcgccgcgcgaggtggtgcagctgaagactgccctgcaggctatcgtgccggtgaaggacgcatgcatgacggcaggcgacgaagggctgcgccgcatcggcgagaacatcagcctgtgcgagagcctgcgcgaccgcattgcccgcgagataaacgaggactcgccgcagctggtaagcaagggcggggtaataagggacggcgtcaacgccgagcttgacgagctgcgccggatatccaccggcggaaaggaatacctgctgaagatacaggaacgcgagagcgaagccaccggcatagcctcgctcaagataggatacaacaacgtgttcggctattacctcgaggtaaggaacatatacaaggacaaggtgccgcaggactgggtgcgcaagcagacgctcgcgcaggccgagcggtacatcacccaggagctgaaggaatacgaggagaaaatcctcggcgccgaggacaagatactggcgctcgaggcaaggctcttcaacgagctcgtgatagccatgcaggaatacatacccgccatacagaccgacgcctcgctcatagccaagatagactgtctgctctcgtttgccaaggcggccgagcagcaccgctatatccgtccgcaaatagaggccgacgagattgtgctcgacatcaagcagggccgccatcccgttatcgagacccagctgcccgtgggcgagacatacgtgcccaacgacgtctacctggacgaccggcggcagcagataatgatgataaccggtcccaacatggccggtaagtcggctctgctgcgccagacggcgctcatcgtgctgatggcccagacgggatgtttcgtgcccgcagatagcgccaaaataggcttggtggacaagatattcacccgtgtcggcgcgtcggacaacatctcgctgggcgaatctacgttcatggtcgagatgaccgaggcctcgaatatcctcaataacgtcaccccgcgctctctcgttctcttcgacgaactcggccgaggcacgtcaacctacgacggcataagcatagcgtgggcaatagttgagtacctgcacgaacggcctaaggcggcagcgcgcacgctcttcgccacgcattaccacgagcttaacgagatggaaaagcacttccagcgcatcaagaactacaacgtaagcgtgaaggaggttgacaacaaggtgatattcctgcgcaagctggagcgtggcgggtcggaacattcgttcggtatccatgtggcgcagatagccggaatgcccaagagcatagtgcgccgcgcagaggcgatactcaagcagctcgaggccgacaacgctcaggtaggttcggtgggcaagcccgtgcatgctgagaggataacgcctggcggcgacggcatgcagctgagcttcttccagcttgacgaccccgtgctgagccaggtgcgcgacgagattctcggccttgacatcaacaaccttacgccggtcgaggcactcaacaagctcaacgaaataaagaaaattgtcactggcaagtaatcctatcaggcctattaggcttatcaggctaattaggcccaatgagccaaataggcctaataagcctaatagtttatgaaataacaaatgttcaataaaacaacatgatcaggccggttgaaactaaggacataccgcaaatcacggagatttacaaccgttacatactcaacggggttgagagctttgaaacagaggctcttaccgaagagcggatgggcggccgcatagcgggtatatatcctgattttccatattacgtggccgaggaagagggtagggtagtcggcttctgctacgcccatccgtggaaagagcgagccgcttacgccaacactctcgagactacaatctacctccgtcacggcgcaacgcgccaaggcacgggcacggcgctgatggaaaagctcgttgacgagtgccgcagtcgcggcttcaaggcgctgatagcctgcataacgggcgagaacgaggccagcatagcgttccaccgcaggctcgggttcgagcaggtgtcgctgttccgtagtgtcggttataagcacggacgctggctcgacgtggttgacatggagcttttgctgtgttagttgtagaagttccggcagggtagggagccttagttgattgccgtgcgacgccctgcaacggttgtataagtttacagacaacctttcttccgtgcccttcgtttcagttcgtcaatgcgtttctggtaagtcctcatgagcgatttgcccgagtttattaccctcaggtccatcgccgtcgaaccgtccaccatgtcgggagctatcctgtgcgcggcattctttcccgcttcgtgcgccgctttgccgccggtgcttttggcttccttggccagtttattttcgtatcttgatatttcggacaatatttgggcgcagcttgagcctcctcccgacccgcttccgatgtcgccggcgcccatcgagccaccgcctccgcccgacgagccgtgctttatcgtctcaaccgtggtgtaggccgtcgtcgccacgcccaccactaccgcggcaacttcgagcgccgagcctattctgttccacctgcgctggtttctgtccttcttcgcctgtttcaggttggcggctatctcggtgttttcaggttcgagcttgtgcgccactttcagcctgttcattccctctttgtagtcctcggcctcgatgtccattatgccgatgttgttgtgcgccatggcaaagtcggggcaggcgagcagtatctggttgtacagactggtcacctcgtgcctcggggcgttgctctcgtccatcttgacagccttgaggaaggctttttcgacaatgctgtcggtcagttcgccgttggtgtctaccagtccgctttcatagttgatgtaggctatcgccttgccgtctacgaactcgtcaatgccgtcaaggcacgggggcagcaccatcatgcccgacgtgcggtacagtcctatcctgccgcccgtgtcggccactatcatcgaggcgccgtcgtcgtaagttatgatgtcgtattttgccgggattattatgcgtccgaaggcgtcggccacgccccatttgccgttctgggctatcatcagaaggttgtcgtcttcaggcacgatgtcgtcatatatcggcgagagcacgcaactgccgtcgtcggcataggcgcttttcagtccgttctcgtccttcacggttatctttctcgtctcgccgttgccgccgccgttgattttcgcgtcggcctcggcagccgcctttgttgttatgtcgagcgtcctggcgtatttgcccgccgcgtagtccttggccgcctgctccttagcctcgcggtagggcttgttggagaacggcacgctcgtcatcgcctcctcgagcggaaacttgcacggcactaccagttcgccgttaaggtttatcgcgccgaacttgccgtcctgcttcaccgtggcgagcttgttgtcgcggaagttctcggcgtattcgtatatcggctttatcacgaacgccccgttcttgtcaatgaagccgtacttgccgtttatcttcacggcggcaaggccgaggctgaagccgtcaagattcttcatgctctcgaatttgggttcgatgacgaacctgttgagcgtgtcgatatagcccaccttgccgtgcagctgcacggcggcaagcccctcagagaattcctttgccacgtcctcgtattgcggcgagataacccattcatcctcgtatccgtgggtaagcagttcgttcttcgagccgccgcctatgcccagagtgccgaacgatacgcgtttggcgcgctggaaccacagggtacggccgctttcctctttgttgacatatccccataggcctgtctcagagtctttcttggccacggtaaacttgtcgtcggcgctcacgtgggcggcggcgatgatgaagaatataagcagtaacgttctcattgttgtttgtttttgcagtagaatcaggccgggccgcggccatttgtcacactgcaaatatagtgaaaggtgagcgcaatggcaagaaaaaaacaaagttttttaacttgacattgccgaaccgcctcctgtattcgtgaaacaaatatagcgaaaaaaacgtaaaaccaccatccacgcgctgccttattttcccgtctgtaaacacactggttacacaacgggcggcattacatgccgttgcggcttctgaagcgctgtggatggtggtttcggtcggccttgcggcctgtaggttgcatgcctgtatgcggttggattatctctcagccccgagccgtctcatcagcggacggttgaacatgcagagcaggccgacgatgacgaacggaatgctgagcagctggcccatgttaagcagcatgtcggcctcgaacgactcctgaatgtcctttgtgaactcgatgaagaagcgggcggtgaagataagcgttatgcacagtccgaagaagaatcccgtgcccacgcgctcgggccgtttgcggtatatgtaccatccgatgaagaagaaaacggcgtaggcgatggcctcgtagagctgtcccggatggcgcggatacatgtccacgcgctcaaaaatgaacgcccagggcacgtcggttaccttgcctattatctcggagttcataaggttgcccagtcgtatgaggcacgccgtggtgggagtggctatcgccacgttgtcaagcacgcgccagaggttgaccttcgtgtggcgcacgtacagccagagggcgatgatgagtccgatggtgccgccgtggctggccagtccctcgtagccggtaaacttccacgagccgtcggccatgaagtgtatcggcaggaacatctccaccatgtggcgccatgacgacaggaagtagtcgggctcgtagaacaggcagtggcccaggcgcgagcctatcagtatgccgacgaagcagtagatgaagagcgggtcgaacagctcgggctttatcttctgctccttgtacaggcgcttgacgatgaggtatgccgccagcaggcccagcagccagcacagcgagtaccagcggaacgagaagctccctatgctgaacgccacgaggtcggggttccagaggatggatagtaattggttcatatttattcagtagttaaagtagttaatgtagttaaagtagttaaagtcattacttttgcttgtaatgtgaaataaatggctaatagtcaaggcatttgactttaactacttagcgaccaacgggagcggtaactcctttaactactctaactacttgatatttatacattaaacctgaagtgcatgatatctccgtcctgcactacgtagtccttgccttctatgcctaatttgccggcttcgcgcacggcggcctcagagccgtacttgatgtagtcgtcgtacttgattacctcggcgcggataaagcccttctcgaagtcggagtggataacgccggcgcactgcggagccttccagcccctcttgtacgtccacgccttcacctccatctcgccggcggtgatgaacgtctgcaggtcgagcagcgagtaggccttcttgataaggcggttaacgccgctctcctcaaggcccagttcgtcgaggaacatccgcttgtcctcgtagctctcgaagccagcgatgtcctcctctgtcttggctgctattaccagcacctcggcgccttcctcctttgcaatttcctctacgcggcggctgtagtcgttgccgtcctttgccgacgcctcgtcaacgttgcaaacgtacaatacgggcttggccgtgagcaggaagaggttgcgtgcggcctgctgctcctctttcgactcgaactctactatgcgggcgttcttgccctgttcgagcgcctccttgtacgcttccagtaccgttacctccacctttgcgtccttgttgcccgcggcggccaccttctgctgcttagacagacggccctcgatggtctccaggtccttcagttgcagctcggtgtcgataatctccttgtcgcgtatcgggtctatggtgccgtcaacgtgggttatgttttcgtcgtcaaagcagcgcagcacgtgaatgatggcgtcggtctcgcgtatgtttccgaggaacttgttgcccagtccctcgcccttcgaggcgcccttcaccagtccggctatgtcgacaatctcgcacgtagcgggcacaatgcgtcccggatgtacaatctcggccagcttagtcagccgctcgtcgggcacggtaatcatgcccacgttaggctctatggtgcagaaagggaagttggcggcctgcgccttcgcgctcgacacgcagttgaaaagcgtggacttgcccacgttaggcaatcccacaataccacattttaatgacatatctttgtataaacgtttatatcttcgggtgcaaaggtacaaaataattcataataagcaaataaattattataacatacccaccctcaacctccccgaggggaagccccctcccaacctccccggggggggggaggagcttagtttgccttgccggttttagtcaatggcttattgggcttattagccttattagtcccattagtcccacaaccaaatacccaaaaaccccacaaccataaaatgccgcaaatcacgatatggtttgcggcattccggcgtgtcgtccgcggcctttcgtcatgccatttgcggccttccgctgtggcgccttttctgcctgaatgcatgacaatggttatctatgaaatagcgatagtataaaatctattgtcttaactcctgaaataaagcatttggctttaactccttagcgaacgacagtgaacgataactcctttaacttctttaactaccaaataaaaatatgttaaaccgacattactttttcgcactttgtccgtcatatatgcaaataacgtaatctttttaacaataacgcatatttttatggacaagaaaacattggcgattgcggctctggccatgggactggggacgcagtcagttatggcgcagtatcctcagctgacgcctgagggcaaggccaagattgactcgctcaccaaggtctggacggcacattctgactcggcgtgggcagtagcattacccatagttaagaaagaggccatggagaacggccgcccctacgtgccatgggcgttccgtccgtatgacctcaagcaggcaaagatacccgcattccccggtgctgagggcggcggcatgtacacacagggcggacgcggcggcaaggtgctcgtcgttaccaaccttaacgactcgggccccggctcgttccgctgggcttgcgagcagggcggtgcccgcataatcgtgttcaacgtttcaggaataatcaagctcgagacgcctatcatcctgcgcgctccctacgtgacgatagcgggacagacagccccgggcgacggtatctgtatagcaggacagtcgttccaggtcaacacccacgacgtcatcgtgcgccacatgcgcttccgccgcggcgccaccaacgtgtggtaccgtgaggactccttcggcggcaaccccgtgggcaacatcatgattgaccactgctcgtgcgagtggggactcgacgagaacatctccttctaccgccacatgtacagcatgaacgacggcaagccctcaagaaaagacccgacggtcaacgttaccatccagaacaccatctcggcaaaaggtcttgacacatacaaccacgccttcggctctaccatcggcggcgagaacaccaccttcatgcgcaacctctgggccgacaacaccggacgtaacccgtcgataggctggggcggagtgttcaacttcgtgaacaacgtaatctacaactgggttcaccgcacggccgacggcggtgagtactctacgatgagcaacttcatcaacaactactacaagcccggaccgctcacaccgaaagactcgcccgtgggctaccgtatcatcaaggccgaaagccgcagcaaaaagctcttcccgtggccgcaatacggccgcgtgttcgccatcggcaacatcgttgaaggcaacgagcgcgtgaccaaggacaactgggacggcggaatacaggtatccgacatcggcgacggcacacagatacccgaagacgtaaaggcactcatgaaatccgacgagccattcgaaatggcacacatgaccatcctgccgtctgacaagacattcgactacgtgctcgagaacgtgggcgcgacactgcctacacgtgacatcgtcgaccagcgtatcatcgaggaggtgcgcaccggcaaggcatactacgtagacaagctgcccaaggacaacccctacggcgaccactggggcatgagcgagaagacagccaacgaggagggcctcttccgctaccgccgtctgcccaaggactcttacaagctcggtatcatcaccgacccgcgccagatgggcggatatcccgaatacaagggagaaccgcgcgttgacaccgacggcgacggcatgcccgacgactgggagattgccgcaggcctgaaccccaacgacccctctgacgccaacggtgactgcaccggcgacggatacaccaacatcgagaagtacatcaacggcataagcaccaaggtgaaggttgactggaccgacctgaagaataactacgacaccctggcaggcaagacgtcgctgtactgataaaacgacaattatctgcttaaagccgtgcccggcggaggttacatcctccaccgggcacggcctttttcatagtagtccatcacgtgcggcggcgcgaaataaccacatgaaacgacaccgattgtcgtttttatttactatatttgcgaaatctaatattgctaacaccaacaccatgaaaagaatattgggactcgacctcggacctaacagcataggttgggcattggtcataagaagaaatgacagtgacggaccggaatttatcgaacgtatagaggctggcggcagccgtataatacctatggacgccgctattcaaggtgattttgaaaacggcaactcggtatcacagactgctgagcgcacaggctaccgcggcatacggcgcctgcgcgagcgttgtctgttaaggcgtgagcggctcaacagagtgctcgacgtaatgggattcctgcccgatcattacgctgcagagctgacacgttacggcaagtttaaggagcctgacggctgcaagctggcatggcgcaggaatgacgacggtaagtatgagtttgtgttcaaggattcgtattccgggatgcttgatgatttcaggcaatatcagggccagtggctcggtgatggcgggcttgtgccgtatgactggacgatatactatctgcgcaagaaagccctgacacaggccataacaaagcaggaactggcctggatactgcttaatttcaaccacaaacgcggatattaccagttgcgaggcgaggatactgatggtgacaagagtaaactggaggagttttatgccttgaaggtggttgacgttgttgacaccggtgagcgcaagggcaaggacacatggtatgacataatgctggagaacggtatggtgtaccatcgtcctgcgccaacacctcccgactggataggtaaggtcaaggagtttatcgttacgacccagctcgataatgatggcaagccgaagacagataaggacggaactgtgaagcgttcgttccgtatgccgaaggaagacgactggactcttgtcaagaaaagaaccgaggcggatattgacaggtcgggtaagaccgtgggtgaatacatatatgaagccctgttggctgacccgaagcagaagatcaagggcaagctcgtgcgtacagtggagcgcaagtattaccgtgaggaactcagaagaatacttgacgcacagataaacttcatccctgaattacgcgacgaagccctttatgaagcatgtttgaatgaactttacggtacaaacgacgcttacaggcattctattgaggggcgagggtttacctacctgttcgttgataacatcatcttttaccaacgtccgttgaaaagcaagaagtcgctcatagacgactgtccttacgaatcgcacgcttatgttgacaaagagaccggtgagcagaagacggttccagtaaaatgtattgccaagtcaaatccactgtaccaggagttccgcctccggcagtttgtagccaatttgcggatataccaacgacagaaggagattgacggaatattgcgtgttgacgttgacgtgactgatgagtttatagctacggttgatgaccaagtgaaactgtttgactggcttaacgactgtcagaacataagccaggaagcattacttgtaaagtatttcaaaataaagaagccgcgtggcaaggacgtaccgttgccttatcgctggaactacgttgaggacaaaacgtatccatgcaacgaaacgcgcggaaaaatgttggagtttctcgaaaaagccggcgtagataaaggcattcttaccaaagacgtagagaagagcctttggcacattttttactctgttgaggacaagcaggagctaaatcgggcattgataacttttgcaggaaaacatggtcttggtgacaagttcgtggaagtattctctaaatttccgccgttcaagaaagagtatggcgcttattccgagaaggcgataaagagattgttgcctcttatgcgtgttggtagtcattggagtgaaggcgatattgatgaaaacacccgtggtcgcatagagaacataataaacggagaatatgacgagacgataaaagacagggtaagggaaaaagccatcaacctgacggatataacacaattcagcggtctgccgctttggctggcgtgttatgtagtctatgaccgccattctgaagctaaggaagtaacaaaatggacctcttccgaggatgtagatacgtacctgaggcattttaagcagcattcattgcgcaatccgatagttgagcaggtggttactgagacgctgcgtacggtgcgtgacatttggaggagatacggcacgatagacgagatacacatcgaaatggggcgtgagatgaagcagacggccgaccagcgcaagaaggcaacgcagcggataacggacaacgagaatgctaacataagggccaaggtgctgctgactgaatttattaatccggagttcggtatagataacgtacgtccttattctccaagccagcaggaactgttgcgcatttatgaggatggcgtgctcggcagtgtcggtgagattgaggatgacatcagtgctattatgaagaaattgagcgagacggacgtgaagaaacggcctacgcacaatgaagtcatgcgctataaactgtggctcgaccagaaatatctgtcgccatacacaggcaggttcataccgcttgcgaggcttttcactacggattaccagatagagcatatcattccgcagtcgcgttatttcgacgattcgttctcaaacaaggtgatatgcgagtcggccgtcaacgcgttgaaggacagaatgctcggcatggagtttataaaggagaaacacggacaggttgtagagctcggcaacggcactaccgctacagtcttgagcgttgaggaatacgaacgtctagttgcgaacaactacaagaacaatcagcccaaaatgcgtaagctgctcatggacgatattcctgacgatttcatagagcgccagcttaacgacagccggtatataagcaagttggtcaagacgctcatgtcgaacattgtgcgcgaggaaggagaggagcaggacatttctaagaatgtcattgtcaccaacggcgcgataaccgacaggctgaaaaaggattggggagtaaaggacgtttggaaccgtatcatactgccgcgttttaagcgtcttaacgagttaaccggtacgggcaagtttactacgacaagcgcttccggacatgagatacccgacatgcctcttgatatgcaaaagggattcaacaagaagaggatagaccaccgccatcacgccatggacgcgatggtgatagcatgcactacgagggaacatgtgaacctgcttaacaacgaggcagcaatgtctaaaaacaatgccaaccgctatcaattgtcacgtaagctgaggcgttatgagcaaacggaagttataagaaacggcgagcgtaagaccatatccgttgcaagggagttcatgaagccttggcctgcattcaccacagatgttgaaacagtcttgcgggacattgtcgtgagcttcaaacagaatctaaggataatcaacaagacaacaaacagataccagcatttcgataacggcaagaagtctatgttacatcaggccaagggcgacagttgggctgtgcgcaaaccgcttcataaggaaactgtctttggagaggtgaacctgcgtttcgtacgtgaggttgcgttgaaggaggcgttgaaatgtccgaaagctatagtagagaaggacttgaaacgcaagattacggccatgcttgaacttggttatgacgataagggaataaaacaatattttgagtcgaataaggacgtatggcatgattttaacccaacgaagataaaaatatattacttttcgaacgatatccttgataaggacggtaacgtaaaagacagatatttcgctacacgtaagtctcttgatacaagttttacgcgtaaacgtatagagtcggttactgatacagggatacagaaaatattgttgcgccatcttgagtcttacgacgacaatgccgagcaggctttttcacctgatggtatagaagccatgaaccgtaatatcaccatcttgaacagcggcaagtttcatcagccgatatataaagtgcgtgtgtatgaaaaagctgacaaataccctgttggcaaacggggtaacaaagcagcgaagtttgtggaagcggcaaaaggcacaaaccttttctttgccgtttacgagacggaagaatttgataaagttaccggcgatataaagaagaaacgttcgtacgcaaccattccgctttatgaagccgtgaaacgtgcaaaagccggattgtctatagctccggccaatgccgatggcaatgagcctgcgtttgtactttctccgaatgatcttgtgtaccttcctacaaaagaggatattgaacgtggaacggtaagtatgccgctggataagagtaggatttataagatggtttcatcttctggttatcaatgtttttttataaagtatgaagttgcaaacgttgttgttgacaagtatgaattttcttcgttgaacaagatggaacgtgccattactggagaaatgataaaagaaacatgcgttcctataaaagttgacagaataggcaatattattgaaataaacggaaagaagccatgataaaacgaacactgtgtttcaccaacccggcctatctttcgttgaaagacagacagctggttatacgcctgccggaggtggagaaaagcgacatgccggaagagttgaagaaagaagcggtgaggactgttcctgtcgaggacataggcgttgtggtgcttgacaataagcagataactttgacggaagggttgctcgaggcgcttctcgaaaataactgttcggtaataacgtgcgacagccgcagtatgcccgtaggccttatgctcccgctttgcggtaacactttacagagcgagcgtttccgtgaccagcttgacgcgtcgctgccgctgaaaaagcagctttggcagcagacagtcaaggcgaaaatagataaccaggcagcggttcttgctcaatgcgcagggagtgagacggggtgtatgcgccgttggtcggccgatgtgcgcagcggcgatacagacaatcttgaaggccgtgcggcggcgtattactggaaaaatctttttgacggcatacctggccttgacggcttcacccgcgaccgccagggcattccgcccaacaatctccttaactatggttatgccatcttgcgtgccgtaatagcccgctcgctcgtgtcgagcggactgttgcccacgcttggcattcaccaccataaccgttataatgcttactgcctggcagacgacataatggaaccataccgtccgtatgtggacgagctcgtgtacggaatagccgctgagtacggcatagacatacctgaagatattacgaaagacctgaaaatgcggctgctcggcatacccgtcattgatgttaggataggtggcaagcgcagtccgttgatggtggcggcaacacagactacggcgtcgctgtataaatgctttaacggagaggcccgccgaatagcctacccagagatgtgaaataaacaaaagtgaatatgtcagaccgtttcagcgaatacaggattatgtggatacttgttttcttcgaccttcctaccgagacaaagagggacaagcaggcctatgccttgttccgcaagaacctgcaacgcgacggtttcacgatgttccagttctctatttatgtccgtcattgtgccagcatggagaatgcccaagtgcacatcaagcgcgttaagtcgttccttcccaagtacggacatgtaggtgtactttgtatcaccgacaagcagttcggcgccatagagctgttttatggcaaaaaaccggtagagcctaatgctcctggtcaacaacttgaattattctgacatttatgtttatttaacaatgttcttctgtttgttgcgctcagttcatggtttttggtggcattctaaatagtttcgacttattctcttgaaacgtcaaatccggcttaatagccggatttgacatttagacaaccatctttttatattttctaatttatcttatatctcactgattatcagtgttttaccgtaatcgtgatgtttgtcttagcgcaaagataagaattttaaagcaaatcacaacagacatatgcaagttgtaaagatgcaattcgatgtttgtcttagcgcaaagataagaattttaaagcaaatcacaacacggtacgtatccccaccacggggcacgttgatgtttgtcttagcgcaaagataagaattttaaagcaaatcacaacaaaattgggggtatgcaactgaacaaacaggatgtttgtcttagcgcaaagataagaattttaaagcaaatcacaacattcgatacgaacacttccagtttccgccagatgtttgtcttagcgcaaagataagaattttaaagcaaatcacaacttaaatttgttcctaaatcaaatttctcaagatgtttgtcttagcgcaaagataagaattttaaagcaaatcacaactgcttctctttgttcgcctttctctttgtagatgtttgtcttagcgcaaagataagaattttaaagcaaatcacaactgggcacaccttcgatgtgaaaagaatcacgatgtttgtcttagcgcaaagataagaattttaaagcaaatcacaactgtttatttgtacttacacgcaagtaaatagatgtttgtcttagcgcaaagataagaattttaaagcaaatcacaacataacgtatgaattttacggtacgccacccgatgtttgtcttagcgcaaagataagaattttaaagcaaatcacaacaccgttcgtattctgctccctcttgttgcggatgtttgtcttagcgcaaagataagaattttaaagcaaatcacaacaccaacaacgcatttatgacgcttatgaatgatgtttgtcttagcgcaaagataagaattttaaagcaaatcacaacattcggaacttattaatatagcgttatcaggatgtttgtcttagcgcaaagataagaattttaaagcaaatcacaaccgtatttttgtttcaattttttcaacattgatgtttgtcttagcgcaaagataagaattttaaagcaaatcacaacaatacctttcgtaattctgattaatttgttgatgtttgtcttagcgcaaagataagaattttaaagcaaatcacaacaggccacacattcgacgtgaagagaatcagatgtttgtcttagcgcaaagataagaattttaaagcaaatcacaactgctccttgccatggttacttgatggctatgatgtttgtcttagcgcaaagataagaattttaaagcaaatcacaacaaggtgatttatctggactgtgtgaacctagatgtttgtcttagcgcaaagataagaattttaaagcaaatcacaacttgttgctcgttcagcccgtcgatagcgtgatgtttgtcttagcgcaaagataagaattttaaagcaaatcacaacgccctgtgccatgcgataaaaaagtctttggatgtttgtcttagcgcaaagataagaattttaaagcaaatcacaaccaacgccgtgatgtcaggccgttacacgctgatgtttgtcttagcgcaaagataagaattttaaagcaaatcacaaccgtccggcatgctatcgacgggctgaacgagatgtttgtcttagcgcaaagataagaattttaaagcaaatcacaacaatattataagacatcttggatgtctccgtgatgtttgtcttagcgcaaagataagaattttaaagcaaatcacaactcatgcgagatggacttgaatttagtgattgatgtttgtcttagcgcaaagataagaattttaaagcaaatcacaactgagtcgttgtcaaggccttgatggtcctgatgtttgtcttagcgcaaagataagaattttaaagcaaatcacaactgtaattaaaataaatgcttatctttgcagatgtttgtcttagcgcaaagataagaattttaaagcaaatcacaacgcacaaagcattccgaagtcgaaagtgaaggatgtttgtcttagcgcaaagataagaattttaaagcaaatcacaactgttgacggagaagctataaaagcggatacgatgtttgtcttagcgcaaagataagaattttaaagcaaatcacaacgcatttttgttctaagatgttagtaaaagagatgtttgtcttagcgcaaagataagaattttaaagcaaatcacaacaataccaagcgaatatactgttgatgattagatgtttgtcttagcgcaaagataagaattttaaagcaaatcacaacagaaaatgattgtcttttcttgcggaacttgatgtttgtcttagcgcaaagataagaattttaaagcaaatcacaacaaaaaggatttggccaagaaaatttggccgatgtttgtcttagcgcaaagataagaattttaaagcaaatcacaacgtgccaataacataggccaaatagacattcgatgtttgtcttagcgcaaagataagaattttaaagcaaatcacaaccgacgcctatcttcagacaaagaagtatcagatgtttgtcttagcgcaaagataagaattttaaagcaaatcacaacgaaggtttggttgagcctcagaaattttcgatgtttgtcttagcgcaaagataagaattttaaagcaaatcacaacaacgaataaacaataaacggcccagcgtatgatgtttgtcttagcgcaaagataagaattttaaagcaaatcacaacacgcattaaccgaccttaaagcaacagcgtgatgtttgtcttagcgcaaagataagaattttaaagcaaatcacaaccggcttctcgctttggcaaattctgctttgatgtttgtcttagcgcaaagataagaattttaaagcaaatcacaacgaattatgggagaatgttatgacaaagttagatgtttgtcttagcgcaaagataagaattttaaagcaaatcacaacaatcatcaatagaagcattaccgtaaaaggatgtttgtcttagcgcaaagataagaattttaaagcaaatcacaacgggctaaacagaatggagtagatcccgaaagatgtttgtcttagcgcaaagataagaattttaaagcaaatcacaacaggctgtgtttgctcggccacagggcttgcgatgtttgtcttagcgcaaagataagaattttaaagcaaatcacaacggaattgtcaggaacgtgcaatggctgggggatgtttgtcttagcgcaaagataagaattttaaagcaaatcacaacacacggatgtatttgtaaatacttggtttggatgtttgtcttagcgcaaagataagaattttaaagcaaatcacaacagctcctcggctatactcttattgaacgctgatgtttgtcctagcgcaaagataagaattttaaagcaaatcacaacatgtgaacgacacctaccttatgcggctgagatgtttgtcttagtgcaaagatactcgagttcgggataagaaaaacatcagaaaattggtaatcacgtaaatattttgtatctttataggtgaaaatcaatgagttacaaaaatattcaacgatgattaccgaagacaaaattatagaaatttattgtattgttgacgagttttcaaagaaatttgacttgtaagcggagaaaaacttgaaaataagcggtcgtggcgacgacaaacgccaccgcaaacgtccgtgccgtatgtcaaaaagcgagaaatgtccgtacttgtatatttccatttcggcactttcagcaacttcaatcactattatctgtttttcatcaggcaacaccttgcggggtacttcccggaagcattgtcatacaaccgctttgtggagttgatgccgcgcgtgtttgtgaaaatgctcgtgttcataaggctttgttccttcgaccgttgcagctgcataacgtttgttgacagcacaatgataccagtatgcgacaacctgagcaggtatgccaacaaggtgttcgccggtgttgcaacggacggtgacggcatgcccgacgactgggagatagccgctggcctgaaccccaacgacccctctgacgccaacggtgactgcaccggcgacggatacaccaacatcgagaagtacatcaacggcataagcaccaaggtgaaggttgactggaccgacctgaagaataactacgacaccctggcaggcaagacgtcgctgtactgataacgatccttttgttggaaataataaataaatgtgccgctgaaagctacatgcttcaacggcacatttgcttttattatactttttgttgcgtttcacggaatagtacaaaccgcacccactcggtcatttcaccgctaagtgctcctcccgtttgtggtaatcctgaagccttatatgcatttttcctgcatactatttaagtttcggtaaataattattatatttgcataggtgtattctatgcaccgcatttttgaggaataaagaggcgttatgcttgtcttgtaacttgagaacctgagaaattcgcaacgtacttacaaggattggcatagtggttcttacgcttggtgtgggctgctatatccatatcgtaaagtacgggttttctcaggaccttcaagtttgtgacgtagcattgcagttccacgcctccataatatttatttaacttcgttggggctggcggggcaggagataaagagaatgagaaaatttttgttgagtgtagctgtcttattcgcttttgcattgtgtgcaagcggacagattatgcgtgcggaggagcttgaacagtatgcgatggagaagtacggcgataagtgggttgatgcggccgagaaccttgcatcaaatttgatgttggacaaaaacaacggtattacgtacagccaggtagtgccttgtccgggaaagtcggcagacgagctgtacgtgcttttgatttattggtttacggctacattcaacgacgccaattccgtaatcaagctgaatgacaaggagcttggcaccattattgcccagggttatgttgacggcatagcgcaacatactggtggcactaattcgtataatgtttccataaggcccgtaatcaaggttgatataaaggatgagaaaatacgtgtaacctatacagtgccgttttattctgttgtagtggctcagggtggtggatggtttggtactattgacggaacagttgccacgaagagcgacgagaactggcccatagacaaatgctatccctttgtgaaaaaagacggccacaagaggacttcgagcaaggcgttggtgatggctcacgcttattctaatgtcattatggataagattgaggaggctgtcaggaacggtcttatcggtaacgaggatgataattggtaatcggttggtaagtattggtaaattattgattgacagttatttatctaacggcggcctttcgcactgcgaaaggccgccgttgacgttatgagatgtggcttattgctgcactgtttgccgtcaattgcaggtcggtaaggtaggagttttggtgaataaaatcaaataggctgattggactaatggtctggctgctgcggaaatccatttgatttgtaattcttcattttcaatttttcacttaacttcagtgtgcttcgagccagttttggccccatccgcagtcggccacgaggggtacgctgaggggataggcggcctgcatctcctcgagtactatgcgctcgacggtttccttctcgtcggggtagacgctgaagttaagttcgtcgtgcacttggagaatcattttcgagcgcaggcgctcgtcgcggaagcggcggtggatacgcaccatggcgattttaattatgtcggcggcggtgccttgtatgggtgcgttgatggcgttgcgctcggcaaatccgcgcacggtggcgttgtgcgacgtgatgtcgggcaggtagcggcggcggtggagcagggtctcggcgtagcccagtttgcgtgccgtctcctttgcctgttccatgtattccgcaacctttgggaaggtggcgaagtagccgtcaatcagctgcgttgcctccgtgcggctgatgtcgaggcgctcggccagtccgaacacggtaatgccgtagataatgccgaagttggcccgcttggccttcgttcgctggtcgcgcgtcacggtgtccatcgtctcgtggtagattttggcggccgtagcggcgtggatgtcgtagccctcgcggaaggcctcctgcatgttttcgtcgccgctcaggtgcgccatcacgcgcagttctatttgggagtagtcggccgagaagaacatgcagccctcctcgggcacgaacgccttgcgtatctccttgccgtcctcgccccgcacgggtatgttctgcaggttggggtcgctcgacgagagtcgccccgtggccgttacggtctggttgaacgacgtgtgtatgtggcccgtgcgtgggttaatcagcttcggcagggcgtctacgtaagtgccgagcagctttttcaaccctctgtgttccagtatcttgcctactatttcgctctttcctttaagttgctggagcacttcttccgacgtgacatactgccccgtcttggtcttcttcggtttctctacgattttcatcttgccgaagagaatctcgcctacctgcttcggcgaggcgatgttaaactcctcgcccgccagctggtatatttccttctcgatggcgttcatgcgttcggtgagcatagccgacgtttccttcagcgcaccggtgtcgatgcgcacgccgcccacctccatgtcggccagcacacgcaccaagggcatttccacttctgtaaagagttgccacacgccggcctccttcagtttcggttcaagtatgtttttcagcttcagggtgacgtcggcgtcctcggcggcatactcatatacctctttcgggtcaaggtcgcgcatcgacttctgacccttgcccttggggccgataagctcgtcgatgtgtatggttttatatttgaggtacacctcggccatgtagtccatgttgtggcgcagctcgggctggagcaggtagtgggctatcatcgtgtcgaacatctcgccgccgagagtgacgccgtagttcatcagcacctccatgtcgtacttgatattctgcccgattttgaggattgaggggctttcgtagactggtttgaaaatattaacaatgttttgcgcttgttgacggtcggcaggaacgggcacgtagaaggcctcgttttcctcgacagagaagctcataccaacgagttcggcgtcgattgcgttggttgaagtcgtctccgtgtccagacttaaaaaactttttgtcatgaaaaagtcacaaagtcggcgcatatcttcctctgtgtcaacgagtttatacgtatgaggcgtgtcagttaacgctctcagattcgatttttcggcgtcaacctgcccgtcggtcgggttttccgcaaataaatcgagttgttgatttgcgttatttttgatgttttcacgattgttaagaaacttgtctgagagcgtcttaaactccagttcggtgaagattcgacgcagttcgtcacggtcggggtcggtcatgcgcagcgcctcgaggtcgaggctgacgggcacgtcggtgcggatggtggcgaggaacttggagaacttgatttgctcggcgttctcctcaactttcttcttcagcgcgcccttcagttcggaggtgcgctccagcagcgagtctatcgacccgaactgctgtagaagttttacggcggtcttctctccgacgcccggacagcccggtatgttgtccgccgcgtcgcccataaggccgagcaggtcgattacctgcgccgtcgactcgatgccgtacttctggcataccccgtcggcgtcgagcgtctcgtaaccgccgccgtggcgcgggcggtacatcaccacgttgccgcctaccagctggccgtagtccttgtcgggcgtcagcatgtacgtcttgattccctcggcgcctgcttttgtggccagggtgccgattacgtcgtcggcctcgaagccctccgcctcgagcacgggtatgcgcatggccttcagcacctcttttattatgggcaccgaggcgcgtatgtcctctggcgtctcctcccgctgggccttgtattggtcgtaagcctcgctgcggaaggtggggccgtgggggtcgaaagccacgccgaggtatgtcggcttctccttcgagagcacctcgtgcagggtgttgcagaagcccagcacggccgacgtgttcatgcccttggagtttattctcgggttctttatgaatgcgtaatacgccctgtatatcagggcgtaagcgtccaaaaggaaaagtttatccatgtttttgcttgtttttacgtgtaaagttactaattttttgtcattaatcggataaattcactacttttgtatcaaatttcgtagcatgactgactatttatcg

SEQ ID NO: 1058 - DNA, 24644 bp, synthetic construct
  misc_feature 1..24644: note = Synthetic
  source 1..24644: mol_type = other DNA
ttgtcaatgcaaacctttgcaaaaaatcgccagtcctggatttagcaaaatcagtgcggatatcttgtcgatatcattacttttagcccagctaataatcaacgtataaagaagtatgaaacatctaatctacctcgcagtgctctgctttggcatggctgcctgtggggaaaatcaacaaacgcggtacagcctgcaatctccggatagtgaaattgtggtggactttgagttgatcgacggacgcccggcctatcgtgtcgcctttcagggcaaagaacaaatcagcacctcatttatgggttttgagtttcaggatcagccagagctgggcctgaatctggaagtatcaggtgtagaccaaaacaccgtaaacgaaacctgggaaatgccctggggtgaacagcgcgaagtggccaaccagtacaacgaattgcgtgttcgactcaatgaaacctccggtgctggacgcaactttcacattgttttccgtgcttttaatgacggaataggttttcgctacgagttccctaagcaggaagctctgtcgggagacgttatcatcaccgaagaaaagacggagtttaacctcacgggtgaccacaaggtctggtggatccctggcgactgggacatctacgagtacctctacactacttcgaagttttcggagatcaatgcctacgagcagtttatcccgggtgatcatctggggcaggtttacttacacagcaatgccgtaaacacacccttgaccatgaaaaccgatgacggcatctaccttagctttcacgaggcagatcttaccgactatgccggtatgacgctcaaggtagacactaccaacctgagcatggtcagtgaactggtaggcaatgccgcaggcatcaaggtaaaaaccacagcgccattcgtaacgccatggaggaccgtacaaattgctgatcgggcaggtgacctgatcgagtctaagatgattgtaaacctcaacgatccaaatgaaattggcgatgtatcgtggtttaaacccatgaaataccttggtatctggtgggacatgcacctcaaccgccgcacctgggactatgccagcggcaatcatggcgccaccactgagtataccaaagagtttttggattttgctgccgagcatggctttggaggcgtgctggtagaaggatggaacaccggctgggaaacctggaccgagcctgacatgcgggataccatctttgattttaccaccccatacccggactatgacctggagtatttggccaactatgccaagagtaaaggcgtgcaaatcatcatgcaccacgaaacctctggcgctgtggcgcgttacgaagagcgcatggatacagcctatcagcttatgaacaagctgggcatccactcagtaaaaaccggatatgtgggtaccatcatccctgaaggtgagtatcaccacggccagtggatggtcaatcactaccagaagacactagagtatggtgccaaatacaaagtagcgatcaacatgcatgagccgatcaaagctacgggcaagcgccgcacctacccgaatgccatctctcgtgaaggcgtgcgtggccaggagtacaatgcctgggctggagaaggggcaagccctccagaacacctaccaattgtggcctttacgcgtatgctcgcaggacctatcgactacacgccgggcatcctcaatccaagcctgcttccgtacaaagaaaaccaccctatcaaaaccacagtggcacaacaacttggcctctatgtgaccatctatagtcctatacaaatggctgccgatttgctggagttttaccgtggcaatcctgcgtttgagtttatcaaagaagttgcagtagactgggagcaaagcaaggtgctcgacggtgagccgggcgactttctggtgatggctcgtcaggagcgcggaagtgaaaactggtttgtaggtggcatgaccgacgaaaacccactagactatacactccagctggacttcctgaccgaaggcaccacatacatcgcaaaaatctaccgtgatgcagcggatacgcactatttggacaatcccactgccatagacatactggagatggaagtgaccaaaggagacgaaatactggtaaacatggcagccgcaggaggatttgcagtgagccttttaccaaaagaataaacacttctactactacttaatcagtgttttgagccccggatctatgaagacccggggcttttttgtttgagtatttgagctgccacaagctctgggtacagactacctttcaggtatctatcacaatattattattttataacgtgttgatgtgtgtgttaataacttcatttttattctaaaaatcttttgttttctataactgtattaggtaattgttattatccatatttagatcagataattgctattttatctattagctgtttccgctatgcgttgtaagtaaatatcgagctcgaaaattagcgttcaaattttgcggacgaaaattcatgcccatgtgatttcgagttcgagatggccggcgtaattattggccgtctcgcaaatacacattgccgctgatcgtatgcagatccatgcgccgctgaccatcgccaatctggccgcgcacatccatgcccaccacctggcgcagcccgtcggttccatttgggtaggtgacgtccaggtcggtgtagatttccccggagatagtcttggcgtcaaagagtaagccgactcccgctgggacggtgatgtctatatctccggagatggttttgagccgggtgggagtagtgcgtggcgcaagcatataactaccgcttatggtcttcgcttccagttgcatgtctgcgggcatatacacggtgtagtgcagatctgtttcccaggtgcagtcccgctgattcgctcggttttccagttttttccagttttcggttttcagccgaaaggtgatgcgatcttcttctattcgtttttccagctcgaagatgtcattgtcctctccaccgtttatagatacggtcacgtccacttttaccttccgttgatcccacgttttgatcacaatctcaccggcaaagtccaagtccagatacagctcattttgcgtggtaatattggcctcctcggtcacttgtgtctgggcataggtcacccaggctgccagcagcagcagtgttgtcagtatgtttttcatggcttagggtttatgagcaccacgcgagcgcgcggtgcctaatgactattttttacggatgtatacgttaccactgatgcatttgagtgacacctctacgcctcctccattgagagtagcattggccgacatatctcctcctacacgctgcaggtctttgtcattttcgaaatcaaaatccaggtctgtatagatctctccggaaatggatcccatcttgaaattacccctggtggtggccggaagggtgacatctatatcgccactggtagaactcagcgacgtgggcgaactctggctaaggttggtaaagaccacttctatgtccgagctgatactattggctaccagcggaccggtcacgtcttcaaatcggaggtccccattcatgcttttgacttccacctcattggccatgttgcgaatgacaatgtctcctccctgccagcttttgagatctgcacggactttcaggttcttgggcaccttgaaaatataggtgccgtcattggcactgccactggctgcacttacggaaatctctcccccggaggtggtcacactaaggcctacgccggtattttctggtcctgtggccgaaagcggacggagccctttcgccttttcgggaatgccttcatagtcgtctgtctcgatcagcagctctcctgtagagcttccttcgatcaccaggtcggcgaagaggttttcgatcaccaaagtggtctcttcagtattgccggcaatcttttgcttgaaggtcttcagctgtgccgtagcagtatagctcacggctagcacggtcagtatagtcagtattcgtttcatgtttgttgtgttaatttttttacaaatcggttttatatctattcaattggccgtttgaatgcattaagtaaggatatcgagcgccagctgcgcttgttgcttgagctctttcggagcattgggatttcccaatagctctttgatgggcttgatggcggctttttcctgtgcctctaccagcatggagatcagcgaaagctgtatgagcggatctgtctgaaactccaaagaagcagccagctgcaagcgcacggattcctgatggatgtagcgctccagcgcttgtgctgcggcatagcgtacattaggactatcgtctgtgttcagcgtacggatcagggtgcttatgagcttttcactgacagtaggctcattggcttgtatctgattgactacctgtatacgctcactggctgtctgcggctccagggcattgaccagggccatttccttaagcagactcacctgcgactgcagtgcaatcacctctttgcgatgggtgggcgccagataagtacctaccacgtatcctgtgagcaaaagcaaaatagcagctgctatttgcaaataaggcttttggcgaggtatcgatgcccgctcctctgcaatggccgcctctacttcccagcgtatggattgtggtggttcctcgtccttgctttcggtgatcacctgcagcacggcacagtactcttcgtagcggtttcggcatgcctcacactgggcaaggtgaagagccagttcatcgtcagggtgtgcctcggctgcttcgtatagctgttcgtcggttgcgtgtatcatcgttttagtcttcttgttcgaaatagtaagccctaagctgctggatggtcctgtgcacctgcactttgatggccgatacggaggctgagcgcaggttggctatgtcttcgtatttcatgttttgaaacttggccaataccagcaactcacgcttgtctggcggtagctggttcatggccagctgcaggcgccgttcgcgttcgctctggagtgcatattcatcagactcttccacatcgggtatagtctgcaagtccgtgaactggtccttatagactttcagctttcggaagtgatcctttacctgattgcgagcaatctggaagatccaaaactcaaaagcactgccgctgcggtaagacttgcggtacttcagcacacggataaataccgcctgcgtgaggtccgcactctcctctacatctccggtggacttgaggaagtagttgtagatacgcttctgatagcgctcaaatagcacattgagctggtccagcttatcccgctgcacggcttccatcagttgctcatcggttaccttgttcaacagtcgtttaggtttggttttgggtcaattcggataagttaccccgaatggcagtgaaggttacaagtggtgaggagaatttttttgagagacattagatcatagactttagacaatagatgcgagactttagacgaaggtttcatcttgcagtgattggggtcaccctgagtcttggggggcgcctagtcgcggacggcaagtcgcggacggcaagtcgcggacggcaagtttcgaagcataaaacaaaaccatacaccacctaccagctggatggaactatactttgagaaagaaaccttggaggtttgggaaacctccaaggtttttaggtaaagttgaaagacattagtcggggaacaataagtaatggcaacaggcagcttgcagtaggcaggtttcaataggcagttggcaaagactggagactttagacaatagatgcgagacgttagactaaaaaaaaatgattctggactagttgacaatatgacaaagactgtaaggcaggagctagtctgggttttgtcatgctgagattggggttatgatgagtttggggggcgcctagtcgcggacggctagtcgcggacggctagtcgcggacggcaagtcgcggacggcaagtcgcggacggcaagtcgcggacggcaagtcgcgaagcataagacaaaaccatacaccagctaccagctggatggaagtatacttcgagaaagaaaccctggaggtttgggaaacctccaaggttttaagtctgacaattgctgaaacaatattcatcgaatcccggatctacttctccaaggtccaagcaacgctctttaacctggggctaaaagggtgtagttttgcagctgagcattgtacctatgaccaacaacgacattttcagacgcctccgatacatttttgattttagcgatgatcaggtaatcgagctatttcggctcggaggccaggaggtgacacgcgccgagatcagcaactggctgaaaaatgatgaagacgaagcacaaaccaccctctacgacgaagagatggcagtgtttctttccgggctgatcgtaaaaaaacgaggcgccagagatggtgaaactcccaaacctgagaaaaacctgaacaacaacatcatcttcaggaaactgaaaatagccctcaatctcaaagaccgggacattctggacgtactggaccgggccaatctcgaggtaagcaaacatgaactaagcgcaatcttccgaaagccaggccaaaaacaataccgcaaatgcaaagaccagtttctgcgcaacttcttgctaggcctccagtaccagtaccgacctgattgcaataagcaataggcagggaacaataggcaataggcaggtttcagtatgcaaagacttgagacacgagacttaagacgtaagacggcaggttttgaatgctgagtcagtaggcaggtaacaaaaggtggtaggcaagcctttagacgataggcaggtttatcaggccgggcatgcctctccacccaaccattttcaagcgcttaagctaattaaacagtaaaaatatcgtagggatattttttaatccatttgtccctggttagcattttcagtgattgcctgagcaatcaacatccggtcaaaagggtcattgtgtattgttgggaggtcgaggattttttgggtatgaaaccagttaatttcaagcatttcaaagccatcttcacgaagtatttcaacatattcaggagcaattttaagttttccaatggccgttttaatattgatttcccaaagtgaagctgcacttataagtattctatgttgcctgttttctatgagttgcttttcactttcgcttagctccggagcagcagccaaccaccacaaaattatatgggtatcgagcagaaaattcatgctttcaagccaaacatctcttgtaagtcactaccaaattcatcaaaatccggagctatatgaactttaccttttagctgaccaaccttccgtttttgtaatggctcctcatattttttcaatattgccacaggggtgcttcctttcgatataatgatttcttccccttccgctactttttcaagtaattgtgaaaaatgagttttagcagtatgtacattgtattcttccataatgatatcaaacgtacgccagatagctaagttagtcaattacagccttattcgaacgggggacaagatgcaataggcgaagactggagacacgagacttaagacgtaagccctgaggatttgtcatgctggggggacggatagtctcgaagcgtaagacaattgcaggaaagtcattaccctattcgaaaaccttggaggtttatgcgttaagggattcatcaaattgcagatagtagacttcataaagaagacaccaatgccactagccttcaccacttcttaaaagcctccatcacccaacaaaaaaccccaaagtacaccttcagggttttaaatcactttcaactccacttgccggagcgctcttcatcttttcggcgtagctcgtccagggagaacttgccagcacccattacgctaaagagcaacagcgccagcagcgtaagtacagatacccacagctcactgttgccatgggccagtaggccattcggcgcattgacaaacaccaccgcaccaatcagcacgggtagctgcatcagacaggccgtacgcgtaaaatagccgagcaggatgaggggtccgcccagaaggtgggcaaagaggacataatgtgcagcacctaccgaaaggtaagccaccgattgagaaagtgcctgcagctggtccagattaatggcaaaatacacgcccttgaagacgataagtccgcccagggctacgcggagcaccaccagccagctggcccggtgggtgtcgccccaatgttcgatttgtgatagcatgttcatcattcactggttttggtcttcctataagttacgaaaaatggacgccaaatgccagtaggggagacatgagacgtaagactcgagattctagacattagactcgagatgtaagacttgaggtttgactggctgggcggcggccagttgcggacggctagtcgcggacggccagtcgcgaagtgtaggcaattgcaggaatgtcattaccctaatcgaaaccctgttggtttaccaaacctccagggtttctagataaaatcagatgactttagacaagaatcattaatcacgagaagcaacttttacagcttgatgataaaagacggtggtactcttgaaatatcccctatttaggggattgacacaggcaacgttagggactagtttagtcgcttatttctaactaaccattatttactatgagcaaaactcattttgaacaattgctaccacagctggaagctatggaagccgaccgtgtaaaacaacctaacatgccagtggacaccttcttgcaagaggccgcagacctggaagtatggatgcaagaagacctgccaaaactcaccgccgtgggactaccacagcgtacgatcgacgcactacctgtacgactgggggcactgcgccatgcacagagcgagtggacccgaaagcgcaacaccaaagaggaagccgcccgacagtgggaggcccaaagcagtgaagccatggatctcaaaaacgagctggagcatgccttccgctttgcttttcgaaagcatcccgacctactcggaaaggtgcaggaggtagaggcaggcttaggccatgcagacctggtgcaagacctgagtgacctgtccttactgggcaaagcccatcaggacctactggcttccatcaatttccagacagaaaagctagacgactcagcggccatcagtgaaaacctaagtaaggtgctagctgccatgaatggggagcgactggaaaacggtgaagacaaaacccttcgcgacaaggcttttaccctgctcaaagagaccgtagacgaaatccgcgatgcaggcaagtacgccctctggaaatctcccgagcgcctaaagggctataaaagcgcccactgggcaaaattctaagctccatggcgacctatgagcctccatggcccactatggtgcctccatggcgacctttttggctccatggctcattatagcatcgccatgcctgactataccccctccatggcagccatggaggggatataatgaaccaaggcggaataatatttggcatggaggcaaaataacagccatgacagaatattatttggcatggcgcctcaccccacagccatgaaaggctgacaggtcggtatggccggcattagattgcctcctttataggtactaccacccatagcgcacacccgctagcatcttacgccaattagaatagcttcaaatgaagcgactccatctcacaaaaccggaagagttgtttattacacgtcaattgtgtaaactaacaggatagaaattttttaggctattttttgaaagtgaggcataaaaaaaggcgagtttccccaccttggatgttttcacaacggaataatccttattgtgattagctttcaatgatttaaagatactgtttaattcccaacaccatcataatgaaaacgaaaaaaattctcggactggatatcggtaccaactccattggctgggcactgatcgaccacaactttgaccaaaaagaaggtaaaatattagggctgggcagccggatcattcccatgaccaaagagcaaatgggtgattttgatagtggaaataccatctcgcaaacggctcagcgtacccagtttagaagcgtgcgacggctcagagagcgccacctactcagacgggagcggcttcaccgtgtcctgcacgtccttgactggcttcccctgcactatgccagacacattgattttgatcagcggccgggccagtttattgcccacgcagaaccaaagctcccctacaatgcagatggtcaattcatcttcagcgactcttttgatgaaatgcttgaggatttcaaaaaacaccaacctcaaatcttaaatcgcaaaaacagaaatggccagccagctaaagttcctcaggattggacgctttactacctccgtaaaaaagccctaaggcaggccatcaccaaagaagagctagcgtggatcgttttaaacttcaatcaaaaacgcggctattatcagctaaggggtgaagaggaagaagaaactccaaacaaaaccgtggaatttcactcgttgagaatatcagaagtgcaaatggattcagaaccaaatagaaaaggggaggtctggcattcgataatcttggaaaatggttgggtatacaggcgatcaagcaaaacacctctaacccaatgggagggaaccaccagagactttatagtcacaactgacctaaaccccgatggtacggtaaaaaccgacaaagaagggaatgaaaaaagaagctttagatctcctcaagaggacgactggacgctcatcaagaaaaaaactgagcagcacattggccaatcaggtaaaacagtaggtgaatacatctatgatgcactactccagcaacccaaccaaaaaattaggggcaaactggtacgtaccatcgaacgaaagttttacaaacaagagctacagcaaattctcaaaaagcaaatggaggtgcagcctgaattttttgcgccggagaagtatcaggagtgccttctggagctatacccctacaatgaagcccatcggtcagaacttgcgaaaaaagacctgaagcatctcatcatacaagatattatcttttatcaacgtccactaaggagccaaaagtcctccatcagcgactgtaaactggagtctcgccgataccaggtcaaagatgaaaatggccaactggtttggagaagtaaacccctaaaagccatcccaaaatcccaccccttatatcaggagtttagagtgtggcagtggcttcaaaatctgaaaatatataccaaggaaggtgataaagacattacccaagaattaattccatctcaggaagaccgggtgaagctctttgaccacttgatgacactaagtgaaatcaaccatgtaaagctttttgaatacttctatggctcatcacgaggaaaggactgcaaagaagcattggcgaagtatcgctggaactacgtctttgatgacgctcaggcaaaggaggctgacaaatcaaaatcatacccactcaacgaaactcgatctgctattgtcaaacgcctggaagtagtagaaggaattcccgaaaggtttttgatagctgaaacggaataccaactttggcacatcatctattcggtaactgaccgtatggagtatgccaaggctctggagtcctttgcttccaaatacaacgaaaagcacggtactgatattgatacagcctcatttcgtgaagcatttattaagttccctccgttcccaagcgattatgggacattctcagaaaaggctataaaaaaactgctccccctcatgcgagcaggtgcacattggagtgcagatgccatggataccaaaaccaaacagcgaatagagaatataatcaatggagaagcagacgataccatacgcacactcattcgggaaaagactgaagccaacagcctaaccgaactggatcacttccagggactcccgctttggctcgctcagtatgtggtgtacaatcgccatgctgagtctgctttggttacccactggaagtccatagacgatctcgaatcttatcttaaagaattcaaacagcacactttgcgtaacccgatagtagagcaggtaatgaccgaaacgcttcgtgtggtacgagatatttggatgcactacggagcaggggcggctaactattttgatgaaatacacgtggagctcggtcgcgaaatgaaaaatccagcacaggaaagacagagacttacaaatactgtaaaagctaatgaagcaaccaaccaacgcataaggctgctgatagctgagctcaaaaacaatacagacggcaaactccccgtggaaaacgtacgcccgcactctccaaaacaacaagaagcacttaaaatctatgaggaaggtgtattggcttctcaaaacgatataccggatgatatcgccaaaatcagtaagactgcactacccaaactatctgaactccagcgctacaagctttggctagagcaaaaatatcagtctccgtataccgggcgggtcatcccgttaagtcttctctttacagaagcttatgaaatagagcatatcatacctcaaagccggtattttgacgatagtcttggcaataaagtcctctgtgaagcagaggtgaatgcactcaaggacaatcagctaggtagggaatttatcaaaaaccatagcggtagcaaggtagacaaagaaataacggtatttacaaatgaccaatatgtagactttgtcaacaatcactacagccaaaacaaaggaaagctcaataagctcttgatggaagagattcctgacaagatgatagagcgccaaatgaacgacacccgttacatcagcaagtttgtgagtacggtgctttccaacatagtgcgagatgagcataaggatgagggagtcaactctaaaaacctgatcccgtgtacgggaaagatcacctcccggctcaaacaggactggggactcaacatcgtatggaatgaactgattcttccccggtttgagcgtatgaatgctatttcaggcaccaatgcatttacttcggaaaacacctggggcaaaaccataccaacagtacccgtagaatacgctaaagggtttagcaaaaaacgcatcgaccaccggcaccatgcgctggatgcgctggtagtagcctgtacttcccgagatcatgtaaacctgctaaataataagcacgcaaaatctaaagaacggcatgacctcaatagaaaactgagagtatatgaactgattaattatatgaagactgatgcaaaagggccggtatcacgtgaagtacctaaaaacttcatcaagccgtgggataccctcacccaggatgcgaaatcagcactggaaacactggtagtgagctttaagcaaaatctccgagtaatcaacaaaaccacaaactactaccagacctataaagatgagaatggcgaactccggctaaccccagaaggaaagcctaaaaaaggaaaagtgaaacaaactaaaggcgatagctgggccattagaaaatccatgcatactccgcttccttatgcaaaacgacaatatgtctttcaagtattagaacttacagaactaggtaaaaaagaatttttagatgatcaggaaatacgagtaaaattggaagagataatagaacggttcgatggcaggataggggaagccaagaagttcttgaaaaagaatccaatacttaacaaaaatggccttgaaataacacatggaatattcaagcttcctgaaatacgctatcgaaagcgccaacctatttcgatcctttccaatagaggccaaggaggagtgaaaacaaggaaggcggtacttaaattaatctataaaattggtgacttacaattaatgcaagatttgttatctcacctagaaaataatgatgacgacataaatcaagctttcagcgttgagggattagaaaggtttaatgcagacagagcaatcaaagtaaattctctacctattactgaagcctctgaaagtaagtttccactaggatctcgtccaaatactaaagtcaaattcgctcaagcggattcaggtaccaatctgttttttgcggtatatcaaggtaaaaatgggaaaagaagctatgcgacagtaccgctcaacgaggtaatagagcgactgaaacaaggaatgaaacccgtacctgagcaaagtgaaaaaggggagcccctgctctttcatcttactcctaacgacctggtctatgttccgctcccagaagaggacagcctgccagactttagcaacctctccagggaacaagccaacagaatctataagatggtaagctctactgggagagaatgtcactttgtaaatgcgagaatagcttctccaattaaatcatatgatgctcaatcctcgtttggtgaaatgggaagcttaaataaactagaaacaacactagactcggactccctacgtattaaggatgaatgcatcaagctttccgtcaatagactcggccagatagcgccaaagcttgactaatcttttagagaattagccgcagtttagatttttcaactggcggctaattttcatttttctcgatcatatcaacattaaaccccaccccaatgattaaacgaactctatatttcgctaatccggcgcatctatctgtgcataagcgccagctcaaggtcagctacccagatgatcaaccaagccgacaagtgccaatagaggatattggtctcctgctgctagaagaccatcgcatcaccctgagccatcacctattgagctcactgctggaggtcaatgcagccatcattacatgcgacagttttcatttaccacaaggattgctactgcgcacatcaggaagtcatacctatcaggagcagcttcggcatcagcttggcgctacagaagctttcaataatcggctttggcaacagaccataagcgccaaaatagaaaaccaggccgcactgctccgccaaaacggactggaagtagctaacatggagcggtgggcatctatagtgaaaccgggcgatcccgaaaacctggaaggccgtgctgctgctcactattggaagctactgtttgaagatcacttgcaggcgtttaagcgaggaagatttgaaggtgctccaaacaacctgctcaactacggctatgccatcttgagagccactgtagccagagcactggccggaagtggactgctattggccataggctttcaccatagcaacaagtacaatgcctactgccttgctgatgatgtgatggagccatatcgaccgtacgtagacgaaatggtactggagctagtcaggtcgctggaagattacgatacgctcacccctcctatcaaaaaagagcttttgaaaatccccaccttggatgtaagtataaacagccagaaaagtccactcatgctggctgtgcagcaaaccagcagcagcctggccaaggtttacagtggcgagctaaagcagctcaagttgccaaaactgtgagttcgcaagagcgctttaaccaataccgaatcatgtgggtattagtgttttttgacttgccaacagaaacgaaaaaagaccgaagcaactaccggcgatttgtggacatgctggaaaaagacggctttactcgtttccagtttagtatttttttgcgccactgccccagtatggaaaatgcactggtacacatcaagcgtgtaaaaatgcatcttcccccaaaaggtcatgtagccatcattcgaattacggacaaacagttcggaatgatggagatttttaaagccacgaagcaggccgacacgccagagccaccacagcaattagagctcttttaatcaaaaatcccggacaaatgtgcttcatttatccgggatttatagccctatcttactgataatatggcccttacatcagggtatcctgttgcaatctaatgattgaaagctaatcacaactgaataggtgtttaacatccgtagaatagccctgttgcaatctaatgattgaaagctaatcacaactataatgagtgaggactttcagataaacctgttgtaatctaatgattgaaagctaatcacaactcaggcgactttgctcagctgcagtcacggcctgttgtaatctaatgattgaaagctaatcacaacacaactgtcggtgctcgagcatctgagctgcctgttgtaatctaatgattgaaagctaatcacaacacatcgcgcatcaatggctccatggataggcctgttgtaatctaatgattgaaagctaatcacaacaggcattgccgatgttgtttagcgcaaatccctgttgtaatctaatgattgaaagctaatcacaacgccgacctggagagcaggtttggtaccatccctgttgtaatctaatgattgaaagctaatcacaaccaaagatgcggtagacatactggagtgggacctgttgtaatctaatgattaaaagctaatcacaactatgcagatggcgttgttgaatcttacgagcctgttgtaatctaatgattgaaagctaatcacaacatctggggacgtgccaccggtaagaccgaacctgttgtaatctaatgattgaaagctaatcttcaaatggtaagctgatgtcacttcgcttagccacttcatggaattttctaaagtcctccaaatcaccaaaccagctcaaagcctcctcccgacttatccgggtaggctgctgtgtgaaataactatgccaactgctatgaagccaatcatctggtgattttacaaatttgtgatgcacggggttgtaatgaatataagccatgagttttgtgaaataggctgcattatctatgtgcttacgataaaaccgagagcgaaatagcgctccctttctatcatacatcttgttgtaagcctgcgtgtagccgttgaaaagatgcgcaaactgctgactgattttattagaaagctccaaccctttcagggtttgaaaccctgaaagggttaggagctcatctacagaccgtactcgaatcataagatgcacatgattaggcatcaaacaataggcatacgtctgagccaccggatgaattctttctgcatatttttctagaaaatagcgaccattctctgccgttcggaaaaggtcatccgctcctgtagcatgcgtatacacatgatatacctcatcgggctccagcggtgtgcggtagtctggcatagaaatttcattttaaaagagctacaactcttcccatccacggattggatggcatattacaaaatgcctcagttagaatcaacacttcaactacccgttttttaacaaatttttgagacaagagattttagacattagacattagactcgagatgtaagacttgaggtttgactggctgggcggcggccagtcgcggacggccagtcgcggacggccagtcgcgaagcgtaagacaattgcagcacattatcctaatcgaaaccttggaggtttcaaaaacctctaaggttttacatgcaagaaagaaagaccccccagtgtcttttaacaatccattcctcaccccaaaaactctaagaaattttcaatgcttttttgcgagggcacagccgccttcctaatttcgaacttatcttacacatctatccatcttccaccttatggcgagcacgcaaacaccggcactccgactaaaaatacgtcagttttcacgcgaatccttcctcatatttatcggggtaatgtgtgccacgtttgggctggagagcttcctattgcccaacgacgtgctggatggtggcgtcacgggtatctctctgctgctcgcactcgtgaccgacgggcgcccatccatttttatctttctgatcaacatcccgtttctggtgatgggctggtggcagatcagccgcagcttcgccatcaaaagttttctgagcatctccctgctcgccatcgtcatttacaacttccactttcccgtcattacggatgatccgctgctcgtcgcagtatttggtgggtttttcctgggcctgggcatcggcttttccatacgtggtggcgccatcatagacggcacagaggtcctggccatttatctgggaaagaaaacgggcttttccgtaggggagctgatcctcattttcaatgtgatcatcttctccgtggcggcctacctcttgtctatcgagacggccatgtactccatcatcacctattttgcggcttcacgtacggtagattttgtgttggagggctttgacgaatacatcggagtgacgatcatatctgacaagcacgccgaaatccgcgagatgatcctcagcaacctgcgccggggagctaccatctaccatgggagcaagggttttagcctacagcagcaggaaaaagccaataccaacatcctctatacggtcatcacccgactggaagtagcgcggctggaggccgaaatcgacaagatagacgctggtgcctttctggtgatgtctaaggtaaaagacatccgtggaggaatgatcaagaagctgccgctcaaaaagctcaagcagaaaaagtaatccctaatcctgcacatacgagtcccctcaggcactcccataccccatacttttggccttatcaaaaatgtattagccatgaagtacaccctattcgtatggatcatcgccagcataggtagcatctgcagctatgggcagctctcgcggctctccatatccggaaatcagtttgtagacgaaagcggccaaacggtggtacttcgcggggtgagcaccagtgacccagacaagctggaaaaggaaggacactgggatgccgggtattttgatgaaatcaagcggtggggcgccaatgtagtgcggtttccggtgcaccccagagcttggcaagcacgcggggcagaggcctacctccagctgctcgacgaaggggttcggctctgtaccgagcgaagcttgtacgtcatcatcgactggcacagcatcggcaacctccagtcggagctctttttcaaacccggatatgaaaccacccgaaaggagacgtttactttttggcaaaccatcgcccagcgctatggagacaacccaacggtggcgttttatgagctcttcaatgagcccaccaccaacggcggaaaactaggcattgctaattgggaaggttggaaggccctcaacgaagagatgatcaccatcatacgttcgcatggagcaacaggcatacccctcgtagcaggattcaactgggcctatgacctcactgcagcttatgaaaaccctatcgatcggcaaggcatcggctatgtgagccatccctatccacaaaagcgacctcagccatgggaaaatgcctggaccgaagattggggtctgatcaaagaaaaatatcccgtgatccttacggaaataggcttttcgctagctaatgaaaagggagcgcatatcccggtgatcagcgacgaaacctatggagaagccattaccacctactgcgacgagcgcgagatctcctatgtcgcctgggtgtttgacccgctgtggtcacccatgctttttagtgactgggactacacgcctactacgcagggggctttttttaagcggcattttgaaagctactcaccatccaaaccgtaactcctaccggttgatagggtacggatagtcggtgccaatcgctaccccatgacttttgatgtcacgctcgcttagttcatctaaatgaatatttcctcccggaattgcggcaagctcaggcacccaggtacgcacatattcgcctttagcatcgtatttcctggcctggctggggatattgaaatagcggttttcgcgtgggtcgtttcccacccccgctacatacatccagttggcccagttgctgcacacatcatagtcgagcagctgtgattcaaaccatcgcgcaccccagcgccagtcgatgttgaggtcttttaccaggtagctcgccacgttttgcctgccgcggttgctcataaagccggtcagcagcagctcccgcatgttggcatctacaaaaggtacgcccgtcataccggtacgccacttttcgaacagctccagattttgcgtcagctccaagggtttgcctttgatccctttgcggaaaaacaccgagcggccatagcgcttgcagacaaaccggaagtaatcgcgccagatcagctcaaacactagccagtaggtggatacgtttttggtccgttccgtttcgtagcgcttcacctcctcatagatggctcgtggtgagacacatccatgtgccagccagggcgaaaacttggaagagtaatccgcacccagcaagccattgcgggtccatttgtagtttttgagttcgtcggtatcccaaaagtagtggtggaggcgcttccaggctgctgtttccccaccggcaaaggacatcacggcacgtgggtcgctcagcacaggtgccaagccaaagctctccaggtcgggcaggttggtatctggtagctcaggagtagggatttttttgggagccggaagtgctggtcttatgggagtacttttctcattttcttttcgaaactgggtgaatacctcaggtagcttctgaatgggccagggaatatcttcttcatgaaaaagtgtagcctgccaaaccagctccaaagactttccagcctcctccagcgcctgagctacggccgtttcctgctgagtttcctcccaggtcacttccttgctggcaaacactttgtcggcaccaaacgattcggctacagccaacaaacgcgtagcaggtacgccctgataaatcattaaccccgaacccacagacttgaggttatttttaaggtcggctaccgcttccagcagaaactgcgtctggaaggcccccgttttcacaaagcccggctccatgtgccgccagcgttccggatcgaaaatatatacaggaatgacctcctcggcctgctccattgcttgctttagggtcacctggtcatgcaagcggaggtcattgcgaaaccagactatggcgcgttttactttcatgcgggcctaaccggctgtagtagcgaaatgttgcgtatcgttagtagatgagctcatagcgggtactgcgccccgcaccgactactcgcaggatgccctgctgatgaaggtactgcaaatcacgtgtagcagtggctttagggcatttggcgatcgccatatatttgcgggccgaaagaccaccttcaaatcccgaatgcccttcctgaaacaccctgcgaattactttcagctgccgctcatttaaagattcgccatacgtatcaaagaacgatgcctttttcaaggtaaatcgcaccatcgcatcggtcgtcaatatgccctctttcaggacacccagaaagtattgtagccaagaggtaacatccagagtactttgagcctccatgagtgccgcatcatactccttctttttagcctcaatggccggagaaagacccaccatcacaggatagccgaacccttcggacagagctttttgagacaaggctcgtcctatacgaccattaccatcttcataaggatgaatgctttcaaaataaatatgtaccaaagctgacttgataggagcatatttcattggactcactccatgacttggtttcccgttataccaatcgattaaccgggacatttctcctggaacttcacgagaaggtggggcctcgaaatgtacacgctcctggcccaaagctccagatattacctgcattggttcgctatgtgtgcgccatcggccaagagcaatgtctttatttccttgtaataaggcgttgtgccatgcgtggagcatctgctcactcaaaggtttgttccagtcggatctcgacaacatcaccagatctgctgcgcctcgcgctcgatgatcatccgaatgatgagaattttcaaaacccaaattgtgacgaaccgatgacaaaacatcctttctactgacatactccccttctatttccgaggtttttacggcttcttccaccagggcattgatgagcgtttcgtcacgaaactgatcagtaagcccttcgtacattccgtgtgttttgccgacaaggtgtaccatctcgatgacctcatgctcaatcactgagtcatcaaatcgaaaatgtggccagtcatgtagttgccagttgtagggcatagtgagccgattatctagagtaatcggctcaaatataatcaattttgagccgattaatgcgcctaatcgcatcataccggcagctgctagtctccccaggccgtgagtacgagtcgtctgccaccgccatagtcgcgatgctcgcagagatagatcccctgccaggtgcctagcgccagccgtccattggtgatagggatcatcactgacgggccaagcaatgaagccttgatgtgtgcaggcatatcgtcgggcccttcgtaggtgtgcttgtagtagggagcgttttcgggcaccatttcattgaaatgcgactcaaaatccatgcgcacagtagggtcagcgttttcattgatagtaaggcttgccgatgtgtgctgtataaaaacctgcaacatgccctgatctattttggcaatatccggaatggcattttccacttctcgggtgatgaggtgaaagcctcgggaaaaaggttgcagttgtaaatgggattgaaaggttttcattgctgatctattctttcgtaagcgcctatgtctggtttttcatcacgcggcatgcccagcaaatcatccgtgatgcctatagctttggccttgtcgcgagcaaaagaaagcgagtccagactaaagtcaaaaagcaagggatcggcaaaaccgggaaagtcgcgttcgtcagaaacgtagttgcccggccactcctgctcagagcggatgaggtttgacaccaatgtggtatccaactgccctccgccggcattgctgatcagcagctgttcttcgccctgcccccaaagaatggagttggtaatgctcacgctgaggtcctgcaccaggttttcttcgtcgctgagcacgatattgtcagcaaactgcatcatggggtcggtggtattgaagtggctggctacattggaaaacgtgcagtgctcatagcgatacgtccctccagcaaagttggccaccaaaaagctgccggcatcatacacttcggtgttccaggcgtatacttctgaagagatcccaaagatccctgccgtagacatgtgtcggatgatggtgtggtctatggtaatatcggctgtctcggggctgttttcaggtccaagaaataccccgttttcactttcgtaaaaatcataacctataccgataccgatctggccattttcgatcaccgcatgggagagcgtgttgccggtgctggaagccataaacacgatacctccccactggccgggtgcttcctgatagttttcatcaaatcgagtgtttcggaaaaccaccggattggcggtatcaccctttacttctagcgaacctgctacaataaacgaagcaccattgtccaggtacacccgggtgcctggttccatggagagcttacagccttcttccaccatcgccaggttatagatcacataaggccgatctgccgtccaggtttcgtcgcacactgcctgcccattgaggtagtgggcgtcctgcccccaggccacgagcttcacatgggcctggttgccgttccagctgacctccacagagtctttcaccagatagggcgtgtcttcatcctgcggatctatgtccacatctacaagcacctgcaggctgtcgccaccaaaaagcacttccttttggacagatttcgttttctttccattgatgatgatcgagtagtcagaaagtgctccccccgccaggcgtatctcttcgatctctaccgccatgttgttggggttgtaaatccgaaagcgcttcgtcaggctggtacgagaggagagcaaggtgtcgaacagcaccgtgtctgagctgaatgccagcttcatgcttccggacttaccgatttgctcctcctcaggctcacaggccagtgtcaccaggccaaaagccaaaatcaagatccaaagtttgttcatatacccagtaccaacgcagcggaagctcatttagtcttgcgtttcagctttgagcagctctgtgttttcagcaattcgcagcttctcgataaactcttcgatttcaccattcatgatgttgggtaggttgtacaccgtatggttgatgcggtggtccgtcacccgcccctgagggtagttgtatgtacgaatcttgtctgaccggtcacctgagcctaccatggtttttcgctgagagctaatggcttcattgtgctttttcagctcgatctcatacagtctcgatcggagtactttgagtgctttgtcgtagttggcatgttgagatcgaccgtcctggcattctaccacgagccctgaaggagcgtgggtcagtcgcacggcagattctgttttgtt

SEQ ID NO: 1059 - DNA, 24641 bp, synthetic construct
  misc_feature 1..24641: note = Synthetic
  source 1..24641: mol_type = other DNA
tgagtcatcgaagttgcggggaagcgaacaaaacgctcgccgtcggagctaacctcgacaaaggcgagttcgaggaaatagtcgtcgaaagaattctcgaagacgacgaagtcatagccatcgccgttgacgataggtttgttgaaagtaagcgttgcagagccgccatcgccgaggctaacgacatccatagtgctattggtggcagcgccaagagctgcattttcgtcgccataggtaacgacaggagcgtcggggttgctgagattctgcgagccacgttcaatagagcaaccagtagcccaagccttgatacggctatcgccacaagcaatagccgagctaccctgagtacctgcggcgccacagaatggacccatgccttcaggttgaccgatggggttgatagagttggtgtagacataagaatagtaccattgaccttcccattcggtgctgtcgacgacaacacctgcttccgggtcggcccatttggtgaaatcgccattatggagaaccgaggtgatgccttgagaattccaagtgctgccgttgatgaggttttcccaataatagccgacttttctgagagtatcgtcgcccttgaagaggaaaatgtcgtcgaggaaatcgccattcatagtgtagtcgaagcgaggatcggctgccttaatgtcgtccataacagtttgaaggatgacagagtcggcctcaaaacggtagccccaagcgagagctgtatccacccagttgacggcgaagacgacctcgttgttgccttgaccaatccaagtgatgatctcgcttgccgagatagaagcctcttgaggcagaggaacagagacagggtagatagtagcaggatagacattggaatagtaccaagaacctgcatattcgaagctgtcgacagcaacgccgacggcagggtcgccccatttggcgaaatcgccgttatgaagaaccgagctcatacccatacccgaatagccgttgacaagattttcccagtagttgccaggagtgatgcccaacgagacaacgccgtcattgaaattgatatcgctgaggaaagagccgccggagaagctgaaacgatggtcagcgtcggcgatgtcgttcataacagtttgcagagagacagagtcggaggcaaagcggtagccccaagcgagagccgtatcggcccagttgacagcaaggacgacctcattggagccctcgccaacccagtagaggatgctggaggcagcgatggtggcgtcgacaggagtttcctcaggagcgttgggatcggtagccataatcatgacatcggcggtagaggtctgcatccaatcgacgaaatcgccgttttggatataatcgttagacacaccacccgacgaatgatcggcgtcgttggcgtctttccagttataccaccaccagccatcttcgcccaaaaggttaaggccaagttcggcgtcgttgtaagcgatgttggtgatccaagtagacgattgagtcagaaccatgcggctgtcatagagagcaatagtgtccatgatatcgccgatggtgacagcgccattccattggacaccccaagcgatgccgatagcgccggcgacttcatcatcccaagtcacagctacgacagcacggttagagcccgaacctgtccaaaaacgaatactgtcctggggaactgtcggattagacgaaccccactgggcattagctccaaaagcgagcataaggcccaaagctaaaaacaataatttttttgtcatattagatactgtttaataattagttaataattccaaccagtatcggaagacagacgagggggaaaagccgagggggaaaaacaggcaaaaaagataaatcaaaaaaaggcgaaagccaagcctgtttctcgggcactttttcctcgaaagcgaaccgatattttcagatttggcaggtattctgacttgctttttgccgctcagccttcccatatatctatggcgatatacagtgactataatattgattggcaaattattaagctcacagcagcgggactgttcaggacttgcacctgattccctttcacacgcctatgaggcgaccaaatcggatgcaaaaatacaacattttttcaaaacaaaatccttatcgcgaaaaactttcaatcttttaaacatgccggacaactataaccacatgatcgcggcagaggtggtgaagagaatcttcgaaacgctgacgcgcagagatgtccatccaagccgtaggctcgtcgaagagcaagaccggggagccagaatagagctggcgagccaatgccaaacgctgccattgccccatgctcagctcctcgccgccagagaattgacgacccagctgagtgtcgagaccttgagagagcgaatccacaaccttgtcggcgcccgagaggaggagagcgtcggcaagacgattggcatcggaggccgaatggatgtcgccgaagtcaatatcctcacgggcagtaaagtagaaattgacataatcctgaaaaagggcgctgacgttgcgacggaggtcgtcaagattgtatcggcggatgtcaacaccgttgataagcacggcgccatcctgagggtcgtagagacgcaaagccagcttgaggagagtacttttgccgaagccgttctcgccctcaagataagccacctcgccgcggcgagccacaaaagagaagttgttaaggaacggggccttcatgccgggataggcgaaagagatatttttgaattccaagacctccaccctatcggggaaagagacagagtcgtcgggcgagacgatggcaggctccatttcgaggaactcagtaaggttgttgatgaaaaggcggttctcgtagaggccacccacggcggcgacaagactgttgaggtaacccatgccgcgacggaaagcctcgaagagcatgacgaaagagccaatagtcaaggcgccggcggcgacaggagcgatgagagccagcaagacaacggcgagggcgacagcctcgatcaaagccgagagtgagtcgagtagagcaaggcggtgggcgatacttttgagtttagcgaggagagaggcgcgaatgttgagatacctgtcgcgaatatactgcgacaagttgtaagttctaatctctttggcatagaggcgcgaggtgagcagagcgccgtagtagctggcacggcgttgtagctgagtggtttggcgacggaaatcgtagatgcttttcgatttgtagagtcgcgcgcagaaggaaggcaccacggcgacgagcatgaccagcaccaccttccacgaggcgaagaaaagcattgaggcgacagcggcgagagagagtagcgagccgaagagcgccaccaagttctccatgatgcggacgggacggaaagaggcctcctgctgggcgcggtggagagtgtcgtggaaggaagggtcgtcgtagtaggacatatctaggcgtgccgactggtcttggatgagcgtggtgacatagtcagacagacgttgagagagcacctcgttgttgtagttgttgagcgcgccgaggacacggccgagcaaggttacgccgcagaaaaagagaacggcgggaagcacctcgtggagtacagaggaaaaagaggtcgattgtgtgatgccagaggaaaccgtgtcgacgataaccttgagcacataaaggttagccaaagggaggaggctgacaaagaccgtgaggagaagctttgtgaggaagccgcgggggtcgcaggaccatattattttaatagcttttttcaaaagagtggtgttattagatcaagaaacgaagttttttatggtcagggttaaggttaaggttaaggttaaggttaaggttaaggttagcgttaaggttagcgttaaggttagcgttaaggttagcgttaaggttaaggttatggtcaaacacactctttcaccaccaaactgccgttgacataatccacgacctccacctgtgaatccttctcaatatatccaagttgagccacagcgtcgtagtgcttgccgctgatgatcactttgccggcagggcggaggatggtagcggcggtacccttggcgcctatgagagaaacctcattgtcggaagcaacggtaaaaccctcggaggtgctttctgttgtgttcaaggccaagccgccgaagagagagctttcgaagagctttttaccaaggaagatgctgagcggcaaggctatggcaatagccagaagagtgatcataagacggttggcgatgaccgcggaaggcacaaacgagaagtcgaagccgatgttgcccaccatactgaacaccaaacccgtcaccacacaaataatgcccatgacgcccgagacgccgaagcccgggaagacgaagagttccaagatgataagcacaatgccgatgaagaagatgatgatttcccaataggtggcgagaccgtcgaggtaaagaggggcgaaatagagcgccgctgccgagagggcaagaatgagagggaaaccaatgcccggttgctgcaactcgaaatagatgccgccgatgatgagcatgataaggatgcccgaaacgacaggtttgacaaggaaaccaatcagcttgtcgataaaagagtagcgttgttcctgaatggtatactccttgacaccggcatgattgagaagctgttgtacgttttcgacctcggcctcacaatagccatacttgatagcctcggtggtggtgaaggtgagcaccttgccgctgtcgctaacgccagcacctgcccggtttggtcgaccacggtagccgcgccgatagaggagccgctgtgcatatagatagagtcgcaagcgatggagatgagggcgccggcagaggccgcgttgttgtcgatgaaggcatacaccggcacgggagattggaggaaagccgtgcggattttgtcggcgtcgtcgagggtgccgccgaaggtgttgatatgcactatgatgatgtcggacttaagatttttagcctcctccatagccttttcgacgcggagggacgccgggggagcgatttcctcgtcgatattgaagcagtagaccttcttagaattgttctgagccatggaagccatcgacatcaacatggcagccagaaagaaagacaatagttttttcatagtttgaaatgcttgatagcagaaatcaattcgtcaaaaatcagattgttggcagcgaccatctcagcgccgtggagccagttagagccccccttgaagtcggccacgacgccacctgccttttggacgatgaaggcgcctgcggcaacatcgtaaggtttgaggccatattcgtagaaaccatcgcagcggccgcaagccacgtagatcaaatcggcggccgccgagccgagacgacggacaccgtgggtacccttcattgtccattcgagaaggtccatgtaggcgtcgatacgagagaagtcggtataggggaagcccgtggctatgagcgagtcgttgagcgagggcgactgagataccgagatggcgttgccgttcaagagagccccgtcctcggcgtcgcaggcagagaaacactcctcggcccaaatctcgtaaaccacgccgagagccataacaggacggttgagggagagcgatttagcgttgtcctgcaaaccgatggagacacaagttggggccatgccgtggataaagttggtagtgccgtcgagggggtcgataatccaagtgaaaggttccttgcctgtgcgggtggcggtgccctcctcggctatgaaatcgctgtcgggcaggagttgtttgagacgctgtacgatgcggcgttccgactccttgtcgaagcgagtgacatagtcgtgtatgcccttggattcggacgagacgacacccgaaaggcccttgcgctcggtggccaggaaagcgccgacctcgcgagccagaagggagacctcattgcaaagtagtttagtattcacgaagtaattgtattaataatgcgggagttagatttgataaacatataaacggagagaagcgttttttattatgtacctatatgaataaaattgacattagggggcattgcgtactttggctggagatgggaggttttagatgtgtttttcggagcttgatggataagatttttttgaggcatgagtccgctatgagtccgctatgagtccgctaaaaagggggtgaaaagatgtggagaaaaagaagagacaagggcacgattgtcggcgagcgaggcaaagagaaagggcggacaaaataaaacatcagttttggcgttagaatggaaagatatttcgattattctccttacatcatgagcgacatcacattccgacccatgcgtcgacacaaacagcagctagagccagaggagtgcctggagctgctcagcacagcgccacgaggtgtacttgccgtcattggcgacggcggatatccttatgccatacccctcgactttgtttacgacgagggtacaatctacttccatagcgccaaagaggggcacaaaatagacgccatacgcgcatgcgacaaagccacattctgtgtgatgagccaaggcgagaaagaggctggcagctggtggtatcatttcaaaagcgttgtctgttttgggaggatacacgaggtggaagacgccgcgcttgccgacgccaaactgcgtctgctgggcaaaaaatacttcccagaaggctacgacctagagggcgacatgaagagcaacgctcctaacgctttggtgctagcgatgaagatagagcatgtgagcggcaaaagagtaaaggaaaaataacgtcacatttatcccatacaacaaaagacaactacactcgatgaaaaaaatagcattcactctgtttatcgtaatcttgctgatgtttggctgcaaacaagagccaaagacattcagcacccacaccattagcggcaacaaatactggataaccacatacgccaacgaaggagagaaaattggagcggaagtgagctacgatatagtttggcccgaccaaggcgtcataagtgccgccgccgagcgagagcttatgacgatatgctttggcgacagcatctctaagagctttgacgaagccctgcgaaaatgggtaggcaatgctcatatcgttgaggatgggtatggcgaatacacacccgtcgacaagcttgacacgatagaggtaggcgaaagccacacgctggaaagcagctgcaaggttgacagcacattggcgcttttcatcataaaaagatacgattatgccttccatgccgcccacggcctttattctgtcgactaccttaccgtcgacctcaattcgggcgaagccgtccatataaccgatttggtgaccgacacagcccttctgtgcgaggctatagcacgcgcgatacaggatttggatgtgaacaaagacatcagagaatgcctgtacgaagagttcggcgacgccgagaggatgcccaacaatttcaatttcctgattgacagcgccaggaacggcatcatagtcgaatacggcctatacgagatagcgccatacgcatgcggcatacaaagcgtatacctgccgatattctggctgtcgaaacatgtgccgctaaccgcctacgccaagaaacttttcgggcccgacagctacatagaataagtcacgaatcaaagcatgagagcacatatacttttaaaacaatatgtttggttggttgaaaccataaacagtgcacgacgcataaccctcgccgaccttaacgagcgttggcaaaacagttccctcagcgacggcaagccattgagccgaaccagcttcaaccgacatcgcgaagccgtggaagaactctttggcataaagattgaatgcgacaacgacaaccgatatcatattgtagacaacgacctgatacactccgacaccgtccaacaatggatgctcagcaccctcacagtcagcaacattgtaggcgaagtgcgcaaacttcacgaccgcatactgctagaaaacataccctcggaaggcgagctgcttcaggatatcgtcaacgccatgcaacgcagcgtacaagtagctatcacctaccaacgctatggacatgatattggatcgatccgagttgtagaaccctattgcatcaagttgtttcgccgtaggtggtatttgttatgccgcaccgaaaagaaaggatatatggttctatccttcgaccggataaagacgttgaaactcaccgaaaagaccttcatcattgatcccgacttcaacgccgagaacttcttctcggaatattttggagtgatgaccgacgacagcataccacttcaacgcatagttctgcgagcctatggcaacgaacgttttgctttacgcgacctacccatacaccatacccaaaaagagctggaagccaccgacgactatgtcgatttcgagatacgcctgcgacccaccagcgattttaaggcacatatactctcacgcggacgctgggtagaggtgatttcacccaacaatatcgcgcaagaaatcaaaaaattgcaccaagaggcaatagaaaataagtgaaagcgaccgaataaatgacaccaataatccactaaagagtattcctaatggcccaatggcgtaatgacaaacactttcgagtcaacttttggcgcaacacttaacccttcaaaatcaattatttatcataaagattaatataaatcgcacgagtgtaccgctttttggtacagccatagatatatctttgcatatattttttatacgcaaacacaatggcacaactcggcatggcgatgatattactctcgaaaggaagccttgaaggaggaggaggtctcggaatcctcatccttttggttgtcttgcttgccgtgctgggacttggggcgtcacttttagccaccccttttataggcgcatacaccctcatgacacacaattctgagggaaagctggattatgatgggcctttagcattgggagccaaaatagtggtaggaatgttcactttggccattttggtcggcatcctatcactcgtcgaattcgaaagtatatttatagaagccttagtggccttgctactaatatttgcagccatattctgttatcttgtatggaatcatttctatttcaggcatctatacacattaggtaacgaaggcgcccaacgttcgatacgcatactattccttacaattggcgttataaccattttgatcatagttgttctggtgtataattcggtagatagaaaaatagagaggtttgacagagctatagtcaaagcagagcaaagtccagaattgcaaacaggctgcatgattccagatatacatttaggaatgtcacatgaggagtactgcaacgtcgttgccagaatggaaaaacacgacagtgttaggacgagcgactccggaggtgaaacgctctatctggtttactcaaccgattgcgaccgatccatgtcgatgggaacaaccttcatcaaaggaaaactagccatgcttcatttaggcgactatggtggtttcggcagcagtttattcaaagaagacgtaaggcaatcaggcattttgcagggttacaagcgcctcgaaataccctcggttgacataaaacacgacgggaccatacgctaccctcgccatatgcacgacttctgcaccaactacgaactcaacttgctgtataattacgacgattatctgtttgtaaaagacaacctgttgatagtgtttaccccattgggagtctcattcatcaacatgccacaaatgacggggtattaaggagtagcaaaataaacacaacacaaccacaataaaaaatcaattaagatatacctatttttcaactcaccagcacagtagacaggtttataacaaaaacacattatcaaaacagacacaaattccattttttttgtatttttgcaaataaaaacaaatccataacaatgagtacaatattaggtttagacttaggaactaacagcattggctgggctgttgtcgacaacgaacagaagagaatcaaagccgctggatcgcgcattattcccatggacgcaggcaagttaggcgatttcgagaaaggcaaccctgtatcccaaacggcagaaaggactggctatcgctcggttaggcgtctcagagaacgttatttgttgcgtcgctcacgtatgctgcgtgttttgcgcattatgggatttctgcccgagcattataacaaacaaatagacaggtttggtaatataccggaagattccgagccaaagctggcatggcgtgaaggcaaagacgggaaatcggaatttttgttccatcaagcatttgaagaaatgcttaaccaatttcgcagggagcagccttcattattatccgacggtatgaaaatcccttacgattggaccatatattatttgagaaaaaaagctctatcccaagccttgacaccagaagagttggcatgggtgttgcttcaattcaaccaaaaaagaggatacaacaaacttcgaggagaggatgaagaagatgataacacaaaacaggaggtatatctcgaagccaaagttgttgccgttgaagacagcggagacaagaaaggtaatgaaacatggtataatgtccaattagaaaatggaatgatttaccggcggtcttcgaaacagccactcgattgggtaggcaaaaccaaagccttcatagtaacaacccaactaaaccctgacggcaccgaaaaaagagacaaagacggcaatatcaaaagatccttccgtgcgcccaaagatgacgattgggcattgttaaaaatccgcaccgaacaacttatcgagaaaggtcattacacaataggtgcatacatttttgacaacctactcaaaaaaccacaacaaaaaataatcggtcaattggttagaactgtagacagaaagttttttaaagatgaactgcatgccatccttaacaaacagaaagagtttatcacccaactaaacgatcgcaacctttatgccaaatgcatagaagaactatatccaaacaacgaagcttatcgcaatagcattgcacaacgtgatttcacctatctccttgccgatgacatacttttatatcaaaggccattgaaaagcaaaaaatcgcttatttctaattgtcctttcgaacatcgtgactatacagacatggaaactggcgagattaagaaatcgcctatcaaatgcatagccaaatcacatcctctgtttcaagagttcagattatggcaatggatttccaatcttagaatataccgacggggtgggtatgacgaagggagaatagttcctgaggaagacattaccgcaaaattgttaccagatgaaatgtcgtacgagaacttgttcttatggcttaacgacaggaaatctatcgacatgaaatccattctacgcttccctggtttcaaattcaacaaaaaagaatacgacacctatcgttggaattattctgaggacaaagaatttcccgccaacgaaacaagagccaccttgctcggtgggctctccaaagcaggtattgaatcatcatttttggacagcgaacaagaagagattctatggcacattctttactctatagaaaatccagttgaatacgagaaagcattagtaaaatatagttcacgccagaattggaatgacgaacaaaaagaagcattcctaaacgcattcaaaaagctgacaatttgcaaggaaaaagattatggcgcttactcagccaaagccataaaaaagcttctcgctgtaatgcgttgtggcacattatggagcgctgacaatattgacgaaaatacacataacagaatcgataagattatcaatggcattgctgacgacaaaatcagccttcgtacacgaacagtattgattggcaaagatagcatcgaacaattcaaaagactttcgttaactcaagcctgttaccttgtatacaatcgacattccgagacaaccgatgccgacaaatgggaaagtcctgacgacatagacatctggctacgcaacttcaagcagcactcactcaacaatcccatagtagaacaaattgttaccgagacattacgcacagttcgtgacatttggaaacaagaaggcaaaattgacgaaatacatatcgagatggggcgagagctaaagaaaaccgcagccgaacgaaaagccctatccaacaccattgcccgcaacgaagaaaccaatcaacgtatccgcgtactattaagtgagtttcttaatcccgaatacgaaatcgaaaatgtgcgacctcactccccatcccagatggaactatttaaaatctatgagtcaggcgtatgggaaggtatcaatacaaacgaattgaatgctgtagaaaaagcagaatacgaagaagctctcgacattcgctcccgcatagccacatccgacggcaaaaagaagccttcacgcagcgagattgctcgctacaaactatggcttgaccaaaaatatatatcaccatacacaggtagggttatcccccttggcaaactattcacggaggcctaccaaattgagcatgttattccgcaatcaaaatattttgacgactcgctgtccaacaaagtcatctgcgaatcagaagtaaacctactgaaaagcaacgaactcggacacgagtttattgtcaaccatcaaggagataaagttcagctaacccttggcggcaccgttgagattctttcggtcgaagcatacgaaaaactcgtatacaaactgtttgcttcaaatagagccaagctcaaaaaaatgatgcttgacgaggtacctgacgaattcagcagccgccaattgaacgacagccgctatattagccgtttgataatgcatctgctgtccaatatggtacgtaccgaagacaacgagggcgatatcgaagttgaggcgaagtctaaaaatgtaatcgcatgttccggagccataacagaccgacttaaacaagattggggcgttaacgacgtttggaatagaatcattttgcccagattcgaaaggctcaacaatatggagcacacaacccaattcacttcaaccacagcctcaggacacacaattcccgacatgccaattgaacttcgtcaaggttttaacaaaaagcgcattgaccatcgtcatcatgccatggacgcaattgtcattgcctgcaccacggcgaaccatgttaatcttttgaacaatgaggctgcacaatccaacaaacaacgctacgatttacaacggatattacgcaccaccgaaacttatattggcagcgatggaaaacaacatgaggcatttcgagcattcaaaaaaccatggaacacctttactcaagatgtatttgagacattgaacaacatcgtagtaagtttcaaacagaatctgcgagtaatcaacaaaagttcgaattatatagtatcctataaagatgatcaaggcaatttgcgcattgacaagaccggcaacaagaaaaaaggattgacacgtcaaacaaaaggcgacaactgggcaatacgcaaagccctgcacaaagagaccgtatatggcgaagtaaacctgcaattgcaaaaagaagaaaaagtaaaagagttcatcaagcacccagagagaattgtcaacaaagagttgaaacaattcgtcaaacagaaactcaacgaaaagaggcatctacactataacgacaaacagattgttagctatttcgaggattacttcaataataatgacgacacttggacagaggttaaggatggcaaaaccaccgtctattactataccaaagagaccaacaaacaatattatgccacacgaaaagacctcgtggattatatgaaagactgctcaagtgtagcatctgccgaaaaaaacataaatgccataaccgacagcggtatacgcaaaataatgtttgcacaccttgccactgagaacaacgacgcatccaaagccttttcggccgaaggcatcgatcgtatgaatgagaacatcgtagcactcaacaacggcaaaaagcatcaaactataaagaaaatacgtgtttacgaacaagccaacaaatttgccataggcacttctggtataaagagcaaaaaatatgttgaggcagcgaagggtacaaacctattcttcgtcatatacaccgatgacaaaggttctcgcggatacgccaccataccactcaacattgtcattgacttacaaaagcgatacaaaacagaatggcaaaagcatcttgccgaaagactaaaagagaaagatattgcattgatgcctgagaagtccagcattctgtacattctttcacctggagatttagtatatgtgccaaaaggagaagaaaaaatgacaaatgtcattgacacatcgagaatatacaaaacagtatccatgtcaggaagacagtgttttttcatattcaatactatttcttccattatctatcccaaagtagaattcgaatccttaaataaaatggagcgtgctataacaggcgaaatgataaaagaagtatgcattcccataaaggttgacagacttggaaacattatcaaaatcggacaataatcattaactaaaaaggagagtcaaaaaatggctttccttttttatttttcaactctcatgataaaaaagaccctatgtttttcaaatccagcttatctatcactaaagaatcaacaactggttattcaattagacaaatctgacgaaaaacgcacaattcctatcgaagacatcgcatacgtgctgctcgacaatcagcaaatcactataacccatggagctattgcggctctccttgacaacaacgcagcaattattacatgcgataatcgccatctgccaattggattgatgctgcccctcgagggcaacaccttgcaaagcgaacgtttccaaaaccaaatcgaagcttctcttccccttcgcaaacaactatggcaacaaacaatagagtgcaagattcgtaaccaggcggcactcctcaagatgttacacaattgcgaaatacgcaacatgctcgcatgggccaacgatgtaaggtcaggcgacaacacaaatcttgaaggtcgagccgctgtatactattggagcaagatgttccctgagcaagacgatttcacacgcgaccgcgagggcatccaccccaatgccatgctcaactatggctacgcagttcttcgtgctattgtagccagagctcttgtggcaagtggtttgcttcccacatttggcatacatcaccacaaccgctacaatgcctattgccttgccgacgacatcatggagccctatcgtccttttgtagacctactcgtctccaaactaatacgccaatatccaggtcaagaggaaataacgactgatattaaacgtcagctactaaccataccgacactcgaagtcaccatatccggtcaacgaagtcctcttatggttgctgtttcgcagacaacagcatcgcttgcaaaatgctatagtggcgagttaagacgcatcacctaccccactttcgatggacagatttagcgaataccgtattatgtgggtactcatttttttcgaccttcccacggagaccaagaaggagcgcaaagcagccgccgactttcgcaagaatctgacaaaagatggttttacaatgtttcaatattcaatttatgtaagacattgtgctagtcgtgagaatgcacaagttcacttgagacgtgtcaaatccttattaccagaatatggacaagtgggatgtttatgcattactgacaaacagtttgcagaaatagaactgttcgacagtcgcaaagagaaagctccaaatgcaccagggcaacaattggaattgttttagcaacagaaaaaagaaaatgaaagcaaaaacaaaaaatcccgccaaaaatgacgggatttttaaattctaagacactctttaagatattatccttaaactttttaccacaatcgtggtgtcaaagaacggtttctatctctactttttaagcgaatcacaacactgtcaaagaacggtttctatctctactttttaagcgaatcacaactcgagaactatgcccgtaagattgccaatgggtgtcaaagaacggtttctatctctactttttaagcgaatcacaacggattgtcgatgatggactgtttgagtttggtgtcaaagaacggtttctatctctactttttaagcgaatcacaactgcagcacgtaggcgtctgtcgcaagttgtggtgtcaaagaacggtttctatctctactttttaagcgaatcacaacacattctaatacgatgattaatacatttgggtgtcaaagaacggtttctatctctactttttaagcgaatcacaacaaattcctgacgttaaagaattgtttgttgggtgtcaaagaacggtttctatctctactttttaagcgaatcacaactgtgaacacttataatggtacatggaagccggtgtcaaagaacggtgaatcacaactcgacgttgcgtccacctctatgaccttgcggtgtcaaagaacggtttctatctctactttttaagcgaatcacaacgttgatgtaatccattgtttttgtgttttggtgtcaaagaacggtttctatctctactttttaagcgaatcacaacagcgtcgggcggcttgccgtccgacacattggtgtcaaagaacggtttctatctctactttttaagcgaatcacaacttcttccacggcgctgccgtcggtcttccaggtgtcaaagaacggtttctatctctactttttaagcgaatcacaacgctggtactgagccgccgccccctcgctctggtgtcaaagaacggtttctatctctactttttaagcgaatcacaaccaatgttccgtagaacacgcccgctctgttggtgtcaaagaacggtttctatctctactttttaagcgaatcaaaaatatgaatttttgaaaaaaggtgacagaagccctgccaccttaaatgttttcacaacggaataatccttattgtgagtcgcttaaaaagtaatgcaaaaatacatattttttttgatatgacaaaacaataatagcaaaaattatctacaaaactcatttacaaagacaagcaacacttattaaaagaattttttgtttcaaaatacaatttcgaaataaagaaaattattattttgacatcaataacatatagagcagtattgctgtcgccatagaatttcgcttctgacatctgtacaataaaaaagattgctgggcgttacatatcacatgaacaacaaagctattatcaagctcagggctatggagcctgaggacatagacaatatctacgactgggaaaacgacccgacaacgtggatttgcagcgccgcacaccagcctttctcgcgccacaccctacaacagtttatcaacgactgtgcctcagccgacatatactcatgccaccaactgcgccttatgggtatagacaacgatggtttggctgtggggtgcgtggatctcttcgacttcgacccctaccaccaacgcgccggcataggcataatagtggacagaagtaagcgtcgcaaaggtttcggcttggctatgcttagagaggtggagcaatttgccttggaacacctccgcctgcaccagctgcattgcaccatagcatcggacaacaaggctagtatagccctattcgctacagcagggtacactcaatgcggtactttgaagcaatggaaccttgacggctcaaacaattggcgcgacgccctcatgttccaaaaaatcatcaactaatgacagccaagaaaaaacaaaacaaacgccagaatattatcgttgccatcatagccatagctctgctgctgggctcagtggtgggtcttattgtcctgcgcagccagaagatgggcaacaacgaacaagtgacattgttcattccctcggggtctacatatcaagatgttgtggactctctcaacgctcacaaatgtattggcaacagcgccgtattcgcctcgatggcccgcctgcgccactacaaggacaacgtgaagtcgggctgttatatcctcaaaccccaccaaccggtgtggaacacgctgacaaagctgtactacggcaaccaggaccctatacgtgtaaccatagggaaacaccgaaccctgcaacagctgtcgacatacttaagccgcaaacttgagatgagcaatgacgacatcctaaacttgatgttggacgacagcgtatgcgcacaatttggatacaacagcaaaacaatcatagcgatgtttcatcaaaacacttacgacatatactggaacatcactcccatcaaactgttggaacgcatgcagaaagagagcggaaaattctggacaaagtcgcggcaaaagaaatgcgaggccctgaatcttaccaccgccgaggtgacgacgctggcttcgattgttgaggaggagactaacaagaacgacgaaaaggacgacatagcaagcgtatacctgaaccgcctgcgcaaaggcatgcttcttcaggccgaccccacactaaaatacgccgccggcgacttcacccttaggcgcctgcttaacaagcacatggagagcgacagtccttacaacacctaccgttttcgtggtttgccaccaggcccaatctgcatacccagcgccgcctcgatagacgctgtgcttgaaaacaagaagaccgactacatctatttctgcgccaaagccgacttcagcggacgccatgcctttgccaccaacctggcacaacataacgccaacgccgccgctttccacgccgaactaaacaagcgcaaaatatacaaataacgtaccacgacccctagaggcagagcgtcggagagaagaaacgttgaaaaaatatgtttttatatatctgtctgttatgagacgatagcaaaaaaaaatttgccacattaaagaaaagtggtacttttgcaattgggtaagtcttatacggtcagctcccattgaatcccccagggcaggaatgcagcaagggtgtttggttgtagcgacgcgatataatcagcttacccttttttattttgcccatccgaataagttttggtagttaagggtttaaggattcaaaagtttaaaggggttaccacatacggcacactggcgcgttttttttcagatttttccggccatttctgtgttaaaaaaagagagtcgaagagcattttatgaattattcccgtctttttcgtaactttgcactcccgatttttataaatggacatcaatataataacatcttacatactgattttcttaggaataacactatgggttatccttattcctggaggcaaaaagataccgcacaaggtgtcggattgcatcactgtcttcggtggcgccttcctcttggcctcctgttttatcaacctcatcccccacatgtttgtgcaggggtttgagacacccaacctacacattaaaataggtcttgccgccctcgtgggattcctaatacaaaccctcctcgaaatgatgaccaacagcatggaacatggccacaaccattgccacgactgccacgaggaggaggagtacagccacgagcaccatcacaaccatcatgtacatcccacgacaggccttatcataggtctctccattcacgctttccttgagggcatgccgctggtggacagcggctgcgacatacaccaaagtctgctctacggcattgttcttcacaacattcccatagccttggtactcgtcgccatttttatgcacaacggttacggcaccctcaaatcattcctgttgctctccatatttgccatcatgacgccacttggctcgatgtgcaacctgctttttgtccccgacaacgccatagtgcaagcgatgataatgggagttgtcgtcggcatactgctacatgtgagcgtgagcatactcttcgacagcgaaaccgacaaccgctggctaaagctagccctagtcatagttgccttcgccgccgcctacttcacccctggatgtcccgaaatatatgtctaaagccgttacaatagaaaacagacaatcaacaaatagaaaaaacgtcaaaaaaaagccaattagctgaagtcaataataagtcgtcattgaaaaaacaccatgcttctctcagtagtcatagtaaactataacgtaaagtatttcctagaacaatgcttgcgttctgtttttgacgccacacaaggcatcgaggcagaggtatgggtggttgacaacaattccgttgacggctcggtacagatggttagagacaaatttcctgaagtcaaccttatcgccaacggcgacaatccgggttttgccaaagccaacaaccaagccatacggcaatgcaagggcgactatattctgctgctaaaccccgacacgctggtgcagaaggacacatttttcacctgtattgaattctatagaaaccatcccgactgcggaggactgagtgtgaagatgatagacggcgaagggcgatttctgaaagagagcaagcgcggttttccgtcgccggcgacatcgttctacaaaatcagcggactcataaaactattcccccacaacaagaaggtaggtgcctactatatggggcaccttgacgacaacacagttaatgaggttgacgtgctgccgggagcattcctgatgattagccgcgaggctttgaagaagaccggtttgctcgacgagagttattttatgtacggcgaggacatcgacttctcgtggcgcataaaacttgctggatataagaactattacctgccgacgacacgcatactgcactataagggcgagagcaccaaaaagagcagcatgaactacgtatacaccttctataacgcaatggccatctttgcccgcaaatactttagcggcaacggtgccaagatgtatacgttactgatacaatgtgccatatggctgcgggcgtcgttggatttcgggaaacgtttgattggcaagctcgccgtgccagcattggactttgccgcctcgtttgccggctttttggccataaagaacatttgggccacctactgggctgagaatgtgaactattacccaacattctacacatggacaatactgcccctatacatccttatcatgctgcttgcctcatggcttagaggaggttacgacaaacccatacgaatagggcgcatagttcagggtatgggcataggagcgttgtgcctactagtcttctactcgctgctgagcgaggagttgcgtttttcgcgtgctataatactgctcggctcggtgtggagtattgcgtcagcaatagtcatacgtctgctattaagtctgttgaacgtagagggctacaaactgcgccccgacagcggcaaaagccgtctgattgtcggcaaccagagcgagtatgaccgagtcaccaacgagttgttcgacaccctaggcatagagtcgaaatacgtcaaaagcctttcgccacagaagattgccgacctgtcggatgtcacaaaggacattgaggaccttatggacaaccgaagcgacatagacgaaatcatattctgcaccaaagacgtatcaatcagctccatactcagcgtcaccgagcgactgcaaggcaaagggataggtttccgcatagcgcccaaagacatgaacgtgctgataggcagcaactacaccagcagtcccgaggagctatacacgcccgacttcagcaacatcagcaacgtcaccaaccgccgcagcaaaaggttgtttgacatcgttagctcgttgttgctgctgctcctctcccctattcttttctggccacagaaacgtaaacgtcgctattatgccgactgtgtcacagtacttttcggcaagaagagttgggtgggatattgcagaagtggagagctgaaagcgaaaagcgaagaggcggaaagcgagaacccgttgccagccataaagcgcggcgtgttccgcaccagcgaccgtatgcccaacgtgaaaaatcccgacagagagagactcgacagagcctacgccaacaactattatttaatgactgatataacaatattgacaatcaatttattccgcatatgaccattcccgaaaccataaaagaccttgaacagagaaaagaggctttaaagaaattccttgacatagacaaactcacggcagtcatagccgaagaggagaaaaagaccgaggccgccgacttttggaacgatcccaaagaggccaagaaagttatgctcgagataaagagcaaaaagaattggacaacagctttcaaagccgtcaatgacagcgtcgatgacctgttggttatgagcgagtttttcgatgccggcgacgccaccgaagaggagatgatgaaacagattgaggcgacgacaaagcttgttgaaggtttggaattcaaaaacatgctgcgcggcgaaagcgaccgcttcgacgccgtgctcagcatcaacgccggcgccggtggcgtggaggctcaggattgggccgaaatgctcatgcgcatgtacatacgctacgccgaacgttcaggttacaaagtggccataagcaactcgctagacggcgaaggggcaggcattaagagtgtcaccatgcagattgagggtgattttgcatttggctacctgaagagcgagaccggagtgcaccgccttgtccgcgtaagccctttcaacgcccagggcaaacgtatgactagctttgcctcggtcagcgtcacgccccttgtcgacgacaccatcgaggttgttgtcgacaactcgcgactgagctgggacaccttccgtagcggcggcgccggcggacagaacgtcaacaaggtggagagcggcgtgcgtctgcgctaccaatacaaagacccctacactggcgaggaggaggaaatccttatcgagaacaccgaaacccgcgaccaaccgaaaaacaaagagaacgccttgcgtttgctgcgttcacaactctacgaccgcgagatgaaacatcgcatggaggagcaagccaaaatcaaagcctcacagaaaaagattgaatggggcagccagattcgcagctacgtcttcgacgaccgccgtgttaaagaccaccgcacaggctaccaaaccggcgatgtgacaggtgtgatggacggcaagatagacgagtttatcaaagcctaccttatggagtttggtgccgaaggctaagaaaacaaattagggaacagttctttggagagtaaggaaataaatacatccttatattccaagtaatgaaacgaaaaaagcctgctcacgagagcaggcttttttatgatttagaatatcttagtcctctttaggagcaacacatttgtagaacaggcctgcgagggcggcgcctacgaggggagccacgataaagagccaaagctggccgcatgcgctccaagtggcacagtcgctgaagagagcctgactgatgctgcgagcggggttgacgctagtgttggtgagaggaatgctgacaaggtgtatcaaagtcagagtcaagccgatggcaaggccggcagccttggtgttgctgcgctcgtcggtagcgccgaggatgaccataaggaagacaaaggtgagcaaagcctcgacgaggaatgcgccacctgcgctaatggcatgataattctcgccggcggcagccttgaaagcgtcgccatagccattagcagcgaaaacgccagtctcgcccattccggcggccttccatatagcaagcaggacggcaccagcaatgatggcgccaacaatctgtgcgccccagtagcaaagcatatccttaaaactcatgcgtccgttgacaaaaacgccaaatgagacagcggggttgaggtgagctccgctaacatggccaatgccataagccatagcaatgactgttaaaccaaaggcgatggaaacgccgataaaattaacggaatgtccagcgaaaagcgctgtaccacaaccgccaaggaccaacacgaatgtaccgaaacattcggctaaaattttgttagtaattttcatgttgctatagatttagggttatttgacattgttaacgcaatttaacaaaattttattgtatgacaactgtttttttcaaaaaaaaatccccgactttgctgtcgaggattgagtttgtattgtggcaagacacacatcaatagcttcttgcgaagactacacgacggtggctgggtttgccgctgtatatgcacttgccctcctcgtcgggagcgtcgaaaggaatgcaacgtattgttgccttggtctcttccttgatgcgctcttcggtttcgatggtgccatcccaatggcagagcaagaagccattcttctcgatctcaaccttgaaatcctcccaggtgtcgaccttgcgggtcatgctggtgcggaagtcggcggccttcttgtagaggttctgctggatatcctcaagaagagtggatacatagtcggcaatgccttcgatggggacattctgtttttcgagagtgtcgcgacggcacac

SEQ ID NO: 1060 - DNA, 24641 bp, synthetic construct
  source 1..24641: mol_type = other DNA
  misc_feature 1..24641: note = Synthetic
aaaaaccctgcaaagtttctggagataaacaacaaataattagtaaaggtttccgtatataggataccttgtcaaaccaataatgatgcttcacactcgtgtgagtttcttaggtttgacaaaggtctccttgcagggttgccttggtacgcgataagaaactcacacttttcttatcgccacgattgatagttttgcgtaaaaacaactatcaatctatggcaggaaaagatctcaacgccgctagagtttctaagaaagatgagttctacaccaaattggatgacattgccaaagaactcaaatactacgcgcaatactttcaagggaaagtagtgttgtgtaattgtgacgatccgtacgagagtaatttcttcaagtattttgcacttaactttaaccgattaggtctcaagaaactaatcgctacttgctatgatggttcaccggttgcaggagacgaactaccgttgttgtttgagattgaagaaaccgagcctaaaaagatagcctacaaagtagaaattacggaagtacaggactacaataatgacggagcagtaaaccttgctgatgttcagtggctcatccaaaacgacaaaaatgcactctccttactcaaaggaaacggctcttttgatagcccggagtgtatcgaattgctcaaagaggctgatatagtagttacaaatccaccattctctttatttcgcgaataccttgccctattagataaatataacaaacaatttatcattattggcaacacaaacgcgctaacctataaagaaaccttccgaatgttccaagaagataaaatacgtactggctatacgaattttaatgtcggaatgttctttcaagtacctgacaattgggaaaagttccatcatttagaaaatgggaaaaagatggctcgtgtttctacttcttgttggtttacaaatttccctgttagcaagcataatgaagacattattctatataaaaagtatgacccaatagaaaatccacattacgctaattttgatgctataaatatacaaacttatactgatatcccctttgattacgagggaattatgggagtccccattacatttattgataaatacaatccagatcagtttgaaataatagattgttgtgaacctgcaatagatttggatgtctatattaaatgctcatattttaatgagcataaatctcgtcaagttacctataaagggaaattatgccagaagacatatcatagagttttaattcgcaataaaaaaccacaaaagccatgaaaatagatttacatgaaatccgcgtgcgggagttgtgcgccgattacaatgatttgagtattcaggaagaaggtatcgtcggctacggcggaaagctgaacattcgcccgaaataccagcgtgagtttgtctatgacgaaaaacagcgcaatgctgtcatggacaccgtttggcagaattttccgctgaacgtcatgtattgggtgaaaacggatggcacagacggcatcgaatatgaagtgctggacgggcagcaacgaaccatctccatctgctcatttatagcaggcgagtatatgatgaactttgacggtaacttgctcggtttcaacaacatgaccattgagcagcaaaaccgcatattggattacaaactgcaaatatacatctgcgagggaacggacgaagagaaactgaaatggttccaacgcatcaacatcgccggcgagaaactcaaagagcaggaaatccgtaatgcgatctattccggttcgtgggtgacacaagccaaacgccgtttctccaagacaggctgtgtggcatacaaaatcggttcggacttcatgaacggttcgcctatccgccaagactattttgagaccgcactcgaatggataggcgacgcgcaaggcaaatcgctcaaacaatacatggctgatcatcagcacgacacggacgcagacgaactatggcagtatttccaagatgtcatccattggattgaaaaactcttcgggcgcaagtacaaaaaagagatgaaaggtgtggagtggggattgctttacaataagcacaaagacaccaaactcacagctaccgcgataggcgaacaaatggctaaactgatggcggactccgacgtgcagaagaaaagcggtatttttgcctatatccttgacggcgacatccaccatttgggtatccgtgcttttgacgccaacacgcgccgtgaggtctatgagcggcaaggcggcaagtgcgcaatctgcggcaaaccgtttgatatagaggttatggaggctgaccatataacaccgtgggtggaaggcggacgaacgattgcatccaactgtcaaatgctctgtcgcgattgcaacaggaggaaaagcagcaaatagtgcggacgaacaacaactgccaaatgctctgccagacatataatagagataagagaaacaagtaactgacagctacaattcacttgttcactgattcttaataatcatacaccttttaacttcgtttcaagatcgttccaaatagcagaccttaagccgaccttgagcagaggtttagtagaggtaaggtagaggttggtagaataccaaaatcttaatcatcggcaattttcaccgtgggagtgtactggtgtttgatagcacttgcctccgagatgcctccgagattactccgacttgcctccgatatctatattgtaattcggtgcaaatgaacggtttatgatgtcattggcatatagggtgtatatactgcctatcgggtagtgtgtgggcgatatttcataaagcagaaatgatttgtttataaaaaccagaaattacaaatttaatgccagacactattatggcataatatttgcatcggaacacgtatgttccgaagaatgtggataataatgtttcttgtttctgtactgcctatggcggcacggaaacaaaagccgcttgtgccggattcgctccaactcatagagactaatatccacggtatttcccttcggatgaggagagtggaaggtggatcgtttgtcatgggctcgacagccgaccaatacgatcccgaaatctacagcgacaaaccggctcacctcgtttttctctctcctttctatatcgctgaaacggagatcacatacgagttatggcaggcagtaatgccggattacaaatcttcatttcatcccaaaggatttacgtatagtcctatctcgtatgtctcttggtttgattgctgcgagtttatccgccgtttggatagtatcaccggcttgccgtttcgtctgcctacggaagccgaatgggaatacgccgcgcgcggcggaaaagacagccgcaagtaccgtttctcaggaggaaacgagccggatagtgtaggatggaacagccgtaactccggcaattggacccacgctgtgggacgcaaacaagccaatgagttaggcttatatgacatgtctggcaatgtagcggagtggtgtcaagactggtatgcgccttattgtgtgggcactgcggtcaatccctgtgtgtgcgattccggtgagtttaagattgcacgcggtggcagttatgacgactgtgccgcgaatagccacatttcgctccggcggtggtattctcccgaatcgaattacaactatattggtttcagagtcgctttcaccttaccggatgacccgatgatgcaaaaacagaacatctctgaaccggcacttaccaagaagatccgtgcgaaaggaaaaaagttgctctttcattatgtagaagcggaacaaccatattatatctcggaagaaatcactgtgtcccaatggaagaaaaccatgcaacagtcccccaaggacacgcaaaagaaccttgctaccggaatgagtaggaacgagcgtgcccgttttgccgagatctggagcttggaaacaggcgaggctcttatagtggcaactgcggaacacatagagaaagcaagggcacaagggcttatctctgcatccatgccggacaccggcaaaaaacaccaaagcatccggcggacacaacgcaaacgcaaggcggtaagtgctctttctccatggacagaactggtcggtgtcaggctgtccaaacccgatgacccggttctgttggagtatcggaaagacgatgacgactcccaacccctgcggcttgtgctcttttattccttataaaattcataaatctatcaggataaacattcactattttaagaaaaaatgtatcctcggtattaaaaaaacgcccgactattgcatatgtcaggcgttttgtgtacttttgcagtgcaatttaatagtgctatcaaataagacacataatatcatccgggaatattaactatgtacagattaggtattgacatcggcagtacaaccatcaaaatggcactgatagaagttagcggagaagtaaagtctgtcagcggtacgccgcatattaaaattctggctaccgactaccgccggcataatgccgaaccgctgaaagtagggcaggaaatgatggaaggaattctacagcgtagcggtctgtattctgtcagcgaagcagtccaacaacgcagcggtcttactatcggcatcaccggttcggtaggaatgggttgcgcttcgcggctcggagtcaggtttcaccaagaggtgatagccgctgccgaagtcgtgaaacagctctatccgtctgtacataccctggtggacatcggcggggaggattgcaagatgatattctttgaggaaggccgcgtgccggacatgcgcatgaacggtaactgtgccggtggtacgggtgctttcatcgaccagaccgctacgctgttgggcatcgagaccggagaactcaacgccttggcagccagagccggacatctctatccgatagcttcgcggtgcggcgtattcagcaagaccgacattcaaaaccttatctcccgctcggtaagcaaagaggatatcgcagcctctatgcttaatgcagtctcattgcaggtagtcagtgccttggcgcgcggaacggatgtgcatgccaaggtcttcctgtgcggcggtccgttcgcctatatcccggagttgcgcaagtatcttctcgccgcattgggaatgaatgagtccgattgtattctgccggagtacacccaatatgtcccggctatcggaacggcgctgctgagtgccgaggagggtggggaactccgctctgtggagcaggtgcgtaccatgttcgccgatgccgctcattgcggggcggtagcgattgcaggaactcttccgccactctttgagaacgaagcgcattaccgctcgtggctggcagagaagcaagagaaataccaccatcatcggatcgccgcccacaactcttcccgctccgccatcgactttcctctctatttaggcgttgattccggcagtaccaccaccaaagtggtccttgtcaatcaggaggaggaaatcgtttattccgactacagctataacaacggcaattcgtttgccgccttccatagtgcgctgcagcggatgcatgaggcattagggcaggatatagagatcgccggcagttgctccaccggctacggagagcagttgctcaagacagcttttcgtctggatcatgggatcgtagagaccatggcgcatttcaaagcggcaaagcatatgcacccggaggtctcgtttgtacttgatatcggcggacaggacatgaaagccatcttcgtccaaaacggatctatccgccgtatagaaatcaacgaggcatgttcctccggttgcggcagttttatcatgacttttgcacgccagttgggttacgaggtcggcgaatttgcccggatggcagccttggctaaacacccttacgatctgggtacgcggtgcaccgttttcatgaacagcaaagtcaaacaggcgatgcgcgaaggggcgcaggtagaagacatagcggcaggattcagttattcggtcatcaaaaactgtctctacaaggtgctcaaactgcaatcgtttgaccagttaggggaacatataatggtacagggaggcaccttccgcaaccactctgtagtgcgggcgctggaactgctgaccggcaaagaagtcggatttggtcccatacccgagctgatgggtgcatacggagccgccttgtacgcaaaaggaggcacacaatgaaactgaatgaactcttacaatcggatcgctttgaggagaaggaagagatctgtcccggctgtcagaaccactgccaggtgcgcgtctattcctttgcgaacggacggcaatatgtctccggtaacaactgcgagaaagtctattctaatgcggacgaaggcgctgtaaaaggcgtcaatatgttcgatgagaaatacaaactgctctttgggcaatcagccttcagcacccggcagtcagccctcactctcggtcttccacgcggcttgggaatctacgagaactatccgttctggcagacccttttcaactgctgcggcatacgagtccgcctgagcgccgccagtacgaaccgtctttttgacaaaggggtgcgaacaatcgtggcggataacatctgctatcccgccaaactgatgcacgggcatgtcatggatctgattgagaagcgtgtggacaggatattctacccttgggtggtatatgagcgcaaggaggacgagaagggtaaaaacagtttcaactgcccgatcgtcagcggctattcggatgtgatcaagagtgcaatcaatccggagaaacactacggtattccgctcgatgcacctacaatctctttcaaggacgagtccctgcttcgtgcatcgctcacggagtatcttgcaacgctggggattgctcaggacgcagcccaagcagctatcacgcaggctatcaacgcgcagcaacggtatctggactctctggaacaacgtaatacagctgttctccgtacagctcagcaacaggggcggatggttattctcttggcagcaagaccttatcatatagacccgcttatccagcaccgcatagccgatgcgattgcggcgatggggattgatgtgatcaccgaaaatgtagctaccagtgccgggcagggcgtctatgaggaactgaatgccatggcgcaatgggcgtacccgaacaggattttcaaagccgcctatttcgtagccaaacatacgtatcccaacctgcacatggtcgaactgacatcctttgggtgcggacccgatgcgtttatcctcgacgaagtgcgcgcaatcctctcccggtacggcaaaaatcttaccgtcctcaaaatcgacgatgtcaataatatcggttcgctgcgtctgcgcgtgcggtcgctggttgagagtgtgagaaagtctgtcagtccgaaggacggtctgtattctgtcagcgatagcggtctgtcagcgcagcggtctcaacttcctttcaccacccaaccgttcgagccatccgatcgcgaccgggtaatcctcaccccttatttcgccgagggctacaatgagtttctgcctacagtcttccgtctggcgggataccggatcgaatcgctcccgatggctacgcaggcggatgcagaggaagggctgaccatcgccaacaacgacatctgctatcctgccacgatcgtggtgggctctatcatgcgggcactcaaatccggcagatacgacctctccaaaacggcagtagctatcacccagacaggagggcagtgccgggcatccaattattactcgctgatcaagaacgccctcgttgccgcaggaatgagtcaggttcccgtaatagctgttgccatcggacccgacatgaagaacaaccagccgggatttgagatcccttggctgcgcctgatccgtcctactcttgaggcgctttatttcgcagatgcacttgccaaactctattatcccgcagcaccgcgtgaacggacggcgggggaggcacgcaggttatatgaccattatttggaggtttcccagcccctgttgctctggcgtgattacagaggtatgcgccggttgatgcgcgaagcggttgccgcctttacggagatcattgatccggataaacaggtcccggtggtaggggtagtaggggagatttatgtcaagtacaactccttctccaaccatggggtggtgcattggctcattgagaacagcgtagaagtggtaccgccggctatcaccggatttttctctacatccatcccgaatgcgtttatcaaccgccagcagcatatccgccgggacggaatgagtccgtggcaggcacggcttgtcaaccggctgctgctccattatgcgcattgttatgaccgtctctgtagtccttatcctttctatcgcccattcaccaatatcatggatatatggcacaagagccgccgtgtgatcaactcggcagccgatttcggagaggggtggtttctgcccggagagatttgcgatctcgcggacagtggggttgagaagattgtctctctacagcctttcggatgcattgccaatcatattatcagcaagggaatcgagcggcggtacaaggatctgtatcctcatctggcacttttgttcctggatttcgatgccggcacatcggatgccaatatcacgaaccggttgcattttctgctccgataatttgtgtaaatcagaaatattcactacctttgcaccgcaaatgtaaaaatgagaaaatgagaaaatatgaaaatgcaaaaatacgaaaatgactccatggaattgcgtatccgcgaagtagcacagcaactctttttcgaccaagggtatgcagctacctccactacccagattgcccaagaggccggttgtacgcaggcgcttgtgcattattactaccgcacgaaagagaacctcttccgccaaatattcttggagcagatagaagcggcgcttaatgtcatcggacggtcgctggcaagcgaggacaacttcgagcagttcatcactaatgccatctcgctttatttcgatacactgatgcagaacccgcggctgccgtatttcgtgttagaggaattagtgtccaaccccgaacggcgcaaatatctccgggagaatttcgtcaagaaaccttcctatgccatattgtatatgcagttggagatgcgtgtcagacacgagcagcaagccggtaggattgacaagatagacccattcgatctcatgttttctattgcttccatgacggtctttacttttatctctttgccgatgtatcaggacttgctgtcccggacggacgagcaggtaaaagactttgtccttcatcgcaagaacgaagtcacccgcataatcctcaaaacgctcaaaccataaagtcattgttttctccctttcggcggcattcttgccgccgttattagcgttaccatatatcagcgaagcggtctatactctatcagcattacaatctatcctctaataaccaatcaaaattcaaaaaagcatttaatttcttgcatatatcaaaaaaaagtagtacctttgcatcactttttatgaatgacatacacaataaggattattccgatgtgtaaacatttagggtggggcacagcctcgccctcttttttgctcctacagtgcgcctggtctatcaagcgcagccgatcctgcagcgcagcggtctttcgctttcgtctattgtgccgtctgagagacggcgttcttctttttgttctgtccctacggtattccgcggatcttttttcttcgtcctgttcgcgggtctttagccctgcgccaccttttttgattgtccctttgattgtccccttgattgtccccttgattgtccccttcggcggcatttttgccgccgttattagcgttgccatatatcagcgaagcggtctatactctatcaactatcctctaataaccaatcaaaattcaaaaaagcatttaatttcttgcatatatcaaaaaaaagcagtaattttgcacaaaattgtcacaaacaagaaatcattgatatcatgaaaaagaaaattctcggtttggatttagggaccaatagtatcggttgggcagtagtaaatgaggaagacactaagaaaagtatctcccatgccggtagtcgtattattcccatggatgcaaaactaatgggggattttgaaagtggcaattcagtttctcaaaccgcgacgcgtacagctgcacgtggtgcgagacgcttatatgagcgccatgcattacgcagagagcgccttaaccgtgtattgaccattcttggatttctaccggaacattataccggcgaactaaaccgttatggccagctcaatcagagggcagagcctaaattagcgtgggaaatggttaatgggaaatactctttcttattcaaagactcattccatgaaatggttcgagagtttgcgcaagttcatccggaattactggttaacgggcgaaacattgcttatgattggacaatttactatttgcgtaagaaagcactgacgcaggctattacaaaacaagaattggcatggatacttcaccaattcaatcaaaaacgcggttataaccaagcgcgcggagaggaagacgagcagaaagagaataaacgtcaagaattcataacacaaaaagttatttctgttcgcgataccggcgaaaagtcaaaaggaaaatcggtatatgaagtatgtcttgaaaatggatggatttttaccaaagaaagcaaatatcctttagattgggaaggtaaaactaaaaacttcattgtttcaaccactcttaattccgatgggacagatgcaatagataaagatggtaaaatcagaagaacatttagagcaccggcagatgatgattggggactccgtaaaattaagactcaacacgatatagatgcaagccataaaacggtaggcgaatttatttatgacgcattgctacacaaccctgatcaaaagattattggccagttagtgcgtgtcgttgaccgaaaatactataaggacgagttaaaacgcatccttgatacgcaaaagcagtttattcccgaattgcaaaatggagatttgtatgatgagtgtattcatgcgctttatccgcaaaatgaagcttatcgaaacagcatagcaggtaaggattttacgtatttgctgttaaatgatattattttctatcaacgtccactgaaaagcaagaagtcattaatcaatgaatgtccgtacgagtatcatgtatttaaggaaaaaggtggtaaatggcaaaaacaatacttgaaatgtatctccaaatctcatcctatttatgaagagttccgtttatggcagttcgtggaaaatctgcatatctaccgagaagcgacaaacggaatcggcaaagaagattgtaccgcagaacttattgctaataaagcggatttaatctcttggctgctaacacaaaaagaggtttcagaaaaatctctattaacgcaattagttggtaaaaataagattaaaggattatcttggaattatgtatctgaaaaagacaagaaatatcctgctgctcctgtttcttctactataattggtactattaaagaggcaggtggagacatcaacactttgaccgatccatttgaaatccgcaaaaacaagcatcatagaaaattatcaggtaaagaacaagacgagaaagccaaaaagaataatagaattatcaataatttagagcaaatatggcacatgctctattcaatatctgacaagtctcaactgctcgctgcactcaaacattatgccgaaacaaaccatctgtccgatgtgttcgtagagaaattgggtaagatgaaaccattttccgactacggagcatacagcgaaaaggctacgcgaaaattactcagtttgatgcgatgtggagagtattggagcgaagaagcgatagatgccaatacaaaatcccgtatcgagcatattcgaacaggcgaagtggacgatgcaatcagtgagcgtgtccgcgagaaactggaggcgatgaataaaataaaagatttccagggacttcctttgtggcttgcggaatatgtggtgtatgatgtgcgcaagaacgacaccaaatgggaaacaccggaagatattgacaagtatctgcaatctttccgtttacattcgcttaataatccaattgtggaacaagtagtaatggaaagcctgcgtacggttcgcgatatttggaaacaggaaggacagatagacgaaatacatattgagttagggcgcgacctcaaacaaaatgccgaacaacgcaagaagactcagcaacgccaacaagaaaacgagaaagcgaaccttcgggcgaaattactattacaggaattcatgaatcccgacatggagatagaaggtgtacatgcttattctccgagccaacaagagcttttccgtatctatgaagatggagtattaagtgccaacaaacccgatgatgagacacaacgcatcataaatgacttatcttctctcaaacaaccatctgcccaagatatcaagaaatatcgcctttggttagaccaaaaatatatttcaccatatacgggagagattattcctttagccaaacttttcacaccggcatatcagattgagcatgttattcctcagtctcgtttcattgatgattcgatgtccaacaaggttatttgtgaggcagaagtgaatgcccgtaaagacagaaagttgggacatgagttcattgtaaaatgcggaggagaaaagattacactttccggaggtaaggttgtaacaatattatcccaagaggcttatgaggatactattcgcaagaacttttccggagacccacgcaaacaggagaaactgatgctggatgatattccggagaagtttgttgcccgtcagaagaacgatagccggtatattagccgattgatgatgcaactgctcagtaatattgtgcgtgagaaaatcagtaatacagaatatgagccggaggcagttagtaagaatctgattgtatgtaacggcgcaactaccacgcgtctgaagaaagactggggaataaacgatgtttggaataaaatcattcttccgcgttttgagagtctgaataagattcaaaaaacaacagtctttacgacaaaaacagcaaacgggcacattattcccaatatgcctttggaattacggcagggctttgagaaaaaacgtattgatcatcgtcaccacgcgatggatgcaatcattattgcattcacgacccgcaatcatgtagctttgttgagcaacgaatccgcattagacaaggataagaacgcacgcgatgacttgcaaacgcttctgcgcaagcgggaagtctggagaagtgcagacgggacagagcattataaattcacggactttattgcaccttatgacggtttccagaaagacgtacaagatactttggaaaatataattgttagtttcaagcaaaacttacgcgtaatcaataagagtagtaatcgttccgttcgttttgtggatggcaagaagcaaatggtcccccaaaagaaaggggacaattggtctattcgcaagtccttgcataaagcaactgtattcggcgaagtgaatctgcgtaagaagaaatttgccaatctgaattatgcactccagcatgtggaagatatagtcgagaaagatctgcgtaccaaattgcgtgaattgctgcaagaaggcaaggatgagaagcaaatcaagaaatactttgcttccgaaccggatgtttgggcggatgtgaacctcaaacgtatcgaagtcttttattatacaaaagataccaacgaccactattatgcggtcagaacagcattggatgactcgttcacagaagattatatccgcaacaaagtgacgtcagaagccatccaaaagattcttcttgcgcatctggcgcgttgtaataatgatccgaaattggcattttctcccgatggaattgagcagatgaacgcagatattcagcaactcaacaatggagtgcctcataaacctatttacaaggtacgtaaatacgaagaatcaaagaaaaaatttgctgtgggtcaaatcggttccaagagtaaaaaatttgttgaagcagctgatggaactaaattatatacatttgtgtatgagaaaactaatcctgattattcaaaatcgcgaaaattagttgaattgtcattagtagacgtgatttctgctcaaaaagaatatggaaaacactggaaacaggaaattgacaagaaactacatttgcaaggatcagttgccgcagaatattcctttgctttttctatatcacctggcaatttagtatacgtcccaaccgaagaggaaatacaaagacagaaatacgattttagtgcgaataggatatacaaggttgtttcgttagatggtgaaaatcctaattttattccgtccaatatagcctcaatgattgttgatagcgtggaatatacacgccataataaaacaagtagagatgcttacggacgtttaatcaaagaaatttgtgtcccaatcaaagtagataggcttggtaatattatagagccatgataaaacgcgtcttatgttttgagaatccggcacgtttgagtcttcgtttggagcaaatcgtcgtagagttaacagctgttgttaacaaccctaacgtgcctgaaattgcgcaaaaaatgggcactaaaaccattcccattgaggatgtcggggtcgtagtgctggataaccggcaaattacgatcacacacgcgcttattgacgcacttcttgaaaacaattgtgccatcattacttgtaatgaaaaacatcttcccgttggattgatgcttccgttagacggacacaacttgcaaagcgagcgtttcagggagcagatagaggcttccggacctctcaaaaaacaattgtggcaacaaacagtagttgcaaagattttgggacaagcacatgtattgggcactcaacatattgagcataacaacatgctcaaatgggcaaaagatgtgcgttccggagatacagataatatggaagctcgtgcagcggcatactattggcgtaatgtgtttggtgatcaggattttatacgtgctcaagaaggactgccgcctaataatctgctcaattatggctatagtattgtccgcgctatgatggcaagagcgttggttgcggcgggattattgcctactttgggcattcatcaccataatcgctataatgcttattgccttgcggacgatattatggaaccgtacagaccatttgtagatgaaatggttttgacgatgatcaaacaggggatggttggtgaagatattactactgctcaaaaaatccaactgttgggtttgtgcactgcagatgtgcatattgaaggtcatcgccgtccaatgatgttagccatccaaacaaccgcacaaagtgtccaaaagtgttactctggcgaagcaagaaaaatcatttatccagattggtaactgtctcatcctaaaaagtaaaaatacggactaaaacaaggcttattcacttttctacgatcaattccaggttgtgtatgtcattcaaaaaaagtaaaaatacggactaaaacaagtgtaaatggttgtactttctgccatagttggttgtgtatgtcattcaaaaaaagtaaaaatacggactaaaacaagacaggcacgcaaggcggcggagaaagactagttgtgtatgtcattcaaaaaaagtaaaaatacggactaaaacaagtatgacttagacggcttataccagctgctgttgtgtatgtcattcaaaaaaagtaaaaatacggactaaaacaagggcgtaccacggctaacggagttaaaaggtgttgtgtatgtcattcaaaaaaagtaaaaatacggactaaaacaaggaactcaggcaacgggaaatccatttgacggttgtgtatgtcattcaaaaaaagtaaaaatacggactaaaacaagcattcttcgcgctttttgtttaagcaatggttgtgtatgtcattcaaaaaaagtaaaaatacggactaaaacaagaccttccaaatagtacacgtaatgaaacaagttgtgtatgtcattcaaaaaaagtaaaaatacggactaaaacaagtcattccgtataaaaccctaaaacacaacaagttacaacatgttttagaacgtaaaaaagcagtaccgaaaagtactgcttttgttttatttttggtatttctaatttctaaaacagttctaattgttgaaccggctgatctttcaacacctctttgcagcaatcaaaaatctgcatatcgccaaactgtttgtcggttatccggagtatgcctattttgccgaaaggaggcatccagcgtttcactcttgtaatatgaacatccgcattttcggcgctggggcagtgcctcagatagatactgaactgaaacattgtaaacccatccgtcaagagtttcttacggaattgggcatattccttcctgtctttcttggtatctgttggaaggtcaaacaaaaccaacacccacataatcctatattcgctaaatcgtgtgtccatttcttagccctaagggcacgattaaccaagttttgggctacaaaattactgaaaaatgtagaattttcaaaattatttgtcaaattatttgcatatttccgaaaaaaaccgtacctttgcatcactttttatgaatgacatacacaataaggattattccgatgtgtaaacatttagggtggggcacagcctcgccctcttttttgcacccttatatttttttgcatagcaaaagtggcaaaaacaaaaatgtaaataatacggactaaaacaattaattctcgactaaaatcggtctgtttgatgcaaaaactctgctttgggaatcaaaaacaagttttttacacacaaagttgcaaatgaatttgcacatgtcaaaaaaaaatagtatctttgcaccgtcattagaaatagtggcctctatacttagagtaaagtgctgtttcacgtgttgagataacactataaaatggaaaccggtgggaggtcttagtacctcccttttttattcaaaatatgagcgacagaaaaacagctactacaattgatgaacaattagcccgcctgcagagcagaggaatgacaattggcgatataaaatgctggcaaagttttgtcaagtgttggctattttcgtatgggcttttattggtattgttttgaaattcccaaacacaggaagaatggcattcacaagttccgtaaggatactacatgggaaaaggtgaaagcactgtatgattttgacgaccgcttccgcaatctgctttctttctatctccagactatcgaaacggatatccgcacgcgtattacatatatagtatctaatcattataaaacagatccgttctggtttgttaatcctgcctatatcggtgattcttttattcaggagttttgtgccggatactcgaagctcaagcgaaataacgatgtcattaagaagcaccatcgcaagcatccggaagatatacgtacgctccagcatggaaaacgctggagttccttactttcggagaagtgcagcatctgtatcttaatatcttggataacctgttgcgtcagcagatatactcacgatatcaaatagcggaggaagatgtctttaagtcgtacattgatattctgcggattatacgaaatgtgtgtgcacatagccatatcctatacgacaaacgcttatatgatggaattgtcggtaggcatgagttgttgggattggcatctggagaggaattctctatcgtgggtgttctcaaactcatctactatatgctacgacagatcgatccggacaaagagacggagatgcgcaatatgcttcgttcactcgtcaatcaagtagaatatgacagcgtaaaatttgccatatcgcgccttgctttctaaaaaatattattccgatgtgtaaacatttagggtggggtacagcctcgccctcttttttgctcttatagtgcaacgatcttgcagtgaaacggtctatcaagcgcagccgatcctgcagcgcagtggtcacgcagaaaatctgcgtaatctgcgtaatttgtgaacaaaaaaacacaaaaaagacatatttatttgcatatgttcaagatttgttgtacctttgtaccgtttttaattcttaaccattatggaaaatgctaccaacaacgctcctgcactgcagttgagaacctcgcgcggactcctcaaaatgatctttttgggactcatcacttttggtatttatccgctggtggtggagtcgcacatcggcgaagagctgaaccttgtcgccagcccgcatgacggacgaagaaccatgcatttctgcctcatttatttcatcttctcctggctgactatcggcattgcggtactcgtttggtaccatcgcacatccgatcgcatgaacagcgagttgaacagaagaggcatcgattactctttcggcgcactggatttctggctttggaacgttctgggcatgctgattattgtcggcccgtatatttatgtctataagcgtatgaaggcgatgaaccttatcaacgaggattataaccaaagaggataagtttctgcccgaaccatgaacgcccgactgccggtttgtccgcggacattgaacgaagggtaggggagttgctgcctgaaacgggactcttcctgcctcttttcctcgatgacaaatcgagtttttttcggactcacataaaggtaaaagggggtgattacggggtgattacagggtgattactgggtgataactgggtgattaccgggttattcggcttacgtcagaggcaggcaagaacaagaaaagtttccaactgaccacttgtcagaacgacaaatatatacgtagtatataccacaaaaatcatgctaaaagatgactaaaattaaatttcatgctcccgttaaagaaatgaacggggaatttgccaaaggaagcggtattatcatgcggaaaaagaaataccgggctccaaacggggcggtccttaaagaaggctctcaagaatcatacaagatcgtgaacccgagggattatgaaaaaacaccgcctaaaggcgcagaactcgctaatattcagctgtttgctgactccaaacgccttgcctcggaaatcctgcattccggggatttctcagatgacgaattggctctcatgacgcctgaagagcgtcagaaaacgctcgctttgcgcgcacagttcgaagacctcaaaaagcggttctatgcccagttcaagcacccggatccggaagcaccgtttgagaagaaaccggctcccggatcttccaaactgcaccggaaacagtatgccaaactggataacttcattcaagccatcatccgcgaaaaactcaaaaacgcaaatcccaaataacaaacatatcaatcccaagcacttattccagcgaacctgccaatttggcagaattcggcaattaaattgtcattattcaccaattcctgcacgcatggtataattcttgtccttcaacctgtatattagtatatagtaattttgaatataatcccgattatgttaaatagcactcctgaagacatctaccccgtagaagatacgctctcggttctccctcttaaaaacatgacgctctttcccggcgtaatgatgccggtggtcgtaacacgcgaacgcgcacaacggctcgttcaggctgctgccaaagacaatagcctgttggtcatcctctgtcagaaagaccgggacatcgtggatccgcaaggcgaagacctctatgacatgggcactaccgcacacgtcgccaaagtaatggagatgcagagcaatattgtggcattccttgaaggcgttagccgcgttcgggttaccgagtttgtcaattccgataagggattacaggcgcgtatcactgaaatgccggagatctttcccgagacggaggacaaggaggcaaaagctatttacgacaaccttaaagagcaggcgggatttatcctctcaaacgtcacaaacgtgccttcagaggctccgctgatccttggtagtattaccaatatccctaccctcatcaactatatttgtatcaatttcaacctctccactgccgacaaacagctcttactcggctacgattcgatcaaagaaagaggttttcacctgctcgaattgctcaacaaagaggtagaaatgctcaaaatgaaggcggagatacaatccaaagccaaagaagatatcgacaaacagcagcgcgaatacttcctcaacaaacagatggagaccattcagcgcgaactcggcgacacaagcgcagaaacaatcagagacttggagcagcgggctgctgagaagaactggcctgaaaacgtggcgcagaccttcgcacaacaactcaagaaactgcaacggatgcaccaggaatctgcggaatttaccatgcagcagaactacctcgagacgatgctctccctgccttggaacacctttaccgaagataactatgacatccgccatgcacagcaggtactcgataaaaaccattatggcatggagaaagtcaaagagcgtattgtggagttcctggctgttcagcgtcaggtaaaaacctctgcgccgatcatctgcttgtacggcgctccgggtgtcggcaaaaccagcctcggacggtctatcgccgaagccttgggacgcaaatatgcccggatatccttgggcggtctgcatgacgaagcggagatacgcggacaccggcgtacatacattggcgccattccgggacggatcatcgaaaacctcagaaaagtgcagtcctccaaccctgtcttcgtgctcgacgagattgacaagatcggagctgattacaaaggggatccgaccgcagcactcctggaagtgctcgatccggagcagaacagtactttccatgacaactaccttgacatggattacgacctcagcaaagtactctttatcgctaccgccaacagcctcgattctatcccgcgcccgcttctcgaccgcatggaactcatcgagatgacaggctatcttgcggaagaaaaagtacagatcgccaagagtcaccttattcccaaacagctgtccaaacacggactcaaaccttcgcagctgaaattcaaaaatgctatcctcacacggattatcgaaggctatactcgcgagtccggagtgcgctctctcgatcgacagatagctaccgtctgccgtaagattgacatgaaacttgcgctcggagaagactacaatatctctgtcacggaggaagaccttatagactatctcggacaaccgcgcttctcgcgtgagatgtacgagaccaacaaatatatcggtgtcgtcaccggcttggcatggactcaggtgggaggtgaaatactctttatcgagacctctctctcgcactccaaaacacccactcttactatcaccggaaacctcggcgatgtaatgaaagagtcagccactattgccttgggatatattaaagcgcacgctgatcaactgggtatcaagcaaaaggatctggagacacaatccgttcatctgcacgtacccgaaggtgccattccgaaggatggaccatctgccggaattaccatgactacggcactcgtctctgccttcactcaccgcaaagtaagagccagaattgccatgacaggcgagatgactctacgcggaaaagtcttaccaattggtggggtcaaagagaaaatccttgcagccaaacgcgccggaattacagaccttgttctctgtgaagataaccgcaaagacgtaactgccatccctgagaaataccttaaaggcctgcgtttccattatgtcaaagagatagacgaagtgctctcgtttgcacttctctaacctcataccggtattacctcaagcacccgtcagtacggctcaaatattcagtggcattaccttaaaccatttaataccattacccgaaaacatccaatgccattacccgaaaacatccaatgccattacccgaaaacatttaataccattacccgaaaacatccaatgccattacccgaacagaaaagagatttgtcttcaattttgcaatctgagcgccccaaataccaccgctgcataatcttccactaaccgcccggaaagtgccgtagaatcaatattcacctatatacataacaccccttataatgcaacgtaaatacagcgattatacaataaagtaatacattattaaacataattaaaacacagaaatacagtgttttacactttttatatcactcaaaaagtagcaattgtataatacaaatatacagaaatagtgcattgcgtaaagcaatactttagataaaatacataaatgttgtaaatcagttagttataagaaaatataccgcgcgcaaaagcgcatgaatgcatattcattttgatgaatgaataaaatgagaatttcggctaccctactctgcctcaaattctgttgaaacaaagtacaacataccttacataaaactgctatgctaaaatcgtgccggaaatattgtccgcgttgcggaaaagaatttgtctgccgccatgaccaaccttctatctgccagtgcgcagcagtacagttgacaaaagaagtgcgcgcctatctaagcgcgcactaccaagattgtctctgtgcagactgtctaagggaactgtcgaacagcctgtctgtcgtcgagtagctttgtatgttatcgaagttatcgaactgcctgtctattgtcgaataacctctctcttatcagacgacctcttcaaacaagctttacaggacttaccaaaaagtcttctccccgtctctaccctaacagagcgtctgccagtgttttcagttcttcgagttgggattctttgagtgctccacggatggtgactgtaggttctacaacctctacattcttgcatccgccaagcatctctttcattactcgcacagcttgcggtgcccatgagccgttctctataagagccaccttcctgttctggaatcctttgagccggagcttgtgcaagaacatgtgcatcggcgggaaaatatctccgtcataggtagcacaacagagcaccagtctgttcatacggaaggcgtcttctattgcctctgccatgtcgtcgcggctgagatcggtgactgccactttgagagctttgccatccgccgacttcatgtcttgggtcttctccttgagtatctgaaccaactgttctgcagcccggcgtgtgttgccatggattgaagcataagccaccaatacaccgtcagtctctacaccataagcactccagattgtatagagccgcaatgcctcctctttcttctcgccctcaagcacaggaccgtgaagaggagctatagtggagatcgttttgccggctaatttcttcagcacgttcgacacctgcactccgtacttgcctacgatattaaaatagtaccgtcttgcctcacatgcccaatcgtcttcgtctgcatgatagacaccaaactttccgaatccgtctgccgagaaaagcacttgctcttccggacaataagtcatgattacttccggccagtggatcatcggagcggctataaactgcagcgttataccgcccaagtctatactctgcccttctcctaccacttgtacgttagcagcctctatgccaaactgggtcatcatcacaacggcctgtttcgagcacacgacagtagccttcgggtattgggcaagaaacgcgcccatggagccgctatgatcaggttccatgtgttggcacaccagatagtcaggttctcttccgtccaatgctttctccacgttctgcagccactgctctgtacagcgggcgtccatggcgtccattacagccacgtggctctcgccgagtaccacataactgttatagcacattccttccggaagttcatactggctctcaaacaaatccaagtcggcatcgtcacagccgacgtacttgatatttttcattataaggtgtaccggttattaagcttgggtgaactgatctttaccaacgccacacaacgggcaaacccaatctgcgggaagatcttcaaaagccgtaccgggagcaatgccgttatctggatcacctgctaccggatcatactcataaccacatacgtcacaaacatattttgccataattgctcggcgataattcctcctcgccgtgggagggaataaagggttaatactatttctatttttagattttcttatttgtttctttgcctgatagcttcgtagatgaacacaccggcggcaacggatacattgaggctctctataacacccgtcatcggcaaccgcacctggtcggtacagagtttgaggttctcctcatagatgcctttctcctcgcttcccatgacgatacaggttggcagggtcatatctacctctgtatagttcctttctgtgtgttcggtggcagccacaatgcgtaacc

SEQ ID NO: 1061 - DNA, 24641 bp, synthetic construct
  misc_feature 1..24641: note = Synthetic
  source 1..24641: mol_type = other DNA
gacagtaaagctgctaattcttaaataatttatatttttgcaaaaaaaatcaagattatggaaactttactgccttacgcactgttgtgccttacgtcaatcttcacacttgccaacccgcttggcaccatgccggtattccttacaatgacccacggcatgagcgacaagcagcgccgctcgatagtcaagcgcgccacgataacggccgtgctcatcctcatcgtgttcaccttcgccggccagttcatcttcatgttcttcggcatatccaccaacggattccgcatagccggcggagtgataatattcaagattggctacgacatgctccaggcacgctacacccacgtaaaactgaaccccgacgagataaagacctacgccgacgacatatcgataacgccgctcggcatacccatgctctgcggccccggcgccatagccaacaccatcgtgctgatgagcgacgcccacaccatcacaatgaaaggcatacttgtaggctcgatagccttcatctacatactgacgtacttcatactacgggcctcaacacgccttgtaagcgtgctcggcgagaccggcaacaacgtaatgatgcgactcatgggcctgctgcttatggtgatagccgtagaatgcttcgtgggcggcatgaagccgatactcgttgacgtgataaaatctgccgttggatgacggaagcgcacacggcaacaaatacaacacgacggctgcaggcggacgatgactcgtccgcctgcagccgttcatgcaccagcctgccagcacggcggcacgatgccgtggcaacgataaacgaaggcggcgggaaaaggcatgacaaaatatcaaatcaacacaaataaaggcataatcattatcaatacacataatttattttgcttttatgaaaaaaataattatttttgctggaaatactaataccaaggctaaaacatcataccaaatatcacaaaccataagccgatgggataaaacgcaaaactaaaataacatgaagaaactcgtactttttacagcaatacaattacttgcagcaacagctgtcatggcacagccgccggggatgtccgggctgacttcagaccaggggaacgacgaactgcctcccgaaataatatacaaagcccctgaagggaatacgatatactacaaagaggcatacgaaggtttcatgtactttggggatgactcaggaccggaacacgtgcaggacacgtcgaccaacaagattgtatggtgcggcaacaatgaggtgtacatcaataatccagtggccgcctacaacacaaacgcattcgccaagggcacatacgccgacggcaagataaaggtagagctgccgcagtgcataggctactactatgaccatgacgaaacaatacggaaactttacctgaacaagttggaggaagtcgaacaggacggggagaaacattacatgatctgctaccccgaagacaactacatagaatacaatgtggacgatacgggaaaagtaacgctcgatattggcaatacgggcgactacgacgtcacaaacggtgaaaacccgccttacattgtaggcgtaaccgacggaaacgagccccacaccatccaggcatggacaggttacggggacacgtaccagacatggaacgtcatcgacaacggcgaacccgtaaccccgccggacggcgccgtgatgcaggagtgggccttcgagacacctgacgaaaagtcaataataaaagtcgctgttgacggcaacgacatatacattgaaggattcacatcgtacatgaagggctactggttcaagggcaccatggaagacggcaagataacattcccgacgaaacagtacatgggcataaacagtgattttgacatgttcttatacttcatggcagcaaaggtatcaaccgaagaaacatcccaatggaaacagtacgagccaatcgacaaggtgacgctcgtctacaatcccgaaaccggcaagtacacggcacaggaggacgaagccttcataataagcacgagcaatgaggaaatctcggccatgtacgttgccgaaaacccgtcggtatggaaacaaaaccaggaaatattcaaggccaaaccacttaatccctcgttggaagactacaagtcaaaccccaatgtcagcacgattgtatggaacatccccaacgagaacgaaaacggcgccatactgccgggcaagaacatgtactacaacctatacgtggacggcgagctgtacactttcacacccgaaaaatactcgctgttcaccgaacctaccaccgacgtgccatacgaagcggtaaactattacgacattgacttcttcggaaccgtacgcgtcatctacctcaagcaaagcgtaaatgaaacggtaggactccagtcgttctacgtcgacgaggacggcacaaaatacgcttcagaccttgtcaccgagaacgtgctcgacaccggcatcggcaaggtggagggcggcaagcaggccgtaagcactgaatacttcaacctctccggagtaaagaccaccagacctgcagccggcatgtacataatgaagaccaaatacaacgacggcacaagcagcgtgaagaaggtgttggtaaaataataccgtttaacatacaccacgataaaagccagccactgacggataaaacgccagcggctggcttttttatggaaacggcacactgtttccattttacaaatttcaccatttcccaaatttaatcatcccactgattaaatcatcttacagatttagccatcgcacaaatttaattattttgcaaaatcaccatatatcacagcccttagggctggactttacgtaaccgtgggttgccaaacccacggacaactacgcccaccttcatacacccgaagtggtgctacccctacttttaaccgtcaaaaatggaaggctcgacatggcagcctaacactctgccagccttaatataagcctaagcgaagtgtcagacgacgatgcctgccgcaacggcccataacggtcttaaaatatgaaagtgaacaagagcaccttgcaagattaaaaattcatgttttttaatagttcttgtaaacaaataatcaataattcagataaaataaacaccaattcatctttttattcatatttatttgtaattttaaaaacaattaattacttttgttctataaatatcaacaaactgtaaatacaatataagtataatatataaatcataagcctatgacataacacactcacttccacccttccgccacagctggcaccaaaagcacaggcggcacacttgccacaaggcaagaacattcaaacagaccacggatgaagacgccgaactaagacaaaaggcaggcgccgtcccacatccacacttggccacatcaacaactgcacaatcggggaaaagcacttaaaacaacaaaacatgaagaaatcattacttttttcagcaatccaattacttgcagtaacaacagtcatggcgcagccgctagggatgcccaagcttgttcccagcaatgcatacgggcaagacccgactgacataatatctcaggcgccggaaggcgagacaaaatactacaacgagtcatacgagggctgggtgttctggggccaggagtatggcctgcaatacatgtcgggcacgacgaccaacaagattgtatggtgcagcaacggcgaagtgtacatacagaacccagtggccaactacagcaccggcacattcgccaagggcacatacgccgacggcaagataacggttgaacttccgcagtgcatcggctcatactacgacaccgacggcaccatgaaggacatgtaccttaacaagctagaggaagtggaacaaaacggagagaaatactacatgatttgctatccggaagacaactacctcgaatacgatgtggacgatgccggcaacgtgaagcttaacctcggcaactcagccgactacgacgtcactacaggcaacaaccccaaatacctcgtaggcgtgacatacagcaacgagccacacgccctgcaggtatggtctggatacggcgacaccttcgagacatggaacatcattgacaacggcgaacccgtcacaccaccggccgacgccgtgatgcaggaatgggccttcgagaccctgggcaagaagtcgatagtacaggtggccgtagacggcaacgacatatacgtagacggattcacatcatacatgaaaggctactggttcaagggcaccatggaagacggcaagataacattccccaccaaccagtacatgggcaagaacgagtgggaccagttctactacttcatggcagcaaggatcttcgttgacgaaacatccgaatggaaccagtacgagcctatcgacaaggtgacgctcgtctacaatcccgagacaggcatgtacacggcacaggaagacgaaacattcatagtaagcacgagcaaagaaaacatctcggccatggccatagccgaaaacccgtcgatgtggcaacaaacacctgaaatgttcaaggccaaaccgcttaacccatcgctcacaaactgcctgaacaaccccggcataagcacactggaatgggacatacctaacgagaacgagaaaggcgcaatactttcaggaaacaagatgtactacaacctctacgtggacggcgagctgtacactttcacaccagaggaatatccgctcttcacagagcccaccactgacgtgccatacgaagcgtcaaactattacgacatctatgtgtacaacacatcgcacacaatttacctgaagaaggatatagccgagacggtagccctgcagtcgttctatgttgacgaagacggcacaaaatacgcttcagaccttgtcaccgagaacgtgctcgacaccggcatcggcaaggtggagggcggcaagcaggccgtaagcactgaatacttcaacctctccggagtaaagaccaccagacctgcagccggcatgtacataatgaagaccaaatacaacgacggcacaagcagcgtgaagaaggtgttggtaaaataataccgtttaacatacaccacgataaaagccagccactgacggataaaacgccagcggctggcttttttatggaaacggcacactgtttccatcttacaaatttcaccatttcccaagtttaatcatcccactgattaaatcatcgtacagatttagccatcgcacaaatttaattatcttgcaaaatcatcatatatcacagcccggagggttgaactttacgtaaccgtgggtttggcaagcccacggacaactacgcccaacccatgcacacgaagtggtgctacactctgcttccggcggcaaaaaacggttctaaaaatcgtaagcaagcaaacacgagtatattctttcatattttaacaaaacaaggcttacgatttgacatttttccggcaaagttcaattttttatatacaaatacactatttttcataaaaatattttgcagttattaaaataatgtttacttttacggtgtgatatataacatttcattatcaaacagacgtccaacattaaaaattaaagccttatgagaaaaacttacttcactttcatcgccgcactcatgctctcttcagcatcattcgcacagcagtatgaatacaagctgtctgaaatgaactcaaagtatacgcctgaatactataagtacatgtacgacgaggacaacggccgccttgacagcacggcacactactacgaactcgacggctacgtttacgacaccggcaacaagtatgtctacgacgagcagggcaacgaggtgctcgagaagggctaccagaagttcagcggcgacgacttctacacatactccacacagataaggtacacctacgacgagaagggaaggctggcaagccgcaccaacttcaacctcgacttcgacggctccgacttcctgctcggcggcgtgtacgagtatgtctacgaaggcgacaagctggtgcagcgcaacgcatactgggacgaagagcgcacagacaagttcgaggaagccatatacacctacgacgagaagggaaggctagacgaggagaaatactactcggcgttcttcggcggcgagatggaattctcgaacggatacaagtacgtatacgacgacaaggacagggtggtggaaaagctgggcaccatgctcgaccttatgacatacgaaatagttgaagccggcggcgaggtgttcgaatatgacgccaacggcaacatagaggaatggtacaagtacaacgagtcgaaagacgacgtgacacagcgcgagctttacaccttcgacacagccatcgagtcggcaaagacgctctaccccgtagaaaacgaatgggacggcaccgtgtacctgaactcgaccaacgccgtacttaccgacaccatctactcaagcgactggtttacgggcgaactgggaatctacgacgtgtacgaactgaaatacacgcccgtgacgccgaccggcatcggcaccgtgcgcactaccacaaccgacatggttcaggcaagctatgaaaacggcacggtacgctttaccggagtaaaggacaacgagcaggtacgcgtgtacagcacatcgggcctgatgatgaacatgaagcgctacaacgcaaaagacggcatcgacatgagcagcctgcccgcaggagcctacataatagcgacaggccgcggctcggtcaaggtatggaagaaataaataaataccctctcataaataaaaaaccaacgtccgcagacgtaccattacatgtaatggataccgtctgcggacattatttttatatcctgattccatatccggacagccaccggccacaagcctcagcccggagccgcttgtgacacctaacggctgcccgaagccttgatataagcctgggcgaagtgccagactacgatgcctgccgtgaccgacacgttaagcgagtgcttggtgccgaactggggtatctcgaggcagccgtcgcaggcgtcgacgacgtcctggcgcacgcccttaacctcgttgcccagcacgacggcgtagccctgtccgccctcaggctcaaacctgtcgagcatcatgctgccctcgcactgctcgacggccatgacccttacgccgcgcccctgcagctcccttacggcgtcgagcgccgaagcgaagtagcgccactccacgctgtcctcggcgcccagcgccgtcttgtgtatctcgggatggggcggcacggccgtaatgccgcacagccacacggcctcgacgcggaaggcgtcgcacgagcgcagcaccgacccgacgttgtacatgctcctgacatcgtcaagaaccaccgtcagcggcatcttctccgaactcttgaactcgtccaccgtgagacggttcatctccgtaaccttcaatttacgcatggcacttaatttaattgaaaaccagaaaacacaaacccacgaatcacaacttcatgaaacggagttagacgcaagccaattgcgaactatgaattataaattgtgaattatgaattgtgaattatgaattatgaattacgaattaaacgccaaagcgtacaccttaatctgcttgaccattgccagcagaccgtttgagcgcgtaggcgacagatggtccttcaggccgatgcgctcgatgaaatacaagtcggcgtcaaggatttcctgcggcgtatgcccgctcagcacgcgtatcagcagcgctattatgcccttaactatgagcgcgtcgctctccgccgtgaagtttatcttgccgtccacgtagtccgcctgcagccacacgcggctctggcagccgtcgatgaggttgtcctcggtcttatacttgtcgtcgagctgctgcaagtcattgcccaagtcaatcagcaactggtacttgtccatccagtcggtaaagtcagcaaactcctctattacctcgtcctgtgcttcgtttattgtcataatctttatttttttatatattcgtcaattatccgccagcgtccaagaagatacattttgcaagatcaaaagcaacctttcagctcctgaaaagcaacgtcatacagcttatctcctttaactaacctgacacgtaaaacttaatacttcggtttctccttaactatcttgaacagcttgtcgctcgggcgcaccttgccgggcaccttgaatgccacgcgcgtgcccttctgggccgtctcaacggcgtgcgtgtcgtcgtgaatctcctcgacggttacgtacatcacgcccgtcgtgggacccgttatcagcatcttgtcgcctaccgagaactcgcaagcctcgcacgagaattccgccacgcccagcttggagaaatacttgacacccttgcccacgtacaccttgcgctccgtagcgttagagccatagttcttgttccactcgccaaggcgctgaccctggtagtatccgtcccagaagccgcggttgaacaccgtagccaggcgctcgtcccactggtccttcttctcctcggtgaacgtcccgtccagtacgctccgtatggcttccttgtagcatttcaccaccgtgtacacatactcaggcccgcgcgcacggccctctatcttgaacacgcgcacgccggcccgcatcatgcggtcgatgaagcgcaccgtcttcaggtccttcgggctcattatgtacttgttgtcaatctcaagctccgtgcccgtctccttgtcggtcacgatgtacgagcgccggcacagctgcatgcactcgcccctgttggccgagcgcgccgcgttgtccaggctcaggtagcacttgccgcttatcgccatgcacagcgccccgtggcagaacatctctatgcgtatcttcctgcccgacgggccgcagatgttcatctgctcggcctgctcgtgtatgcgtgccacctgctccatgttaagctcgcgcgccagcaccaccacgtcggcaaactgcgcatagaacttcagcgcctcgatgttgcttatgttgagctgcgttgacaggtgcacctcctgccccacctcgcggcagtacgtcatcacggcaacgtcgctcgctatcaccgccgagatgccggcctccttggcggcgtctattatctggtgcatcagctcaatgtcgtcgtcatagataatcgtgttcaccgtcaggtaagtcttgacgccccgctcgccgcacgtcgcggcaatctcgcgcaggtcgtcaacggtgaacgtgctggccgagtgcgccctcatgttcagcttctcgatgccgaaataaatagagtcggcaccggcctggagcgcagcctgaaggctctcgcggctgcccacgggcgccattatctcaaattcgtcgattctctctttcatcattcgcattaacctatttaactacggggcctgcggccaccgctcctaccataatcaaaaaatccccgccgttaaaggacgacggggcaacctaaatgttttcacaacggaataatccttattgtgatttgcttaaaattctgacggcaaagatacacataataaataagaactcaaactcttttccggatttttatcatattatagtaatgtaaaaataacagcctgcaccaacagccttgcctctcgtaacttaagaccgttacaccagcggccataaacaccaaagccaagcacatgtaaacctttaaatatttccttattaccttcccctttttccactttttacccataaaattactatctttgtaatcagactccagaataacacgaaacgcagacaatccatgaaaacccaatacgccggacacaagggcaagaacatacctgacgacaccaaaaccaacccctgacaatgcaaaataacgcccttgcccggcaacaggactattcaaatatgcacagaaaataataaacactaattgtgaagcctgcaccagcatgcttcaatataaaaacatacttatgaaaagaatactcggactagacctcggcaccaacagtattggttgggctttggtgaaagaaaaagagaatgataatgaaactgttaacgacaacatgattattgccgccggtagcagaattattcctatggacgcatctattcagggcgatttcgaaaaaggtaactctgtttcacagacggccgacaggactaatgcaagaggcataagacgactgcttgaaaggcataagctgcgccgcgaacgccttaacagggtgcttgatgtaataggttttttgccagaacattattcagcagccataacacgttacggcaaatttaaagatgacgacggatgcaagatagcttggaaaaaagataatgacggtaaatggactttcgtatataatggctcgttcaacgaaatgcttggcgatttcaccttgcaccagcctgaatggctggcagacggaaaaaaagtgccatacgactggacaatatattatctgcgcaagaaagccctgtcgcagcctcttacaaaacaagaactggcctggctgctgctcaacttcaaccaaaagcgcggatattaccaactgagaggagaggatgagctgagtgaagataaaagcaagcttgtagaatattacgcgctgaaagtggtcggcgttgaggacacgggcgagaagaaaggtaaggacacatggtttaacatcatgcttgagaacggtatggtttatcgtcgtccggccgccgtggctcccgattggataggcaagaccaaagagtttatcgttaccactgaccttgaaaaagacggaacgccgaagaaagacaaggagggaaacatcaagcgctcgttcaggatgcctaaggaagacgactggactctgataaaaaagaagacggagaacgacatcgacagatctggcaagaccgtaggcgaatacatttacgacgcactgttagccaatcccactcagaaaataagaggcaagctcgtaagaacagttgagcgtaaatactataaagacgaactcaagaagatacttgaatcacaaaaacgctttattccggaacttaatgacagggcattatacataaaatgtatagaagagctgtaccggagcaacgacgcttacagaaagtccatcgaattattcgacttcacttatttgtttatagacaacattattttctatcagcgcccattgaagagcaagaaatcgctgattggcaactgcccgtatgaggaacataattatacagaaaagggaactggcgaggtaaaaacagctcccgtaaaatgtatagccaaatctaatccaattttccaggagttccgtctgtggcagttcgtgcaaaacataaggatatacgaacgacagaagaaggttggcgacagcgtgaaaactgatgtagacgttaccgacgaatttataaagagtgctgacgatgttgtggccatattcgacttcctcaacgaccgcaaggatataacccagaacatacttctcggcacattcttcaagataaagaagcccaagggcaaggacagcgactatccttaccgctggaattatgttgaagacaagacttatccgtgcaacgaaacccgtgcacagatacttaaagggctgaaagatgccggcgtaaacgctgctttcctaaacaaggacaatgaataccgcctgtggcacatcctttattcggtagaagacaagcaggaaataagaaaggccatggataaatttgccacggctaacggactcggcgaaaagtttgctgaagttttcagttcattgcctccgttcaagaaagattacggctcttattcagaaaaggctataaagaaactgctggcgcttatgcgtacaggcaggtactggagtgcagacgccattgacaaacacacacttgaacgtattgacaagattatcagcggcgaatacgacgagagaataaggacacgggtaagggagaaggcgataaacctgacggatgtatcacatttcaaaggcttgcccctttggcttgcctgctatatcgtctacgaccgccacagtgagtcgaaggatataacacgctggaactgtccggccgacatagaccaatatcttgaccactttaagcaacactcattgcgcaaccccattgttgagcaggtggttacggagactttgcgcaccgtgcgcgacatctggcggcagtatggcaagatagacgagatacacatagaaatgggccgagaaatgaaaaatcctgctgatgtcaggaagaagatgtcaaagcgtatgactgaaaacgagaacgccaacctgcgggtaaaggccctgcttaccgagtttatgaatcctgaattcggcatagaaaacgtacgcccatattcgccgtcgcagcaggagatgttgaggatatatgaggaaggcgcgttggaaagtgtcgatgaagtgcccgacgagataagcgagataataaacaaattcaaccaatctgacattaagaaacgccccacacacagcgagataatgaaatataaactgtggctcgaacagaactatcagtcgccttacacaggacgcaccatatcactttcgcgtctgttcactgacgattatcagatagaacacgtaattccgcagtcgcgctatttcgatgattcaatgtccaacaaggttatatgcgaggcagaagtaaaccagctcaaagacaggatgctgggctacgaattcataaaagcacaccacggcgagaaagtccacatcagcatgggcgagcatgtaaccatactttcggttaaggaatacgaggaactggtgcagaaaaacttcaaaaagaatcctgtgaagatgaagaaactgctcatggacgacattcccgacaagtttatcgaacgacaaatgaacgacagccgctacatcagcaagaagatgaagtcgctgctctctaacatggtgcgcgaggaaagcgagcaggaagacatatcgaggaacgttataacatgtaacggagcgataacagacaggctgaaacgcgactggggcgtgaacgatgtgtggaaccatataatattgccacgctttgaaaggctcaacgccattacaggttcagagcggtttaccacaacaagcaccaacggccacaccatacccaatatgccactgaacctgcaaaaaggatttaacaagaaacgcatagaccaccgccaccatgcaatggacgcaatcgttatagcctgcactacgcgcaaccacgtaaacctgctgaacaacgaggctgccatgtccaagaacaatgccatgcgctatcagctgtcgcacaaactgcgccgttatgaagacaccgtagtaaccagaaacggagaacagcgcacagtctgcgttgcgcgcgaatttcttaagccgtggtcttcgttcaacgccgatgtggagcaggctttgcgtggcatagttgtcagctttaagcagaatcttagggttattaacaagactgtgaacaaatatcagaagatagtctacaacgaggagaaacatataaaggaaaagaagatagtaaggcaggaggaacacaacggcaaacaccttcttgccatacgcaagccaatgcacaaagacacggtgtatggcgaggttaacctgagacgcatcaaggaagtgtcgctcagggatgccgtggctaatcctaaggccattgttgacaaagacctgaagaagaaaataatggcaatgaaagagcttgaccacaatctgaaacaaataaccaagtattttgaagataacaaagacgcatggcaggacgttaatctcaagaaaataaatatttattatttcacaaaagagacaaacgaccgatacttcgccacacgcttcggcaacgaccttgtatcactgttcagcaagacaacaaaggccgatgacgcagaaaaactgatagacaaaataaccgataccggcatacagaaaattctgctgcgccatcttaaagccaacggcggtgactgccagaaagcattctcggccgacggtatagatgagatgaaccgtaacataacacagcttaacggcggcaagccacacaaacttgtctataaggtgaggatatatgaaaaggctgacaagtttgccataggcaataaaggcaacaagtctgcaaaatatgttgaagcagccaagggcacaaaccttttctttgccgtatatcagaaagaagtaactgacagcaagacaggcgaaacaacaatgaagcgggtgttcgacactatacccctaaagaccgttatagatagactaaaaaacaaacagactcctgctcctgaagaaaaagacggagccaaactgctgtttgtgctttcgcctaacgacctcgtttatctgccaacgaagaatgaaataaaaagcggaactataaagcggcctttagacaagagcagaatttataagatgatttcatcttcaggaaatcaatgtttctttttaaattacaacgttgcatcatccattattgacaaatttgaattttctcctttaaataaaatggagcgcgccattacaagcgaaatgataaaagaaacatgtattcctattaaagttgaccgcttaggaaacattacagaaataaacaacgaaaagatatgataaagcgcacactatgtttcactagtccggcttatctctcgctcaaagacgggcagctcttgataaagctgcccgaagtggagaaaagcgaactgcctgaacgaatgaagaaggacagcacgagaaccataccggtggaagacatcggtgtggtagtgctggacaacaggcagataacgcttacgcacggactactcgaagcgttgctcgaaaacaactgcgccgtcgtaacctgcgactcgcgcggcatgcccgtggggcttatgttgccgctctgcggcaatacacttcagagcgagcgcttcgccaaacagattgaagcgtcgctgccgctgaaaaagcaactgtggcagcagaccgttaaagccaagatagacaatcaggcggctgtgctcaaaaatgttacggaagtagaaactggttgcatgagccgatggtcggccgatgtgcgcagcggcgaccctgacaatcttgaggggcgtgcggcggcttattactggaaaaatgttttcagtaacattaccgaacttgacaacttcacccgtggccgcgacggtatgccgcccaacaatctgcttaactacggatatgccatacttcgagctgttatagcccgctcgctcgtgtcggccggactgttacccacattaggcatacaccaccacaaccgttacaacgcctactgtctggccgacgacataatggagccttaccgcccgtatgttgaccgcctcgtatacgatattatttcaagacgcagcacagaagaatatgccgaactgacaaaagagataaagatgagcctgctctcaataccgacgctcgacgtaactgttaacggccgccgcagtccgctgatgattgccgccacgcagacggcagcgtcgctctgcaagtgcttcaacggtgaactgcgccgcatcgcatatccggaaatctgaataaaaagaactttacttattgcattttcagtaatggaccgattcagcgaataccgcattatgtggatacttgtattcttcgacttgcctaccgacaccaagaaagacaaaaaagcctatgcgctttttcgtaagaatctgcgccgtgacgggtttaccatgttccaattctcaatctacgtacgccattgtgccagcatggaaaacgccgaggtacacataaagcgggttaaatcattcctgcccgaatacggcaacgtcggtattctctgcataaccgacaagcagtttggcaacatacagatattctacggtcacaaaccgatagaaccgaacgcaccgggccagcaacttgaacttttctgattatcctatattactttattgcattgtcataaataaaaatccagccatatagctggatttttatcttatacaaacatcattttttattttctaattttctttgtatttatctttgtatcaaacatttacatctatcgtgatgtttgttactctgcaaagataagaattttaaagcaaatcacaacaatcagatgaagcgtgctcaacaagcaggtgatgtttgttactctgcaaagataagaattttaaagcaaatcacaacgcattctgattgcttgcctatctgttatgggatgtttgttactctgcaaagataagaattttaaagcaaatcacaacgctacggacatcataagataactcattaaggatgtttgttactctgcaaagataagaattttaaagcaaatcacaaccttacgtttgatttttcgttatctttgtgggatgtttgttactctgcaaagataagaattttaaagcaaatcacaactttatgtttgcttcgctctcatttggtattgatgtttgttactctgcaaagataagaattttaaagcaaatcacaacttaatgctttgttttaatgatgtcccacaagatgtttgttactctgcaaagataagaattttaaagcaaatcacaaccagctcatattcctttgtcaagtccttgtgatgtttgttactctgcaaagataagaattttaaagcaaatcacaactcttggataaagtcaaggcgtgcttcgcttgatgtttgttactctgcaaagataagaattttaaagcaaatcacaacagaaagaagttgcggatgtttatcagctcgatgtttgttactctgcaaagataagaattttaaagcaaatcacaaccgctgctcaacgtaccttgtactatgtaaggatgtttgttactctgcaaagataagaattttaaagcaaatcacaaccttgtcggtggttgactgtatcgccttttggatgtttgttactctgcaaagataagaattttaaagcaaatcacaactcaagcattgcgaaagggtgctgacgcaatgatgtttgttactctgcaaagataagaattttaaagcaaatcacaacccatccctcgtcattaagccacggtttttgatgtttgttactctgcaaagataagaattttaaagcaaatcacaaccacccacctaaacggatgatattgtttaccgatgtttgttactctgcaaagataggaattttaaagcaaatcacgacagcgtaaatccgggaaattgacactagatggtgtttgttgaacctggaaaatataaattatgaagctgatcacaataagttatttgtgatttttcatttatttcatatttgcctgaaccaacagccggccttaatgtcttgccagccggacaatggttaaggcttgcacggcgttgttgatgtatcttatccgtcactcagaagcataaaaaagctttccgacattaaagccattcctacttgacaagttcctccatctttgctttcagcgagcctttgccgtaaccgttccacatgcgcaccacctttccgtcaggcgatatcagcacgtaatgggggatgccttttacccggtagacggcggcaagccccgtgttacccttgcgcagctcgttccactggttgcccttcaggcctttccgggcaatgaattccttccagctgtctttgggatcctggcttatgctgactacttccatcctgtccttgtattgtgcggttatttcctccatttcgggaagcgacttcacgcaagggccgcagccctggctccagaaatcgagcagtatgtatttacccttaaactccgccagatggcgtatgtttccgtccaggtcatacaaatccccgtctaccatactgtcgcccactcccaccgtttcaggcaggttcagataggctgttatctcctgtccggcatccgtcgccctgtcctcgtcagacatgcgcgccgatagcgaacgtatcaagtcacggtgtccgaactcatggttccattgcaagaatgagctgtacaacttatacttatccagccacacggccgtaacaggagcctccttcatataatcaagctcagccaagtatatcaggctgtctgccggggcgcacagcgcgcgcagcgagtctattttaccccaatcaagcccctgctccttttcggcgcgaaacaggtcagcctcctcggccttccaccgcatcgatttttccctttctgcacgacacagggccatgaaaccggcggcagccttctgttcggcgatgtcgctatcgacactccacaacggcagcaaacggtctttgccggtcaccttgacacacttacccgactgcacccatacgtccagccacgcgcccgaaaaacctttatcgccagaaaacagcatcagcttctgtggaacctcgccgctgatcgagtcgctaaacaggaacttgccgtcagccaccgtgtccttgcacacggtcttaaacgtcctgccgtcttccttcaacaactccaccaccgtgccgtcagtcacattctccaaagttcctcttatcagatacttgccttcaggcactttcacagtggaagtacagctgcctaacataagccccgccgtgaggagcgtcattaccgcatttcttgctttcatgattatctttatttcttgccgcatgtttatgccttgcaaaggtagtgaaaggcgagcgcaatacaaaacataaaaacaatgtttttcgtttttattgccgagccgcatcctaccttattcaaaggtagtgaaaggcgagcgcaatacaaaacgtaaaaacattgttttttacgtttttattgccgagccgcatcctatcttatttaaaagtaaaagaacaacctcataaaaaggttgcatcattataacctttatggaatatttttatatttttgaacccataaaattactatctttgtaatcagactccgtaataacacaaaacgcagacaattatgaacaacacggaagacgcgcacagaaggatacttgacgacatcgaggccaacccgtcacgctacgaaataatgcagctgctcggcgacaagattcttagaatagacagcagcgacggcagtatgtggctctgccgtaacgacggcggcgacaggcggctgataacgctcgttgagcacagagaagtgaaattcctgaccgaagccgacatcgagccgtcagccatgcggctcatcaaacagcagtgcccatacctcgccttcaaggcccgttaccgcttctgggtcttcccgtttacaggcagcaaggcggcagtggaatggaccgtgcgccccgacggcagctactacgccgactccgacggcttcggcatgaccaacgacgaggaaataaccctgcacggattcatcaataccaaaggccggccgataggacaattcaggctgtacaagagaaaccggagatgaaaaaaggccgtaacgtgactacttacaaataagaataaaaaaatacagcagttacattacagagctaatcaaacgttgcttatatgctatttccattcatcctatataattagtttagaaatcttcatgttttagcttaatgtctgtaatcttcaccttcaatgcctaaatcacccttattcatagctttggcgatatctattttcaattcttcatcatagtctttgcctgccataaagctttttataatacgcaacaacaaatcttggtcaatatttgatgcagccacatggtaaataatggactccaatgtacgcatacaaatgcaggcatgccaacagtaatgattcttgtgcaaaaaatatgttccaagagtcagcgcaatacgcttgtttccatcattaaaaaagtgccctgagctgaatctatacataagataagtcagcttgtcggcaaatgtaggatagtataaatcgttttgtacaaaatcaagcgtagcatgaattccaccttcatcacgtactccttcaaatcctccatcactggcatctatcatgtcgccatagatttttaaggcttcatcatagtcaatgtaaacaatttcctcattcatcttccgcctgttttaagcgtttcagcacatctttattttcagctaagattcggtcgaaatctatcgatttgtcaccaataaaacgttcaaactcttcaggagttattgctctcaaataatttgcaatatttccatggtaagcatcacggaagctgtaatcccttgaagccatttttgtccgggcgtcatttatgtatggcttctgcatggggtgttctgcaagctcatcaattatgcatttcacctcttcaacagtaagacatctttttcttgctttatactgttcacgtatggcagctccaacgccattctcaaaggaagaaacgacaagtaagacttccgcatacaatgtatggcgaacattatctttattatccagctttaatatctccctatactcctttgcgttttctttgaaaatagccttataaatatagtctgtaattaaggaatatttgtagttggcatgcccgattacacactggctgattgccgacgtaagatttttccggtaattttcttctgcaatggcagctggtatgtaatttacatccctgcggttgatgtatttggtgccaccgcccgttttctcattgatggtagatataaccaaatccaacataatacttcgtacttgtttggctttctcgctttccgtaagcaacataccgacattcaaaaaagcacgaaaattaaacaggccaagctgggtggttttgctcgcctcatttataaggtgagcaaattgcaacttaaactctttcagcgacttacctttacataaaacataaccgttgtgcttcagttcctcaccatacgatgataaataacggtctatggtagacgtgtccactccatagaaatcggcaaccatctgtttagtaaacaagtactctccattgaaaagcataccggtaatgcctattttagattgcattttttctatggcaaagcggttgtttaatatgttttgcctatctatgttggatgttgttaagtccttcatacttatactaatttcaactgtttaagttacaaacaactattattcttttgggtaattcgattccaaatatccgttgtttcccaacaaacgtcttatctatctcgtggctaattaccttacatttaaggtatttgttattctgcaaagataagaatttttaaaataaggtgcaacaacacttatgcaattaatcataaaatgatattatccaaaatctgcatttaccttgcaataggcgcttctggtgttcccgttcaccggcagcatggcggccgttgaatggaccgtgtgccccgacggcagctactacgccgactccgacggcttcggcatgaccgacgacaaggaaataaccattcacggattcatagacaccgacggccggccgataggacagttcaggctgtacaagagaaaccggaaatgaaaaaaggccgtaacgtgactaccaattcacgatacggcctgctcttttttcagcttttagcttaaagcattcatcttatccagcaaatcctgataacatgccacttcataatacttcacatcggctgtcgacatcgaattaaataatttctctgcacagtctattttcgctttttctatttgagacagattcattgacaacaaagaaccctttgtctctgcaataaagaaaatatgctttacaccgtctttattcattgcgatagcccagtcgggagcatagttgccgactggtgtcggaatatggaaagtgcgcggcaacttggcataaacaacaacgctatccgcctcgtcaaggtcatgggcaaaatcacgttctcctttactgtccgtaatcacataatcagtaatatgtctcttagcttcataagcacggtcaaacggcactttgctctttactgtgaaaatactgctgtcatactttccctctgtcatgttgtaatggattgcctctacaatcattgccgacttctgttcctttattatcctgacaacattacggatgaattcttcagggttattcttaaacaaataaagtttgtttgacttaatacccttcaatatttttgccacagtacgcctggttagatttgcgcctttcgccacatcgccgacaaggtcgtaagccacggttgaagtacaaacttcagtcatttgatgcgactgcgaacgtgtatccccgaattctgttacatcattttcattctgcatgccttcaaccataacgtaacgcaactgtttcacttccagttctgcatttattttaagtattgccttctctatcagctcgttactgtcgtaacttacggtgtagacatattggtggtttatctctttccacaatttctggaactcggctttattgaaattatcgttcagtttattctcgggaattgacgttttctcttcaacaatcatatcgtcaagtgccttcgggtcaaatattgaatttatgagtttagttactccttctgctatcggttgcagtttcaaaggcaacggtgcaacggttttgtctgttacagcctgcctgtattcaggtgtaatgttaccgctttcgtcaacatatccgttgtcttccagataaactattatacgacttgcttccgattcgctgacagtgtgtatttcctcaccaactttgaattgcttgcctgtaaagtaagccaccgtagccttgaccgcacgttcacgaagcacctcacgggtttcacgttgtagtgcagccgtaaagtctgcataactttcattagctattacagtcagtttattaacttcatgcacatcgtcgcccaactgctcggcatccatgcgtgtgccgttcctgtcaacacagattcgcaaccctcgtccaacttcctgacgcttggctgttgtcgaatttgaatgacgcagcgtacaaatctgaaaaacattcggattgtcccatccttcacgcagggcagagtgagagaatataaagcgtgtaggctcgtcgaaactcaacaaacgttccttgttcttaagaataaggtcgtaagccgaaatatcgtcagacagtcctgtattcttttctatttttccatttgttacacggtttgtcttcttatctattgagaagtaaccacggtgaacttcctgtgggctgaaactaagaagataatttctgtaatcttcatcgaaaatctgtaattcgtcgttaagcagacgggcatattcatcctcgaatattttttggaacactcccttaacttcgttgccgtcttcgtcataactcttgtattttgccacctcgtcgatgaaaaacagcgacaggcactttataccacgcttaaacaactgacgctccttgacgaagtgtgactttatggtctcacgtatttgcacacgctgcatgttaagttcgttggtgtcgcctatcacttcgccacggtgaatagtaactccgttaaggaaaactacgtaaccgttaacatttatttctgaaactacaaatccgtcgtattcagccaaacctgattcttctttcagactatcgcctacgccaaactcttttatcttacggtctatgctgcctgaagccttctttacttctatctcaatgcgtgccacaggcggacgctttggcgaaagaacaatatcgtcaagatacatgtaaccgctcgttccgcgcaggtttttcacctcaaaacctttcacatgtatgcgcttcaccaacttttgcctgtatgcgtcaagcgcatccagcgcgtaaatagtatcatgcttcgtcctgtgtgttgccgaatagttaagcacaaacagcggattaaaccgcttcacaccttcctgcgtggctttgccttccatcttctgcggctcgtccattataattataggatagttggctgctattacgtctatcggccggcggctgccaaactcgtcacgctttgaatatataatacggctctccttgcttctgcctccctccttcatcgaggcggcaaatgcctgtgtgtttattatcatcacgctcagacctgaatctgacgaaaagctgtcaagctgctgaaggttcttactgtcgtacacaaaccaacgtgctttctttccgtagtattccatgaagtggtcttcaagcatgttgaagctctttgccacgccttcacgtatggcaatgctcggcactacaattatgtatttactccatccgtactgcttgttaagttcgaacatcgtctttatgtaaacgtaagtctttcctgttcccgtttccatctcgatgtcgaggtttacgctgcctgcaccatttgcaagcgcagtcgacggagtaatgtcatacaggttctgtaccgcatttatgttttttagcaatgccggcctgcttagctctatctgattattgcgataacccgtgtcgccgtcgtattctattttggtctgcttatactttccgaggtctctgcgatatttagcaaacccgtgcgaaggctgaccggcaaataccgcaacggtattttcaacggcttcggtttggtattgctgtattttaaacttgaatttcatagcaacttctctttaaagtattctgcaagttgtttccggcgaataatggcggaatatctgctcaaagttgtcaataacgttgtcgt

SEQ ID NO: 1062 - DNA, 24638 bp, synthetic construct
  source 1..24638: mol_type = other DNA
  misc_feature 1..24638: note = Synthetic
cagttatttcatttcaaaatatttcctcaaaattccagagaaaaacacattcatttggtttataattgcctttattgttggcgttttcggcacagttggtgatttagtcgaatcaaaattcaaacgaattgcaggaaaaaaagacagcggaaagataatgccaggacatggaggtgtcctagatcgactagatagtgttatctttgtagcaccaataatatttttattttatcaaattttaaattatgtttcataaagaaggaactcaaagtattttattaggcactgtttttacagctgtcgtttttttagcgtctgattatttcattcatacagaatggatccaaatgacaatcgaaatagtcactttattgctattgatcaccattttacaatttttcaggaatccaaaacgaacagtcgaaataaacgaaaatcacatcgttgctccagtcgatggtaaagttgtggtgattgaagaagtttacgaaagtgaatattttaaagacaaaagaattcaggtatctatattcatgtctccaattaatgtacacgtaacccgttatggattaagtggaattgtaaaattcagcaaataccatccaggtaaatttttggtagcttggcatccaaaagcaagtgaagaaaatgaaagaacaacggttgtaattgagaacaaaacttttggtgctatattataccgtcaaattgctggagcattggctcgaagaattgtaaactacgcccaagaaggaatgcaagtcgtacaaggaacagatgccggttttattaaatttggctctagagtagatgtatttttacctttaggaacaccaatcaatgttgtactgaatcaaaaagcaataggaggaaaaactataattgcaataaaatcttaatgattgaaaaagatttagatatacaatttcaagaagccgttgaaatagcttcgaatatgacacaggcgtcattaccgcaagatgtccaattgcgtctttatgcctattataagcatgcaacatttgacagaaccagattcaacatttcagaaaatgcagatttaagaaatgcttttaaaacaaatgcttggattcaaatcagccatcttacccaagacgaagccaaagaacaatatatcgaattaatacagtctttatcaaagtaattgtaatacccctatgaaaaaaaacacttttctattatcaagtttacttttcgtttctgttttagtttcttgtaataaaaaaaaaatgaccgaagttgttgaagtgccgctaccaacggtacaagaaaaaataacaataggaaacccaaatgatgtaaaagccagtgaaggttcttttcaactagaaaaactaccctttacttatgatgcattagctcccgatttgtctgcaattacattagaatcccattatggaaaacattatttaaactttaccaataacttaaacaaagcggttctaggtactgaacttgaaaatctaactattgaggaagttttaaaaaaattagatataaatgatcctgtaatacgaaataacgcgggaggctattacaatcatggtttgtattttaaatgtatcgattcaaagaaaaccggagaaccaaaagacactttagcttcaacaataacgaaagatttcgggtctttttctaatttcaaaacgagctttaaagatgctgcaaccaaacaatttggttcaggatggctttggctagtcgttgataaaactggcgtacttcaattgaccacaacgcaaaaccaagacaatcctttgatgccaaatgcacctgttgttggatttcacggaactcctattttaggtattgatctttgggaacatgcttatttcatagattatcaatacaaaaagaaaatttatattgatgcttttttcaatcatatcaattggaatgtcgttagcgaaaattaccaagccacttttaaaaaatagacaatacaaaaaaagctgataccatttaagtatcagcttttttttgcacaattaaaataattaatcaaactacaattgataaataaaggattctaaaggagctattgttattgatgctttcccttctccatttacaacttgtaattgagtggtgctttttccgtacaattgatcttttatagtgtaacttccatctttcaaattccacttaccaataatatcagctgggatttttaattcaaaaatatttgatgattctgatgaaaaattggtaactacaattaatttctgagtatcagaccagcgaacaaaagaataaacatggtttggatcatagcccaaagcggcttgacgatttacttcttgaagatcttgaaattgtcccattacagctgaactatgtccagagaaattcagtaattttttgtaaaaatcacgcaagtctttttcgctttgcgataatttccctccgtcaaatgcgccattgttcatccatctttgatgatttggcacgcctacgtaatcaaaaatagatgttctggaatgagttccgaaacctccattttcatttccagcctcccctacttcttgaccaaaatacaccataataggagctgaagttatcatagtagataccaccatcatgggtttacctttttctggagaaccggcaaaatcaggacttgccaatcgttgctcatcatgattgtccaaaaatttcagcatatgaacatcaatatcggctaatcctttttgaatataagacaatccatctggaggtgtttttccttgaataatggctttcaatttatcataagtctcaactttatcatacaaataatccattttacccaaatgaatataattgcggtattctttcggattgtacacttcggccattaagaaagcatcgggattggcgttttttatggctgagttcatataactccaaaactcataaggaaccatttcggccatatcgtatcgaaaaccatcaacacctctggctgtccaatacaaagcaatatctctgaatttaatccatgaactaggtacacttttacctttccaaaaggcataatgctctttgttagacaatttatcataacctactggcaattctggaaagtctttagaaccatcagggcgaattccgtagtttactttcaccgtttcataccaatcgtttttatctggttttgccaatcgagagccattaccagtccattttgcaggattttcgttaaatttaccatcaataagtgaatgagattccccgtttaaaggtttatttccatcaggcaattgaaaaggaatattgggtatgtaataaaaattattgtctcttttgtattctacagtaacatcatcatcgacaccaaaatctctcacgcctttaggattgctttttccttcatatttgcgtgcaatatgattgggaacaatatcgataataaccttcaaattggcctcatgtgtcctttttataagcgcttcaaactcttctaaacgtttttctggatttacagccaaatcagggtttacattataataatcttttacggcataaggcgagcccgctcttcctttgaccacttcagggtcatcatgagaaactcctattgcagtataatctcgtatcacagcatgatgaggaacgccggtgtaccaaacataagtaacccctaaattttttatttcacgcaacgcttttggagtaaaatcattgaattttcccacaccattttcttcaatggttccccaaggtttattggttgtatttttattcccaaacaatcgagtaaaaacttgataaactacttcctttttttcagaaacggtttctttcttttctgcgttcatttttacatctttagttttacaggcagttgccataagcaatatactcattcctgccacaaaggttgttttctttaccatattaatttattaaaaaaaattaaaagcattcttgataatctaattaatttgaattatcagtttataaatttaatctttttttgaaaattagatcactaaaaacaattctttgaaaccctttttaaggcaaaaacggcactataacgagatagtagaagacaatgtttataacttatattctcaatatttccggctgaattctaaaataaacagcataaattttgaaccatataagtcatataagttcatttaagctagaatataaaatagcgccgacttatatgttcttacatttcttatatggttaacttttccgtagcggtggttttctaattaactgtttgaaaagaaatgtaagtttaaaatgctgttctttgtagaattaatccatattttcaaattctataaaccaactctaattataaataaatcctaatatatataaggattgactcctttttcataaatttaccaaaaattaaatccattgaagaaatctttaaatttccttacttatagtttagtattcttttgtgtccatatcgttttggcacaagctcctaaaaaaatattaattgaacattctgactatagtgatgtagatcaagaaaaaatacctgacgcaatattatttactggaaatgtacgtgtaagccatgacggtgtagttcttacttgtaatagagcttatttttttcaaaaagaaaactatttgaaagcttttggaaatgtgcaattggttcagggagacactttattcctgaacagtaagtacgctgaatatagcgggcaattaaaaaaagcatttgctactggcaatgccgttatgagttctcctgatgcaactttggccaccgacaccatcaattttgaccgaaatacacaggaggttttttataatacccaaggaactattatcaacaaagacaacaccttaaaaagtaaatcgggcaggtattatgtagcgcaaaagaaattccagttcttaaccgcggttaccttaaccaacaaaacctacgaaattaagtccaatcatttggattattacagtaattccgggcattcctatttatttgggccatccaccattaccagtaaagccaattatatctataccgaaaaaggattttatgataccaaaaaaaatctggctcattttctcaacaaatcctacatcaaatacgatgaccgggtcataaaaggagatagtttgtattacgatcgaaataaggaatttgcctcagccacaagaaatgtgaaaattaccgattctgtcaaccgcggaattgtaaaaggtcattatgccgaattgtacaaaaagaaggattcgatgtttgtgaccaaaagagccgtggcagtaaactttgtagaaaatgattccgtgtatattcatggtaaaaaactgatggttaccggtaaagaaggtgatcgaatcatacgcgcatacaataatgtacgattttataaaacggatatgagcggaaaatgtgattcgatacattcccgatctaaaatagcattgacaaaattgataggaaatccaatattgtggaatggcgacaaccaaattaccggagatctgatgcatcttataggagacaatcatactcaaaaactggattcgctcaaggtattaaacaatacttttctcgtctcgaaagacacactcggaactggcttcaatcaagtcaagggacaaaatttatttggaaaatttcaagacggaaaactccatgatgttgatatcgtaaaaaataccgaagtgatttattatatgcgaaatgatgccaaagaactcatcgggatcaataaaaatgtaagtagcaagatcaacattctttttgataaaaatgcggtagaaaccattactttctttaaacaagttgatggagaaatctatcccgaagccgaattgcccgaaaatgccagaactcttcggggacttaattggcgtggagacgaaagaataaaatctaaagacgatatttttaccaaagaagagaatgacgaagaacttaaagtcgctgcagcaacggtaaaagacaaagccaaaaaagaggctccaatgaaaattagaaaggaaacattgaattatgacaagaagagtcggaagaagtagtcagtggtcagttttttagtggtcagtcgcagattgcatattgcagtttttagtcgtgacttataacattcatcttaaacattttaaacttttaaaccacttaaactttaaacattttaaactttaaacattttaaactttaaacattttaaacttttaaacccttaaacttctcaaaaaagtgaacccagatttcataaaataccaagcacaaacctctccttatccattgggtatggaagtttcgcatgcaataggctcctatattttcgacaccaacaataaaaaatatttagattttgtggcgggtgtttcggcttgtacgcttggtcatcaaaacaaaagagtcaatgacgccatcaaggatcaattagacaaatattcacatgtaatggtttatggggaatattcccaaagtcctgcagttgaatattgcaaattgatggcctcgctcctgcccgctcctttagacaaaacctatttggtcaattcgggtaccgaagctatagaaggcgccctaaaactagccagaagaaccacaggcagaagccaattgatctcctgtcacaatgcctatcacggtaataccatgggatcgatgagtgtcatgggattcgaggaacgcaaacaagtatttcgccccttaataccagatgtcgattttataaccttcaataacgaaaccgatttacaaaaaataactacaaaaacagccggaatcatcctcgaaacgattcaaggaggtgctggatttattgaacctcataatgattttctcaaaaaagtaagagcgcgttgtactgaagtaggagctattatgatcctcgacgaaatacagcccggttttggaagaacgggtaccctttttggttttcaaaactacgatgttgtaccagatatagtagtaatgggaaaaggaatgggtggaggaatgcccgtaggagcctttactgcctcatcagccatgatggatttattgagcgaaaatccaaagcttggacacattaccacttttggaggacaccctgtcattgcgtcagcctgcttggctactttgaaagaattaactgaaaccaacctcatgccagacgctttagagaaagaaaagctctttagatcacttttggtacatcctttgatacaagaaattagaggcaaaggattaatgcttgctgcaatgacagcaagtgcggatatcaccaatgaagtaatcctaaaatgtcaagacagaggtctcattttattttggttactctttgagggatgcgctatccgaattacaccaccccttaccatttctgaagaagaaattagagaagggtgcgctataattcttgaagtaatgaatgaagttatgatttaagattgatgattaacgatttctgaatgcagattttcagttcttttgtaaatcaaaaatcaacaatcgctaatcaaaaatcaccattcaacctgttaattaaattgttcacaataattaaaattcttcctcacaacaacagttcgatttcctatttttattttaggataatttaaaaacagacagcatgcaattaagcgacgaagaagaagagtataacttatccctatccaaatttgagtctatgttgaaaaccaacaaagtgctcttttttgactccgaggaatttgaagaaatcattcttcattatctcgacatgggtaagacagccttggccaaaaaagccctaaaactagcgctagaacagcaccctaaatcaaccggactaaaattagttcaagtggaaatgttgatctatgatgacaaactagaaatagccgaaaagctattgaatgagctttatgccatagaacccaccaacgaagagatctatattcagaaggcaaatatctgttccaaaagagaccaacatgaaaaagcggttgaaatgctgaaaattgcattagattataccgatgattatgctgatgtctacaacttaattgggatggaatacctttttatggataatcttgagttagccaaagaaagctttatcaaatgccttgaagaagatttcgaggatcaatccgccttatacaatgtggtgtactgttttgaatttcttgatcaaaatcaagatgctattgcttatctgaataaatacattgataaaaacccgtatagcgaaatcgcttggcatcaattgggacgtttgtattatggcgtaaaagaatacgaaagtgccatccgcgcatttgattatgccacgctgatagatgatgaatttctaggtgcctttatggaaaaagcaaaagcactggaacgtttaaaaaaatatgagcttgccatcgaaagttacaacagaacgatcgaattggatgatgccacatcatacgctctacttcgaataggaaaatgctatgagaaactaggcaacaaagttttggcattaaaatttttcaacagaaccgttcatgaagatccccttttagacaaaggttggattgccataaccgatttttacgttcgccaaaaaaacttccaaaaagcattgttttttgtcaataaagcattggctatagacaatcaaaaccgtttgtattggaaacgttttgcgaccataaacaaacagatgaacttctttgaagaagccgaattcggatatcgaaaagcagttgaatttggagattatcaactggacacttggttgttttgggttgatattcttcagtttttaggcgaatttgagagcgctgtccaaactttattacaagcatctgaatacttcccagaagaaaacgaagtagaataccgtttggctggtctgtattttatgctttcagacactaccaaagctaaattccatttgagtaatgccttgcgtttgaattttgacaactacgtactaattgaagatttgtttcctgtcgtttgggcaaaaaaaacggtgcgaaattatatcgacaaacataaaaaacaataatgattgaagtaacaagaaaacgttttggtttattaggtcgtaacattagttattccttttcaaaaggatattttacagaaaagttcagcaatgagcattttacagattgttcatacgagaattttgacattcctgaaataaacttttttactgaattaagaaaaaacaatacggatcttagcggattaaacgttactattccttacaaagaaacagtgattccttttttggataaattatcaaaaaacgcttctcaaattggagcggtcaatactataaaattcaccaaaaaaggaaaactaaaaggctacaataccgattattatggtttcaaaaaatcattggaacctttattgcagtcgcatcacaaaaaagcattgatcttgggtacaggtggcgcttcaaaaggcgttgctttcgccttagaccagttaaaaattgcctatacttttgtctcacgtgaggccaaagacaactctatcgattacaatagaataaacgccaccacatttgacaattatcaaatcattatcaactgcacaccggtgggaactagccctaatatcgatttattcccgcttatcccatacgaatactttacagacaaacacattgcttacgacttgatttacaatcctgcagaaacgcaattcctcaaaaaagccaaagcacaaggcgcacaaataaaaaatggattggacatgcttatttttcaagcagagaaagcctggaagatttggaataagtagaatagctgactcgttacaccttagatttataaaatacaaaagccctcaaatggaattccatttgagggctttctgcataaaaaaagcgacaaccgtgaggatgccgctttgaatgttttcacaacggaataatccttattgtgaattgcttcaaaattgtagtacaatgatacaacaaaagttttattatttgtatgtggttttccgtaaactaattaattttcttttgattaaatttagggattaatttacagttagagaaaatttatcaaaaatacagctataaaaatgaagaaaatattaggattggatttagggacgaatagtattgggtgggcgttaaccaataatgacttcgacaataaactaggaaacattgaaggattaggaagtcgaataatccctatgagccaagatgtacttggtaaatttgacagtggagtttctatttctcaaactgcggaaagaacaaaatatcgcggaactagaagattagttcaacgctttctattaagaagagagcgacttcacagaattctaaatatccttgattttctacctaaacattattccgaagtaatcgattttgataaaaagtttgggcaatttaaacctgaaagagaagaaaaattatctttttataaaaatgaaaacggtaaaaaccaatttttatttttagagagccaccaagaaatgctttctgaattcaaattaatatatcctgatttaaaaaaaatcccttatgattggactatttattatttgagaaaaaaagcattaacaaaaaaaatatccaaagaagaacttgcctggatattactgaacttcaatcaaaaaagagggtattatcaattgcgtggagaggaacaagaagaaaacaaaaataaactagaagagtttcatacccttacggttgtggatgtaattgaaagagaaaagggaaaatcaggtatatggtacaacgtgattcttgaaaacggctggatttataaacgtgaaagcaaaatcgcattatttgactgggttggtaaacaaaagaattttattgtgactaccgagttaaatgatgacggaactgtaaaactcaacaaagacaatgaagaaaagagaagttttagatctccaaaagaagatgattggggattaagaaaaatcagaacagaacaaactattaaccaaagcggaaaatcagttggttcttatatctatgatgaacttttaaaaaatccaaatcaaaaaataaaaggcgaattagttcgaacgattgaaagaaagttctataaagatgaaatatcgaaaattattaagacccaaatagaattccattcagctattttaacagatcgaaatctttataaaaagtgtattgatgaactgtacagacataatgattctcacaaaagtaatattaaagacagaggttttgactatttatttttagatgatattattttttatcaacgcccattaaaaagcaagacttctttgattagtgattgtagtttagaacacaggcctattaaagataaaaaaggtgttttagtaaaagatagtaatggaaagcaaattttaaaacctctaaaatgtattgcaaaatcaaatcctatttttcaagaattccgattattacaatttgtcaaaaaccttaaaatttttaaaaaagaaatcatagacgatattgatgtaacgattgattatttaaaaacggaagaggatttagtagaattattcaattggctaaatgataaagcagaaatcagtcaaaaacaatttttagcctattcaaaattcaaattaaaagaagataaattcagatggaattttgtagaagacaagatctatccttgtaacgaaaccagaaatcaatttttgaatgccatcgtaaagattgatgtagataaaactttttttgatgccaaaaccactcaagatttatggcatattttatattcggttactgataaaatcgaaattacaaaagcaattaccacttttgctaaacgacataatttacccgaggaatttatagcaaatttttcaaaattaaaaccttataaaaaagattatggctcttattcagaaaaagcaataaagaagttattgactttaatgagaagagataaaacttggaatgaagatgctatttctaataaagttacagcaaaaataagcttcattaaagaaagattagaatctataaattatgacccatcaattcttgaaaaagtatctgatagcgacattcctaaacaagttttaaaaagttttataaaatgtactgaattcaataaaggcttaaatacctaccaagcatcttatttaatatacgacagacacagtgaagctagtgatatttcaaaatggaaaactcctgcagatattgagtcctttttgaaacacgatttcaaacaacattccctccgaaatccaatagttgaacaagttattacagaaactttacgagttgtaaaagatatttggcaacattatggagaaggtcgagaaaacttctttaacgaaattcatattgaattaggtcgtgagatgaagaataatgctgcggatagaaaaagaattactgacaatatcaatcaaaacgaaaatacaaacttacgaatcaaagccattttaacggaattgaaaaatgatggagttaatgatgttcgcccttattccccaagtcagcaagagattctaaaaatttacgaagaaggagtttatagtagtgaaaacagaaaagaaaaattagaagacattgagaaaattaggaaaaatgcgaaaccaacaacttctgaaattatcaaatataaactttggctggaacaaggttatatttcaccatatacaggaaaattaattccattaagtgatttgtttactacaaaatatcaaatcgaacatattatcccacaatcaagattatttgatgattcattatcaaataaagtcatttgtgaatctgaagtaaatgatttgaaaggaaataagaccgcattagaatttatcttaaaaaacgaagatagaattgtaaccctaactggtggaaaaacagttaaaatattcactaaagaatcttataaccaacacatcactagctattacagtaaaaataaaaacaagcaaaaaagattactaagtgaagaaataccagaaaaatttatcgaaagacaattaaatgacactaaatacatcagtaagattgtaaaaaatcttttgagtaaaatagttagagaagacgatgaacaagaagtaacctcaaaacatattgtttccttaaatggttcaataacttcaaaaatgaaacaagactggggcttgaatgatgtttggaatcatattgttacgcctcgttttgaaagactaaatgcattaacaaacagtaataagtttgggaattgggaaaacaaatttggaaaaaatgtttttcaagcaacagttccagatgaaatagccaaaggattttctaaaaaaagaattgaccatcgccatcacgctctcgatgcattggttatagcttgtgtaacaaaagatcacgtaaattacttgaattcaatgaactccgagagaaaaaactattcattggtttctaaattaagagttcaacaagaacaaattataacaaaagacaatcacgacggaacactttgtgaagaaaagaaactaatagctaaagaatttcataaaccatggactaacttcactaaagatgctaaagacatactaaatcaaaccatcatcagcttcaaacaaaacactagagttatcaataaagcggtaaacaaatatcaagtttggaaagaagaagatggcgcaatgaaaaaaatcacaactaaacaagtaaaaggagataactgggcgattagaaaaccaatgcacgcagaaaccgtgagtggaaaagtatttttaaagcgaattaaacaaagtcatattactattgcaaatgctattgaacaaataggattgattgttgacaaggaaattaaaaaacagctagttgcaaaaatcaagcaatatcctaataatagtgatggtttaaaaaagcacctcaaagcttttcctgtaatgattgatggaaaagctattgataaagttcaaatttatgaaaccatagaggccacagctactagagaacgaaataatttagatattacgtttgatgaaaaaaagatagaaaagataacagatacaggaattcagaagattcttttaaatcatctgaaacaggaattgtatcaaaatgcaatagacgaaaatggaaaaaagatagctccacatgaagtagctttttcagaaataggtatagatgaattaaacaaaaacattatagcactcaataatggcaaaaatcaccagcctataaaaaaagttcgtattttcgaagaaagtaaacgattttcacttggacagacaggtagaaaaacagataaatatgttgaaaccgccaaaggaacaaacttattttttgcaatttatcaagatgaaaacgggaaacgaaattataaaaccattcctttcaatgaagtaattgaaagacaaaaacaaggattatgttctgctctagaaatagatgaaaatggaaattatcttttatttactctttctccaaatgatttagtttatgtacccacagaagacgaaaaagaaaacataactacaattaattttgataaactatcaaaagagcaaacagaacgcatatataaatttgtaagttgtactagtggagaaggtcattttgtttctaataattattcaaaagaaataatttctaatgaaaatggttcaaataataaaaatgaacgaatgcttgaatttaacaattcaaatactatttatgatgaaaaagaaaaaccaataatgattaaatccgtttgttggaaactagaaattgatagacttggaaaaattaaaagaaacatccgataataaattattctttcaaaaatcaataggattgggctttagcccattcaaataaaattagtattaagcacaaaaggctttagcaaaaaaacatttcggctaaagcctattcaaatcaaaatatattaatcccctccagctaaagctggaggcaattcaatcccgataattatcgggaggaggcaattgataaaacagaaaattcaaaaattataagcaatttaaaatacaaattatgccttatatcaaaacctacatccattttgtttggagtacaaaaaacagaattccttttttggacagcaaagaattaagacaaaaggtttggcatcatattaaagaaaatgcccaagagaaaaggatttttgttgatcatgttaatggatattcagatcattgtcattgtttgatttctataggagcagatcaaaccattcaaaaaattatgcaactcataaaaggggaatcttctttttggattaacaaaagtaaattgtgtttagctaaatttgaatggcaagatgaatattttgccgtttctgtttcggaatctatgcttgataaagttagaaattacattagaaaccaagaagaacaccatagcaaacaaacatttgaagaagaatacaacgaatttattgctaaatataaatttcaaaaagaatagaatttggctaaagccatttacattattatcatatcccccctccagctaaagctggaggcaattcacaattcaaaagttggaggtaattcaaaagttataggattcaataggattgggctttagcccattcaataaaaaaatgagtttaaaaggctttaacctaatgttttagtgaattattttcatttataaacagctgattataattttgtaaattcaaaaaaatgataaaacgtacccttttcttcggcaatcccgcttatttgagcacaaaaaacgagcaaatagtaatctcttatcccgacaaggaacaagaaaccaaaaccgtggctattgaagatattggtgttatcgttctggaaaatcaacaaatcacaattaccaatggtttactcgaaaaactaaccaataacaatgttgctttaatcaattgcgaccagtatcatttgccaataggtttgttaatgccactcaacggacatacagaacaaacagagcgttttaaaaaccagattaatgcttctgttcctctcaaaaagaatttgtggcaacaaaccataagtgccaaaatcatgaaccaagcggggctgctcaaagaaaaaggaatcccatgccgaaaaatggagctttgggcaaaagaagttacatcgggagatgcactcaatcacgaatccagagcagctgtttattattggcaaaacctcatcacggtagacgattttactagaggacaaaaaggaattccgcccaataatttattgaattatggctatgccattttgagagcgattacggcaagagcaattgtcagttctggaatgttacctactttaggaatctttcaccgcaacaaatacaactcctattgccttgccgacgatattatggagccctatcgcccgtacgtggacttgattgtgtgtcacattatggaaaccgaagattcgtatgacgaattgacaaccgatattaaaaaacaattgttaagtattgccagtatagatgtttttattgacggaaagaatagtccgttgatggtcgcaatgagtagaactacgcattccttacacgaatgttttgaaggaacagcaaggaaaattttataccctgtttatgtatgacgaacattacacccgtttaaaccaatatagaagtttgtggatattagtcttttttgatctgcccaccgaaacacggaaagagcgtaaaattgccagtggatttcgcaagaaattattggacgatggtttttctatgttccaattttcgatctatatgcggttttgtgccagtagagaaaactccgaagtacacaccaaaagaattaggaataatttacctgaacacggcaaaattggggtaatgcaaataaccgataaacaatttgggatgatggaacttttttatggaaaaaaacctgtagaaccggataaaccttcacaacaattagagcttttctaaaaaacagaattctaaaaaagtacaactacgtgtacctcagtacacaaactcaactcttttttaatttcaaaataaacctataactaccaacatatcaaacgattaactcgcggtatattgggaattataagctaaaatacaattttgaaagcaattcacaacattgactcgctattttcgcatctgtcctagattgggaattataagctaaaatacaattttgaaagcaattcacaacattaaattcctacactctctaaaatcttcaattgggaattataagctaaaatacaattttgaaagcaattcacaactgttaaagtcttgacttacttttctttgctattgggaattataagctaaaatacaattttgaaagcaattcacaactttatatcaatcgacgtatcaattggaattattgggaattataagctaaaatacaattttgaaagcaattcacaacacttttcaactccaagtaatgatctaaagtattgggaattataagctaaaatacaattttgaaagcaattcacaacttaaattgtttctatttcatccttttggaaattgggaattataagctaaaatacaattttgaaagcaattcacaacatactcggtgtctccatctgccaaatccatattgggaattataagctaaaatacaattttgaaagcaattcacaactatgtggatgcttgataagaagaactattattgggaattataagctaaaatacaattttgaaagcaattcacaactgtttttttgggcattgatgaaaacacatgattgggaattataagctaaaatacaattttgaaagcaattcacaactggcatcggttcgcgccttgtttagtttgattgggaattataagctaaaatacaattttgaaagcaattcacaactatatttgttaactaaataaataaaacattattgggaattataagctaaaatacaattttgaaagcaattcacaacatataatggtgccaactacacaaaaacaagattgggaattataagctaaaatacaattttgaaagcaattcacaacaaccactgttatcagcataccacttaacatattgggaattataagctaaaatacaattttgaaagcaattcacaacataaatggatagataaagacgaaacaggaattgggaattataagctaaaatacaattttgaaagcaattcacaactagtaggcttttcatttgtaaaagcattcaattgggaattataagctaaaatacaattttgaaagcaattcacaactggcggtcggggttaaaatagctatagaggattgggaattataagctaaaatacaattttgaaagcaattcacaacaagatattgatcgcggtaattttgtggaagattgggaattataagctaaaatacaattttgaaagcaattcacaacaaagacattgccacgtgcaaagaatacgttattgggaattataagctaaaatacaattttgaaagcaattcacaacgaatattccttatcaatcgtgtttatatctattgggaattataagctaaaatacaattttgaaagcaattcacaaccatggggaggcacaacgacgtcaagcaagtattgggaattataagctaaaatacaattttgaaagcaattcacaacagccgcgttagatttagctattgaagacgcgttgggaattataagctaaaatacaattttgaaagcaattcacaacgtgagctggctgtttctctaaatggctctagttgggaattataagctaaaatacaattttgaaagcaattcacaactacctgcgtatagatccgctgcttttctttgttgggaattataagctaaaatacaattttgaaagcaattcacaacaaagctgattgtttcatatttatttatttagttgggaattataagctaaaatacaattttgaaagcaattcacagcacggacagcatttttttgttgttatcacagttacctattttcactcgatatacaccactccattttctcaaaaaactgatcacatttatcccaaaaagacatccacaattaaaatccctagctaaaaacaagaattttagacacaatctaactataaataaaggatttattttgaattttgacacaccttcactatctttcgcattcaataaatagaaaccttaaacattcacaaaatgttagaagaaaagaacgataacctgtctcttcacgaaaatcagacagacggaagaacagtcaatgaattgcaagaaacaattcaatcggaaacgactatagtagccgaaactgaaatcagtgatgctgcagcagaagaaaatacggtgaaccctgtttctgaaccagtgctttcgaatgaagttgaggcaaacgaaaatcaaaacgttattgatgccattgcagattcaaatgctgaagaaagtgaagatgaaacgctgaaagaacgtcatgacattccgatgttggattacgaagcattaccgatggatacccttgtagaagaattgaagaatttggctacaaacgaaaaagtaatgtctgtaaaggaacatgttgaagaaatcaaaaaagcatttttagcaaaatacaatcaccttatagaagagaaaaaagaagaattcaatcaggaaaatcaagatccaaacgaagaatttcaataccattctcctctaaaaacaaagtttgatcaatactataccctttatagagacaacaaaaatactcatttcaagagtttacaaaccaatttgaaatcaaacttagaggtacgattggctattgttgaagagttaaaagagttaatcaacccacaagcaaacatcaaagacaccttaaaacattttaatgaattaagggaacgttggaaaaatgcgggttctattccaaaagataaatacaatcacgtttggaataatttccattttcatgttgagaatttttatgactatttgcatcttgacagagaagccagagacattgatttcaagcacaatttagagcaaaaacaaaaaattatcgctcgtgtgcaagaattggtaaacgaggttgatatcaataaagcttttagagaattacaagatttacaccgaatctggaaagaggaaattggacctgtttcaagagagcatcgcgatgcaatttggaaccaatttagcgagctaacaaaaaaaatgcatgataagcgtgaagtgttgtttgaaaaccaaagaggaactgagcttgaaaatttaaacaagaaaaaagagatcattgctgcaattgaagttttggctaccgaaaaagtaaattcgcattcgcaatggcttgcccaaattgaaaaagtagaagctttacgtaccgcttttttctctgcaggaaaagttccatcggatgtaaatgaggatacttggttagcttttaaaacggccgttagaaattttaatacttttaaaaattcattttataaagacattaaaaaagaccaaaacgaaaatctaaataaaaaaatagcacttgtaaataaagcgaaagaactacaggaaagcgttgatttttctgcaactactccaatcatgaagcaaattcaagaagagtggaaacaaataggtcatgttcctagaaaatattcagataaaatctggaacgaatttagagaagcttgcaatcattattttgacaaattaaaagagcaaaaaaatgaagaaaatgttgaagaagtagaagcttttgacaaaaagaaagcctacttggaaactttaagagagtttcaattgacaggtgatcacaaaactgatttggatgccatcaaattgcatatcgaaacttggaaaagctttggtaaagttcctttcccaagacgacatatcgaaggaaaattcaacaagattcttgatgctttgtttgaaaaattaagcttgagcaaaaaagacaccgaaatgatgcgtttcgccaacagaatggatcatttatctgaaagcaacgacactagaaaactagataatgagaagattttcttaatgcgtaagattgaagaggtgcagaatgaaatatttcaattagagaataacattcaattctttactaatacaaaaaatgccaaaaaagaaaattcaatagttttagaagttagaaaaaacatcgctatccacaaagaaagccttgatgtttggaaagaaaaactaaaacaattaagaaatatgaaccaaggataagtttctacctgtttaattaaaaaaacctcgtgctatttgtagttcgaggttttttttatataaattatcccgatatgataaatatcattttaattcctaaaatgtcacactaaatttgtctctataaaacattcaaattatgaaaaactcactgattcaaaaatacaatgttcctggcccaagatacactagctatccaacggtaccttattgggatgaatctgggtttacaaatcaaatttggatagagaccctcaaaaagtcatttcttgaaagcaacgtaaaagaaggtatcagcctttatatacacctccccttttgtgaaagtttatgcacattttgtggatgcaacaaacgtataacaaaaaatcatggggttgaaaacccatatatagaagccgttttaaaagaatggactttgtattgtaatctacttggtgaaaaaccaaaaattaaagaaattcatttaggtggtggtacgcccacttttttctctgttcaaaacttagaagaccttattaatggtattttttctcatgccgaaaaagcagagggttacgaatttagttttgaaggccatcctaataatacgacctatgcccatttgcaaaaattatacgatttaggttttagaagagtcagttttggtgttcaagattattcagagaaagtacaaaaagcaattcatagaattcaaccttttcacaatgtagcaaaagttactttttgggcaaaagaaataggctatacttcagtgggacatgatattattttcgggttaccctttcaagaaattgaagatgtggtagataccatagaaaaaacaaactcactacaacctgatcgattggcattttatagttatgcccatgtgccttggataaaaggaaatggacaacgtggatttaatgatgaagacatccctaaagacgatgaaaaaagaaaactatacgaaataggaaaagaattgctgtttgaaaatgaatatcatgaaataggcatggatcattttgctttaaaaaaagacagtctataccattcttttgagaacaaaaccttgcataggaatttcatgggatacagttcctctaaaacccagttgatgattggattaggggtttcggcaatcagtgacagttggtacagttttgcccaaaacgttaaaaatctagaagattattatcaattattggaatgggataaattaccagtctatagaggacatttattatctaccgaagatctgctaattagaaaacacatcttgaatttaatgtgtcaatttgaaaccagttgggaggattctgccaattattttactgaaatacctgaaattctaattcaacttaaagaaatggaaaaggatggtttattgattataggtgaaaataaaattcaagttaccgaagaaggaaagccttatgttcgcaatatttgcatggcattcgatttacgattaaaaagaaaagcaccagaaactgctttattctcaatgaccatttaaataagcaactaagattctgagtatctaagacagagtagattacaattttaatttcagcattactaggttagcaacgataccctataaaaaaagccaattagtgacaattggctttttcttgtataaataaactcatattagaaggagaaacatagggtattccgaggcctaaacctcttaaaataaacagcaccccaattaatacaccaacataaggaattactttttgaatcttattccgaataggaactgacaaaaaggaattgacataaaccacggcgctcatcaaaggcaccgttcctagtccaaataacagcatatataaaactccaaagccagcactttgcatggcaatagcgccaaacaaggcaacataaaccatcccacaaggcagaaaaccattgagcaaccctataataaacaaggatttaaagcttttatttttaaaatgactgcctagagtttgcttcatttttgaaatccatctaaaaaccggtttcgaaaaattatattgagcaaaaactttctcgggtattaaaatcactacaatcattgcaacgccaataataacagacatttgctgttgaataccagccaaaaaaagaccttttcccaacaacccaaataacaatccaatgctcccgtaagccgttaatcgtcccaaatgataagtaaaaatttgagttgttttttttgcaggattatttcgttctacaggcaacatcatagcaataggaccacacattcctatgcagtgaaaactactgattaaaccgaataaaaaggctgtataaagcatggggattttagattgcagaatttagattttagaatgcagattttagaataaagatgatagaacacagaatataggattttgtaataaaaccaattctatcttttttttcatctatactcttaattctattctctctactctaatttctttttattttacgtaaatctcttctttggtcaaatagagctttccattatattgccattccatattgacatcccaaacccctccaataagttttgatttaggaatagacatactggaattggataatgaaattgggacttgaaaatcgaattttttattagatggtcgataaagagcaactatccctttaacgtcatttggtataaaatcagcaggaaaaacaatattgattccattggcatcaattgtaataactggctttgcttttaaatcatgtgcattttgaatgcgtgccatttcatcttgaaaatgaacatcatgcttgtaatattcttcaaccactaattcattatcatacttactgtccgattgcacttttagaacaaaatataatataaagctcataaacaacgcaaaagcaattacgatagaagttccccaattaattttcatttttattttttttagtatattttatttaactgctgaatacttcactgagtacacaaagactaatcaaaacttcttggacttagaaaattcgtataagtagtttcaatttttttatttccttcataaacatcaatttcaaccttggttttatcggtttccaataaaaacttattaatttcgagaaacatagtaccgctggacattccttgtttcggcacttttaaatcctgaatacctacaacttttaaagttcctttaattccaaccaatttaaaatgaatatcattaatatcattgctggttttattgataattttaaaagtataaatattactgatgttatctcctttgtgttgatagagctgccctggcaatctaaaaatagtggtttcgatttctgttcttaaaaacaataatccaaaaagcactccaattaatatagccaatatagcggtgtagcctttcatcctggcagtgaacttaaacttggctttggtttctatttcatcttccgaagcataacgaataagccccaagggcaatcctacgcttttcattatagtatcacattcatcaatacaagcagtgcaattcacacattccagttgaactccgttacgaatatcaattcctgtaggacaaacatgtacacattgcttacaatcaatacaatcccctttacctgaagctgctctgtcttcttgcttattgaatttggcccttcctacttctttctcacc

SEQ ID NO: 1063 - DNA, 24638 bp, synthetic construct
  misc_feature 1..24638: note = Synthetic
  source 1..24638: mol_type = other DNA
ggatctgggcactaccaaacggagcggctgaaacagcgccttcctgcttttcgccaccgcagtggaacaggatgtgtgaaggcaggtagggcttcaggtgttcggccacgccgatggggcctacgccaggaccgccaccgccgtgcgggatggcgaaggtcttgtgcaggttgaggtggcaaacgtcagcaccgatgtaaccgggactggtcaggccgacctgggcgttcatgttggcgccgtccatgtagacttggccgccgttgtcgtggacgatcttcacgagggtgcggatgccgtcctcatagatgccgtgggtcgaaggataggtgaccatgaaggcagccaggttgtccttgtattgctcggccttggccttggcgtcttcgaggtcgatgttgccgttttcgtcgcatttcaccaccaccacttgcatgccagccatagcagctgatgcagggttggtgccgtgggccgaagcggggatcaagcagatgttgcggtgaccctgaccattggcctcttggtagcgacggatggtgagaagaccggcatattcgccgctagcacccgagttaggcatgaagctcatgcccttgaagcccgtgatctcgcagaggtctttctccatctcggcgatgagttcgaggtagccttccacttggtcggcagggacgaaggggtggatgttgccgaactcaggccagctgagggcatacatcgaggtggcggggttcagcttcatggtgcaggagcccagcgggatcatgcagcggttgaggctgaggtcgcggttctcgagtttcttcatgtaacgcatcatgtcggtctcgctgcggtacttgaagaacatcggggcctgcatgaacttggaggtacgctgcatctcggcagggataccgctgaacttctggcagttcgggtcgcagacgagctcctcgtgctgcttgccgagggcttccgcgacgacctggccgatctcgttgatgtcttcgcgagcggtggtctcgtcgaggctgatgccgaagtgttgcttgtcgatgatgcggaagttcatgccgtgtttctcggcggcttctttcaccttgcaggtgcaagcgccttcgggcagttcgaacaacagcgtgtcgaagaagtatttgttgagttgcttcacgccgagcttggccagttcggaggtcagcttgccggcgaggcagttgatgtgatgtgcgatttctatcaagccctctggaccatgatacaaggcgtagaagcccgacatgatggcgagcaaagcttgagccgtgcagatgttggacgtggctttttcgcgcttgatgtgctgctcacgggtctgcagggccagacggaaagcgggattgccaagagcatccacgctgatgccgatgatacggccgggcatctcacgcttgtaggcctcggtagtggcgaagtaaccggcgtgcgggccaccgaatcccatcggcagaccgaaacgctggttggagcccaagacgacgtcggcaccccattcgccaggaggcgtgatgagggtgaggctgagcaagtcggcggcgacggccacttgcatgcctttctctttccatgcggcgaccttggcgcggttgtcgacaatctcaccgaattggttggggcattggatcaggatgccaaaatattcctcgctgcagtcgaacttgtcgatgtcgtcgatcacgacctcgatgccttggaagtgggcacgggtcttgatgacttcgatgctctgcgggaacacatcgttggcgacgaagaacttcttcacgccggccttcacctgggcgcggctgcgggagtgccagaacatcagcatggcctcggcggcggcagtgccttcgtcgagcaggctggcgttggccaacggcagggcggtgaggtcgctgatgacggtctggtagttcacgagggcttcgagacggccttgcgaaatctcagcttggtagggggtataagaggtgtaccagcccgggttctcaaggatgttgcgcatgatgacgccaggggtgatggtgttgtagtagcccaagccgatgtagctacggaactgcttgtttttggcacccaaggccttgaggtggctgatgacttcgtattcgctcatgccctcgccgatgttgaggtctttcggcagacggatctcgggagcgatgatttcgtcgacaagttgttcttgcgaggcaacgccgatgaccttgagcatcttttcagcatccgatgcggtggggccgttgtggcgtttgatgaagttgtttctaatcattgttgaattgtttattgttgaaatgtttaattgttgtatttcttttttttgctatcagctatcagccttcagcagtcagcattgtgctgatagctgacggcttacagctgacggctcattctatctcacgtagtttgttcttcaagtcgttgacggtgttgatactttccagttcgctggccggtaccttgcgcagtttggtagaccattccttgaaatgcggggtgtctttcaagacttcgaaccttagatagtcgtattcttcgcctgaagccgtggctttattctctttgtaaagcaggtcataaggatccatctggatggtccgctggtggacgaggttccagaagtctttcttgaattgtgcgctcgggtcgtcagcggcgggctgcggctcttctggctgtgccgtctcctctggctttacaacgggttgtttttcctcctctacttctttttctttaggttgtacggcggagatagtgtcgttttgagccacggtatccgtggtgaccacttccgtcttcgggtcgttggtgggttttggtttggggtccttgaaaacgctcaaggccaaaaacacgacgacggccacgacggcgacgatgcctacggccaacaaaaccttccaaaggtttgacttaagcatgtcgttgaaaggctccttttcgtattcggcgatcagcatgccgtcatagatctggttgctggcgtcggggtcgaagcggaatcctttgaaaatatagcccttgggagggatgatgtactctttgacgtcgcgcccgtcctcatagatggagtaggggcaaccgtccatcttcttgccctttccagggtcaatgctgaaacgcctttccttgaaaaaatccatttccttttgctttcagaaggttagttcagcactttgttcatcgtgatgtagtcgggataggcaagctgttggttgttgacgctaatgtatggcttcaccttgagtcccacgttgacaggctcgctgctggcaccggccaatttgaaggccaggttgacgatggcatcggccgattcgccactgaacagctggaacaagtcggtggtgatgggaatcgtcacgacactgcttgagttggcaggcacgctgacgctgttattcatcgtcgtgctgaccacctgcttgccgttgagactcagtatgtaatccatcttgctcatcgaagcggcaatgctgttggggttcttcacattgaggttgacgttgaaggtcaccggcagctgcctgttggaaatggcgttggccaacgagaggagctgcatggcgttgaggtcgtttttcgacatgcctttgctcaggttgactcccagcatctggatctggttgacgctgttgaagtcaaaggtgcagttggcaaaatttgccatttgggcgatttgggtcaggacatcacaagaggccaatcccatcgtgacgaaaaggataatgagggttttcttaaactttgacatattctaaatattttattatcaattaattaaaaagaaaaataccatgtaaggcaaggcaatagcctttactcgttttcaaagttgcaataatacaaaaaaagtcggacataatgcccgacttttaggaattatttttcaagggtcattcctcgccacggcgtgaggcgcgtttgcgctccaactcgtcgaggatgatcttgcgcagacgcaagctcttgggcgtcacttcgaggtactcgtcatcccggatgtattccatgtattcctccagcgagaaacgcacaggcgggatgaggcggatggcctcgtcgctacccgatgcacgcacattggtgaggtgtttggtcttgcacacgttgatgacgatgtcgttgctgcgtgtgttctcgccgatgacctcgccggcatagacgtcctcgttcgggttgacgaagaaggtgccacggtcctgcagcttccagatggcgtaggggatggcttgtcccgtctccatcgagatcaaggcgccgacgttgcgtgacggcatctcgcccttccaaggctcgtagtccttgaagcggtgcgagacgatggcttcgccctcggtgacggtcagcaagatgttcctcaatccgatgagaccgcgcgacgggatgtcgaagtcgaggcacatgcggtcgcccttgggttccatctgggtcatctcacccttacgggcgctgacctgctcgatgacacggccggcaaagtcctcgggtaccaggacggtgagggcctcgataggctcgcacttcacatcgtcgatgtatttgatgatgactttcggctgtccgagttgcagctcatagccctcgcggcgcatggtctcgatgaggatgctgaggtgcaggatgccacggccatagaccatcagcgcgtcgggcgaatcggtgtcttccaccttcaaggcgaggttcttctcggtctccttgtaaaggcgttcgcgcaggtggcgcgaggtgacgtatttgccttccttgccgaagaaaggtgagttgttgatggtgaacagcatgctcatcgtcggctcgtccacgtggatgggcggcagcggctcgggattctcgtagtcggccacagtgtcgccaatctcgaagtcgtcgatacccatcagcgcgatgatgtcgccagcctcgacgggcttcttggtgcgttccttgcccagaccttcaaaggtgtagagctccttgatggtcgacttggtcacggagccgtcacgtttcaccagcgagacgttctgtccggcctgcaaggtgccgcgtttcagacggcccacggcgatacggcccacgtaggagctgtagtccagcgaggtaatcagcatttgcggtgtgccttcctcgtatttcgcgggcgggatggtgtcgatgatgacgtccaagaggtaggagacgttgtcggtgacgttgttccagtcgtccgacatccagccttgctttgacgaaccgtagacggtggggaagtccagctggtcctcggtggcgccgaggttgaacatcaggtcgaagacggcctcttgcacctcgtcgggacggcagttgggtttatcgactttgttgatgaccacgatgggcttcagacccagctcgatggccttctgcagcacgaaacgggtctgtggcatggggccttcaaaggcatcgacgagcagcagtacgccgtcggccatgttaagcacgcgttccacctcgccaccgaagtcggcgtggccaggagtgtcgatgatattgattttgacgtccttataacgaacggacacattcttcgaaaggatggtgatgccgcgttcgcgttcaaggtcgttgttgtccaaaatgagttggcctggggcttcgtccgattccttgaagagttgggattggtaaaggatacggtccacgagggtggttttgccgtggtcaacgtgagcgataattgctatatttctgatattctgcattttagtaaaaattgctgcgatatttgaaggtgcaaaaatacaaaaaatcaaaaatacagaatatagaaaaactctagtgcttggatttttctgcccaatcttcaatctgaaggtttgggatatggctgaaatgtttgatgtttgaggttactgtaacgcaattgttgtaaacagcgcaggcgcctatcagcaaatcaaattcatcaatcctatttccttgattttcaagcaaggccttgatagttccatatactctaagtgaaggaaaaattggcaataattcaaatgattggagaatgaaaccaatatcttggaattgcttaggattgttagacttcgcagcaccataaaacagttctgcaatggttatctcggtgataaaacaattctcttgtccaacctcattaattttttcaagcactttatgattgtgtttgaaaagttcaatgcaagtatcagtatcaagaatgtattttgacataatgcttaccagttttcaacgcttctgccaaagtattcgttattccttaaagcagtagcatcaatatcactccaatctccactaaaacaagtgtttaagtcgggccttttggaaacctctgacttctctttcattgaggcggatagcttggcaatcaagtcaagtttgtcatctggactcaatgaagccagaatcagcatatacaaatcggtgatacttgtggtttcgaacataatcagaccattttattttggttacagatgcaaaagtaattatttttttcaatttaattatgttttcgataaaaactacacaaatctttctattttgttgtctcttatttcatccaataaaactcttctttcgccacaatcggcttaaaatattcatcgataaccccttgctctaccaattctttcggcgtgccttggcgcaaaggctgctgcggcgcgacgacccacatcacatcggcatgacgaagtagcaaatccaggtcgtggctgctgaagaggatggtcttgtgcttctcgcgcgagagcttgtgcatgatgttgaccaactcgatcttgctcggatagtccaagaaagccgcaggttcatccatgaagatgaggggcgtgtcctgcaccaatgccttggcaatcatcactttctgttgttcgccgtcgctcaaggaaacgaagttgcggttgaccaaatggctgatgccgacggtttcaaggctgtcgtagatgatttgctcgtcttcggctttcagtttggccaagaggccgaggtggggatatcgaccggcggccacgatgtcgaagaccttcaggaagaggtcatcgggtttctcggtcagcacgaggctgaagagggagctgcgctcagtgggggagtagtcgcgcaagtccttgccgaacagcttgacttcgccgccgacgggctttaagctcgccgaaagcgtcttgaacagcgtcgttttgcccgagccgttgggacccgccaaggctacgatgtcgccttcgttgaggctcacgtcgatcgcgggcatcaaggcttggcctttgtagccgattaacagttgatatgtatgaaggacttcgctcatggacaaggattgtttattaactacagatttgacagattaaaccgattcctagtctgataatttttgagatgcaagcatccaattattacagatggcttggtgcgggtagaaatctgtgccatttggacgcttgcgtccttataattatgtggcgtcattctgtacaatctgtataatctgtagtttaatatcattggagagggagagaatctgtgtcatttggacgcttgcgtccttgaaattatgtggcgacattctgtacaatctgtataatctgtagtttattatcatcattgtatatgactgactttttgccggtggaagatcacccaaagcacgatgggcgcgccaatcagtgccgtgaccgagttgatgggcaggttgccttcgaaggagggcagacgtgcgatgaggttgcagaacagggccaggtccatgccgagaaaggccgtggccgggatgagcaacttgtggtcgctgctgcggaacaggaatcgggcgatgtgtggcacggccaagcccaagaaggcaatgggaccacaaaacgccgtgatgagggcggtgaggaagcccgaagccaggatgatgagcatactgctgcgacggatgttgacgccgaggttctcggcataacgctcgccgagcagcaagaggttcaaggtcttgaagagcaggaacgagcttatggtgccgaccgccaccgcgatggcgaagaagggcagttgtgccttgctcacgttagagaagctacccaggccccagatgacgaaggagtgcaagccttccttctggctgaagaacttcaggatgtcggtgaccgagccggcgatgtaggcgatcatgatacccaccagcaccaggctgaccatgctgcggagcctcgaactaagggcgaggatgagcagcagcaccgcgaaggcgcccaggaaggccgctatggtgacgccgaaggtcgaccacagcgacagcgtgctgaccgacaggcccgtagcggtgcccagcaagaccacgaaggctacgccgaggctcgcgccgctgctgatgcccagcagggaagggtcggcgagggggttgcggaagagggtctgcatcagaagtcctgaaacggaaagccctatgcccgccagcagcgccgtgatggcttgtggcaggcggtagtcgaggatgatggcgcggtaggtcgacgtgtcgccatgcagcagcgcatcccagaattcattccacggaatcgacaccgagccgtagcgtaggttcaggacgaacagcacgatgccgacggccaggatcgcgatggaaaccagcgcgatgggtggcgttttgcggcggagggtatggtcggtgtcggatgtcattatgggattgttttgcgttgcaaagatagggtttaatttgattgggataggatatgggaaacaaataatccgcaaatcttgcggttagttatccgcagattttgcggattattggccgcaaaggttatgtgtttccagaaagcaaactatttcctatatcgttttagtgcctttgtcaactcgtcatgaatggttttgcgcaacgattttggctctatgacctccaattcgttgccttctttgaggatggtttggatgaaatcatgggtgggggccacatggtactcaaagagagcgctttgtttttcggtggctatctctttttgggagtggtgcaagggcaaggtgcgcaggtagttgtccatgggtgagtaggcgcgtagcacgatgcgttctgctttgacgttttggtcagggatgactccgaaataatcatggaaaaaggtctctgcgtcaaatgtcggatccattttgaagcagtggtcggtttcggtgagtttcgtcatgcggtcgagggcgaagactccgaggttgcccttttttctttcggttttgccgagcaggtaccagcgttggtggaagagtttcaggcagtagggttcgatgagggtggagtagggctctgaatcgctgaatttcttgtatcccattcgtaaggtgtgatggtctttgatggcgttgataacggtttgtaggtgttccaacccggcggggatgtcctccaacaggagttggtccttgatggagaggccgtcgaggaggatattgttgacggtgagggtgcggagcatccagttttgtgtggagttgtcgcggagtgcttcggggttggctatatagtattggtgttggttgtcgcattcgatgcagatgccgaacatgtcgtcgatggcttggcggatgcggtagaaggtggtgcgggagaggggacggctttcgtttaggtcgttggagagccaaagttggcagatgtgttcgaaatcgatcttttcggcacgtagtatggtgttcactagccaggtgaattgtctaaatgtgttcgagcttttcattagaaaaatgatttttgtgcaaaaatagtaaaaaaacatcaccgtttcatgttttgaaacagatgtgctgtatttttggcgcgattatagaatttaagaaatgaacagcgataagatttgggcaaaaaagacgaggcgaccgaaatcgccccgaacttgatgttttcacaacggaataatccttattgtgaattgctgcatatcttgtgctgcaaaaatacataatttttcaatactgcaagtgttttttgaaaaaaatagtaattttgaccatcttttttgaattgataaatatttgacaaatgaagaaaatattaggacttgacttaggaaccaacagcattggctgggcggtggtgaatgcggatgaaatagtccgtgaaaatgaaacttcttatttgcaacctaagagtattagctcggctggaagtagaataataccgatggacgaaggagtattaggggattttgatagaggaaatacaaaatcgcagacgaaaggaagaaccgattttcgtagtgcacgtcgactactggaacgttacttactacgtagggagcgtcttcttcgagtccttaaactgatgggttttctgcccgaacactttgcaaatcagattgacgagtttggaaagtttgtcgattatgatgagccgaaattggcttggagaaaagggttgaatggaaagtatgagtttgttttcaaggattcatttgaggaaatgttgaaagaatttgcaacaagccagcctcaacttgtttcagacggcaaaaaagtgccatatgattggacggtttattatttgcgcaaaaaagcattggctcaaagaattaccaaagaggaacttgcatggattttattgcagttcaatcaaaaacgcgggtattatcaacttagaggagaagaagaggaagaacaacatgatagattggtggagtttctggctcaaaaggttataaaagtggaagcgaccggtgaaaaaaaaggtgatgatgtttggtataacgtgtatctggaaaatggaatggtatatcgacgcacgagtcgttttcctttagattgggaagggaagataaaggaatttattgtcaccaccgaactagaaaaagatggatcacccaaaatagacaaagaaggaaaagtcaaacgatctttccgggcacccaaggaagatgattggacgttgttgaaaaagaaaaccgaattggatattgacaatagcaatatgacagtcggttgttatatctatgcttccttgttaaagaatcctgatcagaaaattattggtaaactagtacgaaccgttgaccgtaaatattataaagaagagctgaaacagattttggaggttcagaaagagttgattcatgaactgcaggacactgcgctgtatcaagcctgcatcgaagcactctatccaaacaatgaggctcatcgaaacaatattacgaaaccagattttatcaatctgttcatcaacgatatccttttttatcagcgtccattaaagagcaagaaatcattgattagcgactgcccgtatgaatctcattatgataaagacggtaccccacatccggtgaaatgcattgccaagtcaaatccattgtttcaagaaatacgtttgtggcagtttgtccaaaacttgaaaatctatcaaagagaaaaaatggtgagtggtggccagttggatttgtttggtaatgagttggcgggcaagttgcaaactgatgttgatgtaacgagtgaattcctgaagtcggaagatgattttgtacaattgttcgagtggctgaatgaaagagcctcaatcaaacaagatacattgctcaattcttatttcaaaatcaaaaaggagaaaggcaaagaccaatatccctatcgttggaattatgttgaggaaaaagaatatccatgcaatgagacccgtgctgtcattttaagcggattgtcaaaatgcgatgtgagttctgattttctaactcacgaacaagagatggggctttggcatttgctttattcaattgacgataaaaatgaaattgtcaaagcattaaaaaagtatgcggagaagaatgatttgcctgatacattcgtggaggtttttgccaaaattaaacccttcaagaaagactatggctcatattctgaaaaggcaatcaaaaagttgcttccgttaatgcgcatgggcaagtattggagtgccgatactattgattcaaagacgaaagagcgtgttgagaaaataatcactggcgaatatgatgaaaacataaagaatcgagtgcgcgaaaaggccatcaatttgacagacattacccatttcaaaggcttgccaatatggttggcttgttatattgtatattgccgccattcagaagccaaagagattgttaaatgggaaacccccgaagatatagatgcctatctcaaacaattcaagcagcattcattgcgaaatcctattgtagaacaggtgcttacagaaacccttcgaactgtacgcgacatctggaagcaggaaggccagattgacgaaatccatcttgagttaggccgtgaaatgaaaaatcctgccgacaagcgcaaaaagatgacagaaagcattcttcaaaacgagaataccaatttgcgcatcaaggctatgcttgcggagtttatggaccctgatatgggtattgaaaatgttcgcccctattcgccgagtcaacaggatattctgcgcatatatgaggagaatgcgcttgataatttgtcaaaagatgacaaagatttcgatttcatcagcaagatgtcgaaaacggccaatccttcaaagtcagatatcctaaggtataagtgttggttggaacagaaataccgttctccctacacaggcgaagtgattcctttgtcaaaactttttactcctttatatgagattgaacacatcattcctcaatcacgctattttgatgattcttttagtaataaggtgatttgtgaggcggaagtcaacaagttaaaggacaggttgctgggctatgagtttgttaagagcaacgcgggaagaattgtgcaaatcagccaaggaaaaacggttaaagtattcactgttgaagagtacgaaaagtttgtaaaggagcattattccagcaatcgaatgaagatgaaaaagttgttgatggatgatattccagacggattcatcgaacgacaattgaacgacagccgttatatcagtaaatgggtgaaaggattgctttcgaatattgtccgtgagaagttggaaaatggtgaatatgaacaagaagcggtttcaaagaacttgatttcgtgcaatggttcgattaccgacaaactgaaaaaggattggggaatgaatgatgtttggaatagcatcattctgcctcgtttccagagactaaatgaattgacggggagacaatgtttcaccgcttacaatgcagaagggcatgagatacctaatatgccgcttgaattgcaaaaaggcttcaacaagaagcgtatcgaccatcgtcatcatgcgatggatgccatagtaattgcatgcgccacacgcgaccatgtgaatctgttgaacaatgaggccgcccattcaaaacacaatgccaatcgctatcagttgcaacggaaactgcgtaggtttgagaagataatcattgatggaaaagaaaaagaaattgccaaagagtttcttaaaccgtgggatacttttactacggatgcaaagcaagtgctggaaaacatcattgtaagttttaagcagaatctgcgtgttattaacaaggccaccaatcattatcagcattacgatgatgagggcaaaaaaacaatgaggaaacaagaaaaaggtgacagttgggcaatccgtaagtcgatgcacaaagatacggtttttggagaggtgaacttaaggatgaaaaagactgtttcatttggcgaagcaataaaaagaccagaaaggattgtaaataaggatttcaaggccaaaatcatggaattgttgagagaaggccgtgatgccaaatacatcaaaaagtatgttgaggaaaacaaggatgtttggtcggacatcaatttgtccaggattgaggtgtattattttaccaaagaaactagcgaacgctattatgccacacgttttcttagtgaccttgtgagttattttgcaggtgtgacgaagtttgaagatgcaataaaaaagattgaggcagttacggacacaggcatacaaagcatattgaaagctcatttgcaagcaaaaggaaataatcccgaattagctttctcgcctgatggcattgatgaaatgaatagaaacattgtcgctttgaaccgcggtaagttccattatcccatttataaaattcgtagattcgagagaggcaataagttcgcaattggtcaaacgggcaataaaacgactaaatatgttgaagctgacaaaggaaccaatcttttctttgctgtgtttggcatagaaaaattgaacaaagaaacgggggaaacagaatcagttcgctcgtatctgactattccactcaatgtgatgattggctgtcagaagagatatggttcaaagtggcgtgttgagattgagtcatttttgaaagaaatggaacttgtttccgttgatgctacattgctgtttatcctttctcctaatgatttggtttatttgcctactaagattgacaatgatggtgccagtagaattgttgaaagatctcgtatttataaagcagtttcttttacgggtaataggttctatgctataccgtataatgttgcccgaagcattgttgataagactgaatatacccaattaaacaaagtggaattttctgacaataaggattctatcaaagagatctgtgtccccataaaagttgacagattaggaaacatcattgaacttaatggccaaaagctatgatcaagcgaaccctgttctttggcaatcctgcctacctctccttgcacaacgcacaattggtcatcaaactgaacgatgcccaaacgcaagaagaggtaacgaagaccgttcctatcgaagacattggcgtggtggtgctcgaagaccggcaaatcaccatcaccaatggtgctatggatgccttgctgcaaaacaattgtgccgtcatcacctgtgatgaaaagcatatgcctgctggtttgttgttgccgcttgaaggtcatacggtgcagagtgagcgtttccgctggcagattgaagcttctctgccgttgaagaaacaactatggcaacagactgtccaagccaagatccgtaaccaagcctctgtgctgaagcggttgagtggggtagaggtgggttgtatgatggcttgggctaacgatgtgaagagtggcgatagcgaaaacttggaaggtcgggcggcagcctattattggaagtccgtttttccggaaatggagcggtttgtacgcgaccgcgaaggtgaggcacccaacaaccttttgaactatggttacgccatcgttagggctgtgattgcccgatcgttggtggccagtggtttgttgcctacctttggcatccatcatcacaatcgctacaacgcctattgcttggcggatgacgtgatggagccctatcggccgtatgttgacgagttagtgatagatattttgcgtagtggcgttgattgtagcgaactgactacagacttgaagcgacaattgttggggctacctgtaaaagaagttgtcattgacggtcgccgtagtccgttgatggtggcggcatcgcaaaccacagcctctttagcgaaatgttttggcggtgaattacggaaagtggtatatccgatgatggaattgtaatggaccgatttagcgaatatcgtattatgtgggtgctggtgctttttgatttgcctaccgagacaaaaaaggagcgcaaggcttatgccacttttcgaaagcgcatcatggccgacggctttacgatgttccagttctccatttatctgcggcattgtcccagctatgagaacgcagaagtgcatatcaagcgggtaaaatcattcatgcctgagtttggcgatattggcatcttgtgtattaccgacaaacaatttggtgacatggagattttcagcaactgcaagccgaagacggtagacacgccttgccagcaattggaactattttgaatcgggaaaaatagtcataacaaagaaaaatccaactcaaatgagctggatttttcttttctgaaacaacttctaaattgttgtggctctttgctttacacatatcgtgttgtttcaaagagcaaagatacaagataaatgcaagcaattcacaactgatattgcagggcatatttctaatatgttgttgtttcaaagagcaaagatacaagataaatgcaagcaattcacaactggttcataactaaaaccgtatgttggtgtgttgtttcaaagagcaaagatacaagataaatgcaagcaattcacaacgacaatgtatgaaacccgtacatgggttaagttgtttcaaagagcaaagatacaagataaatgcaagcaattcacaacggtcagccccgcccccgctgcctgccccgcgttgtttcaaagagcaaagatacaagataaatgcaagcaattcacaacttgcccgggcgtttggtcacacccatggagttgtttcaaagagcaaagatacaagataaatgcaagcaattcacaaccctgcagaagatggaggagcagttcgccctgttgtttcaaagagcaaagatacaagataaatgcaagcaattcacaacgataatccagttgctcctaattcaggcttggttgtttcaaagagcaaagatacaagataaatgcaagcaattcacaacaccgatttgcgtagtgttttcctcggtgcagttgtttcaaagagcaaagatacaagataaatgcaagcaattcacaactggtcgaggtaggtcttaatcctctcctcagttgtttcaaagagcaaagatacaagataaatgcaagcaattcacaacgaccacaggcactacgcaaaactacatcccgttgtttcaaagagcaaagatacaagataaatgcaagcaattcacaactaatacgcaccgagtaggttaaacacctgcgttgtttcaaagagcaaagatacaagataaatgcaagcaattcacaacaggtctcaaggtgcccgtaccattgcccatgttgtttcaaagagcaaagatacaagataaatgcaagcaattcacaactgctgacatttggaagttcggccgtacggagttgtttcaaagagcaaagatacaagataaatgcaagcaattcacaaccattgttgtacgattttgagttggtaattagttgtttcaaagagcaaagatacaagataaatgcaagcaattcacaacgtctcgtctcaaagcattgatgttgactttgttgtttcaaagagcaaagatacaagataaatgcaagcaattcacaactccttctcgcatggcttctatttgtgatttgttgtttcaaagagcaaagatacaagataaatgcaagcaattcacaacgtaccagcatccgttgagatcgacggcatagttgtttcaaagagcaaagatacaagataaatgcaagcaattcacaactccttttcatagaaagatctatgttgaaaagttgtttcaaagagcaaagatacaagataaatgcaagcaattcacaacaaggtcagcatcgtttccatggccacaatcgttgtttcaaagagcaaagatacaagataaacgcaagcaattctgctattagtacagattattttctacttttgtccccaccaaacatcctaaaactgaccccatgaccagaaaaatgcacctccaagaagaggccgcgcgctgcctgctctgcgccgatgcgccgtgcagcaaggcctgcaagaatggcgacccggcacgcaccattcgcgccatacgattcgacaacaaagccgtcgccggattgtggctcgacccgtgcagcgacgccgagctgcaagccgccgaggcagcctgcatccactacgacaggccgatccgcatcagggagctggcgaaaaccgtcaaaggcacgaagccacaaaaggatctccccagcctcgccatcgacttctgcggcatcccttgcgagaatcccttcttcctcgcctcgtcggccatctgcaccaactacgagatggtggcgcgggccttcgaagctggatgggcgggcgtgttctacaagaccatctgcatggaggacatccgcgaggtttcgccgcgcttcgatgccgtcaacgagccgggccgctccgatttcttcggcttccgtaacatggagcagctgagcgagaaccccgtggaggtggacttcgacatcctgcgcaggctgaaaaaggactatcccaacaaagttgtcatcgcctctatcatgggcaacgccgagacggagtggatcacgctggcgaaaatggccgaagaggccggtgttgacgcggtggagctgaatttctcctgcccacagatgaagttggctggcatgggcagcgacgtgggacagaactcggagctggtgctgttctacacggcctatgtgaaacataacgtcaagataccggtcatccccaagatgacgcccaacatcacccaaatcaaccagcccgccatggccgcccatttcgccagcgccgatgcggtgtcggccatcaacaccatcaagagcgtgaccatgaacagtcgcggcgccgtggccgataagaagaccgtctccggactctcgggccgcgccgtgaagcctatcgctttgcgccacatcctcgagatggcgagaaaccccatcttcgccgccaccaacaatggcaaacgcattgaactgagtggcatcggtggcatcgagacctggcgcgacgctttggagttcatccagctgggctgcagcaacgtgcaggtgtgcaccgccgtgatgcagtatggctaccgcatcatcgacgacctcgtgctgggactgcaaaactatatggcagaacgcggcatcgagcacctgtcggatctggtaggagaggagctgcccaatttcgacacgcccaccaacctcgaccgcgacaccatcgtgtatcccaccttcgaccgtgagcaatgcatcggctgcggccgttgctacacctcgtgtcaagatggcggccatcaagccatcacctttgatgccgacttgcgtcagccgcatctcgatggaaagcgttgcgtgggctgccatctctgccgacttgtctgtcccacaggcgccataggcgtggctaaacggattgcaaaaaggaaataaacggaattgagattcccctgcggggaatggcgtaaagtactcgtataataagcggcggcaagtaatgtttacccgttgtaaacgctacaagccgccgcattttagttggacgaattctccattaacttcgttgaatcttcgatttcccgaagggaatctcttccagctttagaaccttaacgttagattgcccatgacatggaaaccagccatcgggatgaaaccgatttggtagtagcggttgtcgttggggtgaccgtagctgtcgcagatggctgagtagacccagccactggcggcgtagcgcttgttgaagatgttgttgaagttcaccttcacgatggcttccttgacgactttcttgggtttcagcgtgtagccgaggctgacattggaggtgctgtaggccggcaacgaacggtcgaggctctgggtattgtcgagatacatgcgtgagacataattcgtgtgccaggtggcctcaaatcccttgtggtggaaggtgacgaaaccgttcaggatggccgaaggcgagaaggctaaggtggagttgtcgtagtggatgacatcgtagccgtcaccgtcgtaggcctggccgttggcatcggtgttgccttcccagtcgtcccagttctccacgacttcgtcgaagtccttgatcttgttttggctcaaggcggcgttggcctcgatggtcaaccacttggtggggctcacgccggcctgcagctcgacgcccatgcggtacgagtccttgatattggtggtcagggcctcgccgatgtcgctgacggcaccggtctgcacgaactggttgttgtagtccatgtaatagaggttggcgccggcttggaagatgcgtccgttgtagttgtaacccaactcatagtcgaggagttgctcgggcttagggaagggataggaaccgttgtcggtgaagttgttacgctctggctcgcggtggctcatggccacggaggcgtaggcgtggtggctgtccgtgtcgaaggagatgccgcccttggggttgaagaatgggtacttctcgtggatgttgagttcctggttgtagtattggctgtcttcttcgtagaacttgtcgttgatgccgttggtcttgtagtccacatagcggaactgcatgtcgccgaagacggtccagtggtcggcgaaggtgtaggctgccttgacgaagacgttgccgtcgagcttctgtgcgtcggagtcgtagtatttgtagtcgccatcagcgaggtatttgtctgcgacgtcttggttggcgatataattcacataaccgaagtggttgccttggaaattctgggccgagataccgccgatgacgttccaatgtgcgtccttgtaacgggtgaaccacacgaggccataggtgtcctgacggagtcctttcttgcggacgaagtcggtctttttcacttggttgccttcggcgtcgtaataggtcatgccgaacttggaaagtttgttgttaggacggaactcctcgtagtagccgtagccgtaggtgtagtgcagtgtggccgtagtcgaccagtgctcgttgatctcccatgcggcggagaggaggttgtggtcttgccagaagttgtcagtggtgcgctcccagaaggtgccgtcgttcatctggtagcgttgggtcatgtagtggccgttctcgtccttgacgaagttgccgtcctcgtcggtgacgaggtattcgtagagtgagttgaactgtcccaagcccaccttatacatatcggcgtaggtcttgatgcccgtgtgctcaccataggtgccgtccataaggctgaggtcgttgttgccagctgtcacgccgttccaggcttggccggtcatctcgaagttaccgatgttcttgtagcggaggatgaagttcttgcccatccaggtgaggccgccgtagtagctgccgctgcggcctttggtgccgtggatgaagccgtcggtgtgggtctcgtggtaggctccgtctacgatgaggtggttccaaagcaagccagtggaggccttggcgccgaagttgagggtgttgaacgagccgtaggagcctgtgatctcggcactcggcacaaaggaaggcttggccgatgtcagcgatattgtgccgccgaaggcgccgtcgccgttagtggagctacccactccgcgttggatctgcactgagccgagcagcgagccatagctgttcatgttggcccaaaacacgcactgatcctcgggcgagttgagcgacacgccgtcgagggtgacgttgatgcgcgagtcgccagcgccacggatgcgcatgtaagaggtgccggagcctatgccattctcaccccatgcgatgatgccgggcgtcttggcgaacaggaaggggagctcttggccggtcttcgaaaagtcgttgagctccaccttctcgatgttggtgacggagaagggggcgttcttttggacacgcaaaccgccaaccaccacctcattaagcacttcatacttcgtggtgtcatacaccacttcattgttttgagcattcacatttgccgcgaataacaatgcggcgacaacaaaagaaaatcttttcatctcttgaacttttagtttaataaaatgtgaaggggaatgcttgaatctatccaatccctacgccggcattacccggatcaggttagagggtatgttctcagcctattcaccctgccggagcagggaaggcacccctttgtaattctgcggcaaaaatacagcttttttcggaacgctgataaaaaagtgttatttttgctgacaaaacaaaggcacatgagatgcagattaataggtttggatattattggttggatacatgggtgatggccaatgttatacaattggctacgcaagacttttgcgcccgaaatctcaaccacatcaacgacccttgcgggcggcagtatgaccaaatgacacaggcggcacgatcggttcccgccaacattgctgaaggcaattcgcgtcattcaacttcaaaagaaactgaaatgcgcctcacggatgtggctcgtgcaagtttggcagaactagccaacgactatgtgaattggctcatgcgacatgaggagatcccatggtcggtgaagtcagaagaacaccaaaatgtaagcaatatcctcctcgaccgacccacttataaagacgatgtgcaacacctcagcagcattcacatcctgaagcagaagcacaagtttgatgcatggctttgctccaaaaactcaatgacagaagccaactgtttgcttgtcctttgcaatcgcctcattatgatgctgggcaaacaaattgagaaccaacttgaggcattcaaagaagaagggggctttgctgaagcattgtcagctgaaaggctagcccgcagggcggagcaaagtgctcaaaacgatgctcccatttgtccaaaatgcggtaagccgatgataaagcgtatggcaaaaaagggtaaaaacgctggtaatgccttttggagttgctcaagctatccagaatgtgatggaacaaggagcatttgacaattccggtagattctttcgtaatatcgtaatgacggaataacgacattacgataatcacaaggagatgatcaaaaacctattagataacacaaaaacccgcaaactgccgccaccaaggcattaactatctttgctttcaagaaacttcttttgctctcggcgagcaaaggcaacgaggcatgaccgtcctgtgagatggagctggccaacagcaccgagaagggcactgtgcccgtggcaaacaaggtgacaaacagcaaatgcggtcccgactcggggatgatgcccaccaagacggccaacaggatcatccacgggatgttgttgctgataagggtttcaatgtcaaagtaatgcagcccgacctggatgacaaacaaggcgccgaaggtccagaggaagatgctcaagaaatgcttgcggatgatgtgttcccacaggtgctccttgacgacatgctcgggtgccgtggcgatgaaccacaccacgaagaggctcactacggcgaagatgaggttcatccagtattcgtcgaagatattcagctgggtgtagacggcttcctcatgctcatgttcgtgctccagcatgccgaaggcaagggcggcaatgaataggatgacgcccagcagcagggcgatacgctccgcgctggcgtggcgcatgttgcggaacgatgctttctcaggttggtgcgtctcgtcatggtggtcttcgtcatggatctggtagccgtcctcgcagccttcgtggtgggcttcgttgttcgacttggagaacctgtccaccagccatcccacgaggatggcgatggcgaacaagattgccatcagtagcatggcctccttgggaatcatggccagcatgacgaaggcttcatcgcccgatgaggcaatcatcatggcgatcaaagcaccgaagctcaacagcttgtgcgaatacatcgacacggcggcgaaaccgcccatgcaacccgggatgatgcccaagcccgcgcctaaaaccacttgtccgaagcggttatggcgcagcctcgtgaaccatttcccgtgcgaatggacgttgacatactcgatcatcagcatcataataatcaccagaccagtgattaagacgctgtttctcagcacatccaaaaacaaatgcaaaaactcgtgcatgggtcgaaaaatgagccgcaaaaataataattattatctttgcaccgaaaaagaaataggaccaggatcacgaaacctatcctttaagtgtcattgcggactagctccgttgtcattgcggatgtccctccgccatgacgactaaagggaaggagtagttcttctcggtcggttatcagtgttatatgaaaaaagaagattgtttttacctcggcaagatcgccaagactcatggcctgaaaggggaggtgaccattaaattggatgccgacgacccatcggcatatctcgaaatgaagcatttcttcctcgaaatcaacaaggtgctgacgcctttctttgtggagaagataaccccgaatggcgacaagttctttgtccaagtgcaggacatcaagactgtcgaacaggcacagaatctggtgggaaagtccgtgtacttacctttggaaatgctgcccaagttaagtggcaagcagttctattatcatgagatcgtgggcttcacggtggtcgacacggagaagggagagttgggtcccgtcaccgaggtgctggaatatcccacacaggccattctacaggtgatgaaggacaagaaggaggttctcatcccgattttggaccaggtgatccagaatgtcgaccgcgacaagaaagtcctcactatcactgcccccgaaggcttgatcgacatgtacttgcaatgactgacgcgcgccccttccacttcaagcatttcagcctcttccatcatcgctcgacgatgaaggtggggacggatgccatattgttggggcgctggactgaggtcaggccgacggatgtggtgctggatattggcacaggctgcggcctgctgcccctgatgctct

SEQ ID NO: 1064 - DNA, 24638 bp, synthetic construct
  misc_feature 1..24638: note = Synthetic
  source 1..24638: mol_type = other DNA
gagtcgatcaccgggcggccgccgttgagcttgtgccacgacagtccgtcgttgctaagggcgaagcagatggcctcctggcttatgtcgttgcctgtgaaataaacaaaaagatagccggccatatccttttcctcaacggctgccgtgcgtgcggtggccgttgtcagagagacgatggccgcaatcatgacgaatattttttttcttatcatatgctgtttttagttgtttcagtttcatgtatgaccgcatgtgtgcggccttatgccgttgtcaatatacgaatatacggtagtccttggtcagtccggcggcgtcctgcaaggtggcgggcagatactccagcgcgccgatggtctgttcggcacccatgtcgatgacgagcagatgaggcattgatgctccgtaggcagtgctccaccatgtggattcctgaaggtcgaacgccttgtcgcccgtgtggttgccgttgtcggcgtcctcgctgtcggcatatttcgtgctccatgagctgcggtcgatgcgtcgtccgtcggtgtccagcacgtagatttcggctattgccgccatctcgctgccgtcgtgggttgacgaacactcaatggccagatagcgtccgcgtgccggcgtgttgaatttgatggtctgccatgcgcggctctgtgcgaaccggcccgtcgctgcgggcgttgccgagttgaggtcggggcggtcgcccggattgttgtggcggttgctcttctccagttgcagcttgtcgagttcgggacggtcctgtccccatgtctcaggcttggacggtccggtcacgtcgagcaccactatctcgttgcgtcctttcttcagccagcatcccggtacgtagagagtttgttgcgggccgatgctccagaagcggccgatggcgtgtccgttcacatagacgaggcccttgccccatgtctccatgttgatgaacgtgtcgccggtcttcttcagattgaagaaaccgcggtagtatccggcgcgcgaatcgagcttcagtcccatcgacgcgccgtccttgcagcgtgtgaaggcgcgcagggcgtggtcgtaggagtcgggcagggtgcgcatggtccagtcgttcagcttccacgtcacgtcgtcgccatctacattggccataatgattacgtcgccggtgagtcccttgaagtcttttatggcgcggccgaagttgatgcgtcccatgccttcgacgacgatgtcgagcctactgccgcggctcactggcggcagactgactgttgtctcgttgcgaacgcggtcggtgcggcctacgtatcggccgtccacataaaccatggcgtagtcgtgcgcgcctttcagtgcgagcgtggacggagtgtttgtctcgggcagagaggttgagtagattaccgttccccagcccatgtcaagttcctcgaaggtcagaggactgcgtgcggcgcacatactgtcggtgccgaacaccaggggcgcgtactcgttgaggctgaagcgcggaatgcttatcagctctgcggcaggtcgtggtacggcaggcagacgcttgtcggagtatttctccatcgtgcggcgcagctcgtagtattttggtgtggcctgtccatattcgttgatgggcgcgtcgtagtcgtaggatgtcacgtcgggagcgaatcccggtgagttggcgcctgcccagtggccgaacgatgtgccgccgtgggtcatgtagagcgagaacgaaatgcctttggacaacatctcgtctatgcctgccaccattgccgatgcggggcgggtctcgtggcgggcgccccatttgtcgaaccatccgctccagaactccgagcacatcagcggcgactcaggccgcaattcgcgcagacggctgaactgactgtcgatgtcggagccggtgccgaagttcattgcccacaccagatcgtccagtccgttgagtgtgaagttgctcgcccagtcgcactggaagagcgtaaccttgtcgaatcccgacctgcgcactatgtcgcgtatggcactcacgtaagccttgtcctcgccgtaggagccatattcgttctccacctgcaccatgattatcggtcctccgttctgaatggtgagcggagcgagctgttcgcccaccttcgccatgaacttggatacgcggtccatgaagtaagggtcctgctcgcgcagacgtatatccttcttcttgagcagccaccagggcagtccgcccatctcccactcggcgcacacgtaaggtccggggcgcacaatgacgtacatgccgttcttctgtgccaggcggcagaaggccgcgatgtcgttctgtccggtaaagtcgaactcgccctcacgctgttcgtgtatgttccaaaacacgtaaaggcatatggtgttcatgccgagcgcgcgacacatcctgatgcggtgctcccagtaagggcgcggaatgcgcggatagtgcagctcggcagccttcaccacgaagggcctgccgttgagcagaaatgtcttgttgccggctgtgaacgtaccgccattgttgtcagcggcgcatgtcgtgcgacccgcgagcgccattaaggccgcgagcagcagtgtgcgtagaaaggatggtttcatcatgtcagtattcagattttgtatttccgtgtcaaatggtgtttatatatgttttccggaggtttaaggatgagtcccggaaagcgcgtcacgacgtgccgcaatgagtgttgccgctgttggcggacgaagcgacgtgattgctgcaaagttagtgttttattttaaaatacacaaaccggctttttcactcacgatttcctgcgtgcggttctgtggcagtggagtatcacgcatggcggcaatggaattgtgacatcacatcgtggacatgacatgaggcgtgtttgccggtcgcagtcggcggaagataataaagcgcaaacgataccggaaactgtatatttatacatctccggcggtaaaatattttgacaataaaaattctcaaaatagaaagcggagctcagcgaaatgggctttatcagacagatgtctctttagcgaaccgtgatattatccttcccgaatgacataaaagataagacgactttgcgaaacgggctttatcgcggtctgatatgggctttgtcagggcacgatattggacatatcagtgcatgaaatgggcaatatcggaggctgaaacgggccatatcgcaacgcggtacgaagactataggattgctggaaagtgcaagtgactgacattcaatatgatgcgtaaccctctcaaaactcgcaaatttgcgagcgaggaggcagttgctcgaaaaaaacgccgtattttcgggttacggtgaatattcatacattttgcgatgtgcattattgcatatttatgcaaaaacattaatggatgatgaggtgtgtattcaaggcgcaggatgtcgtattaaggatattgtaaaaggtggattgcaccagtgtcagacgtccttaatattctccgtgtcaagtgttaatgactgtcccggacggtgccgtcgtcatcggaaaaacatagcttcagggccgaaacggataagacaaaagcaggaggaaaaacgctgatcgttttcctcctgccatgatcgtgtatgacattacatcacgccagatgccgtcatttctttattatcttcgacgtctttgtgtcgttctgtgtctccacagtgagcagatatattccctttccgacagaggatatgtcgaacgtgtcgctattgtttccggcggtcttcacaaggttgcccgccatatcgttgagtgtgaggctcaccaccggctcgctgcttttgatgtggagcagtccgtcggttggattgggatacactttgattccggagtcttctgccacctcgtctatcttggtggagatgttagtgctgaacgagtactgacccgaaccgagcgtgaatacggccttgccgtcggcagtgccctcatacttgacaccttcggcctcttcggccggtatctcaccttcatacaccgtgttgccgtcggctacaggcatgagcagttgggcggtggtgttggccggaacggtgactttgtatgtgaatgatccgtcggctccgagctgccatgcgctctttatgctgccgtagtttgaagccactgtcgcgtcgacgctggtgatgcggtcctgtccctgaggcagtgtggtgcgggtgtcgggatagggctgtaatatgatgtgcttgaagcccacattctgctcgtcggcctctatgccggccatgtatctgtacatccactctgccactgctccgtaagaatagtggttgaaggagttcatggatatgtccttatggaatccggtctccttggtgtacgagttccagcgttcccatatagttgtcgcgccctgatccacgctgtagagccatgacggacagttgcgctggagcagcaggttgtatgccttgtctatgagtcccacctgtgagagtgtggtgttgatgatgcccgtacctacgaatccggtgttgagcgtctcgttgtttgagcttatggcacgtgcgagcgccttgatggtggcctgttcagatgcctcgtcgggcagcagtccgaagcgcagtgcgagcagataacccgtctgagtgcgctgtgttggcatgttgccgctgatgtagcgtgtggcgaactctttctttatgttgttgtagagttcctcatattcggctgccttgatggcatattcgtcgcctggtgccgtgctgagagcctgcgacatcttgctcatgagcattgcgtcgtaagcatagtagcatacgctgacatagcgtgagtcggtcggaacgaacgatacccagtcgccgtatgatgtgccggcaccctgatacttgtagccgtcgccggcctgtgctgccagccagtccatgtatttctccatcgactcatagttctcctcgatgatgctcttgtcgccgtgcatgagataagtggtccatggtacgatgatgcctgcgtcgccccatgcaccgttgctgtagcccacccaggctattggagccacgtcgggataggcaccgtccgaacgctggctgtcgcgcatgtcgcccatgaacttgtggtagaaggcgacggtgttggcgttgtaggcagtcgtgcggcagaatatctgcgtgtcgcctgtccatccgagtcgttcgtcgcgctgcgggcagtcggtcggcacgctcatgaagttgccgcgctgtccccaaatgacgttgctgtaaagctggttcacggcgtcgtggcttgtggtgagcgacgagccttcctcgttgtcggcacctacgacaagtccctcgatgccggttatctcgatgtcgtcgcctgcggtgagctcgcagtagcggaatccgtagtaggtgttggtcgggctataggtctcgccttcctcgtcgccgcggagcgtgtagtacatcgaggcctttgccgtgcgcaggttgatgagatacaggctgccgccggggccgtcgtcgccacggttggtgtcgcccttgtcgttgagcatctcgctgaagcgtccgcgcagagtgcagccggccttacccttgacgttcactctcacccaacctaccatgttctgtccgaagtcgtagattacggtctgtcctttcttcagtgtgacgggcgagttgccgcttatctcggacactacgttcaccatgccataggcagtgcctgtctgtttcacgccttcgtagatggtgatgtgttcaggctggcgtgtcagcgatgtgcgtatgcgtgccgccggaccttcgaatgcgcatatctcgccggtgaagtcgcggctcgacgccgtggcgtgccatgccgactggtcgtatccggcctctttccaaccgtcctcaagagtggcgttgtaggtctcgccgttgtatatgtcgcccttgcgcagcgctccgttgtttgatgtcgcccatgagttgtcggtcacgatggcctccttcgagccgtcggcatattcgatgacgagcttcgccatgaatgccacaggcttgtcgccgtattgtccgtgggcgatgcctccggcccagtagccagacgttacggtcgctccgatggcgttgtcgccttctttgacgagtgtggtgacgtcgtgtgtgttgtagaataccttctttgcatagtcggtccatcccggtttcagctcgtcgtaaacggtcgttccgtcgtcctggacgtggcccacacgtgtgccgttgatatatacgtcgtatatgccgagggcagagctgtagagcttggccgactttatgggtgccttggccgtgaactctttcctgaacatcgaggccgctcccatggtgctctccatgaatctctgctcgccgcttgctacggccacatagagctgtttggagccgtcgtgctcctcaatggtgccgtcgaacaacggagcgtcgccctcgaagtcctcagacagacgcacggtctcggtgccgtcggcattgattgtcgtcactaccacattgtcggcataggccggaccttcgtcatctacgtgtgcgcggaagcctacgtagccatcgacaatcttctcagaggcggtgtatgtatcgacaagctgtttgtcgatgtatgtgttcaccacgtttcctttcacctcaatgcgcatgcggtgaggcttgccgagtatctcgtccttggtgaacgcgtctatgcgtgtgtcgctgtatgaaggtgttgagctgttgttgtacacatggcggcgtattgccggatagtcgtagtccttacagttgagcgcccacatgtagtagttgttcgaggcggtgtatgcgaacaccacagccacgttgcccttcatgagagtgatgtcggactctatggcgtagccgctgttgtcgtctgatgacgtctctttctgccatgcgaacacagagttcaccacaccctccatgcgcagttgtccgtcggtcactgtgccattgtcgaaagcgtagttgtcggcgttggcaaagtcctcgctgaagagggtctttccgttggcgatgaccttgatgttgtcccacagcgcaatctccggatcgctgttcttctcgcccatgtcggcgcgcaagccgagcttgccgtaggcaaagtcgccctcgcggtcgtctatgagtatgtcgttgatataggtgcgggcacgtttgcagttgtcgtaaacctctatgcgcagatggtatgtctcgttgttcttcagatcgacaatgcctgtcaggtccttgttctcaagacactcgccgcccggattccagcggtgagggcggaaacggggatagtcgccctcggtgttgaactgccacatgtagaagtgtgactggtctgtcgcggcgaagcacagacctgctgccacttgcgagatgttgaagtcggcggttatggtgtattccgttatgtcggcagtgtcggtgtctttctgccagcaatactggtttgatgatgttccctcgaagtagagacggccgtctctcacaacgcctgccgtgaaggtggagttgccttctgagaagtcttcggagaagacagacacgccacctacgctcacgttgaagtcgtcgtagtaggcagcctcatatagattttcggtgtattcggagcgtgcggcacggaaaccgagacgtccgaaggggaagtcgccgcggcgctcgtctatcagtatgtcgttgatataagtctttgcgagcatgccgttttcggttatgtcgatgcggagggtgtattcctcgttgttcttcaggtcgattatgcccgtcaggtcaacgtcctcaagacacgtcggagtgttgttcacccagcggtgaggacggaagcgtggatagtcgccctcggtgttgaactgccacatgtagtagttgttctcgtcggtcatgccgaaacacagtccggcagccacctgggcaatctcgaacttgcagcttatggaatagtcggaaatctcgtcctcgtctatgtatccgagcggattgttggagtattttatccatttcgctccgtcccatcctgtgcccatgagtccggtttcgaagtaagccttctctgtagaggtggcttcgttgcctttgttgtcggtcactgtcaccttccaatagtagcgcgttgacggcgcgaaggtgtagtcgggactgatcatcaccgactggtctgactcaacgatgcctgagtcccacacgatgttggagcagtcgctgtcgctgcacaccatgatgcggtagctcttctgcatcactccgcgctcgtccgagttcaatatccagctgaacgtcggcgccttgtctatgcccacgggattggtgagcgacagggtgcgcagcttttccacagtaagagcttgagccacccctgcgaataatacactcagtagcagcaaccatagtcttgggttgcctgatgagaaaacggttcgtctcatagttgtttgtttagtgaataatatgaaagtgaataataagtttattgtcgtcagtatatgtgtatatgcgtttcatgcaccgtgtgccgtcgtcataccacatcagtatagtcttcgtaggttctcactcccgtggccttttaccgttccgggtggcaggatagtgtttctgtgtcttttttacgcgccacatgcacagcggcatagtggctgtatgtcagattagtagttcttctcaaataataatatcagtcctataagaaagaacaaacgacatattcatcaatttgaatcattccttattttttttatattttttcacatttgacagggcaatatccttgccaagacaatgtaagtccggcggattcacaaccacacgggagcgggtttatacgtgaaatgtcacagaatatgatttatatggtgtaggagaggtttatatctgatacgtgaagggtttatatatgatgtatggaatggttatatatgatgtacgagagatttatatatgatgctggaaaagtttatatatgatgtgtgagaggtttatatatgacgtatgaaaggtttatatatggtgcgtaaaaagtttatatatgatgtatgaaaagttttttatatagtgtatggaacgtttatataatgctgaaacgtttttatattatgtgtgaaaggcagtggcgatgcaggcctgcaagattcacgaccgcaaggtgattgagtgatgataaactctccctgccgcaaccggtaaaccatctccgcaatcgcgacatatgcttacggttcgccggacgaatgttttccgtgcctctccttccttttgatttcagcgttttcaggcaaaacccgcatggcgtgcttacaatttttcttgactaaattttgacaaaataaattcgcaaaagaggtgtgaacgaatgttaaatcatgcataatacagcccgtttcgtgtcttatagcactttgatataccccataacgtagtccggaaaagtccgtttcgctttccgatattgcccatttcacattacgataaagcccgtttcagggtgcaatatggcctatttcagcacccaatatgggccatttcgcaagccgaaatggtgctttttgcaatgcggggaaatactccttaaatgtaattatctgatattcaatacattaacaaaacctctcataactcgcattttgcgcccgacgaagagcccgtccgcaaatactcgcttatttttcggggtagaacagaaaactgaggccgaaaaaacgaaatccgcttacaatctgaaagtgccacgtaccggcatcccctcaactgaaggaaagacgccgtctcagacttaatcacaaaccgtcatcagaccgcaggcctttgtccccgtattgaaactggtccctttttctttctcacggccccgatataaaccttaaatctacgtttcctgtttcggtaaatacagatgtcccgcgcttgtagttgctgttatttttcctatatttgcaatataatattgttgcaatctattgttcggacatgaaaaaacataaattatgaaaaagatattaggattggatctgggaacgaacagcattggttgggctgtggtgaatagtgagaacgacgaaaacggtgatgaaaagataaagtgtatagaggcagccggaagtagaataataccgatggatgctgcgacattgggcgactttgcaaagggcaacaccaagtcgcagacaaaggaacgtactgatgcaagaggcataagacgcttgcacgagcggcatctgctcagacgcgagcggctcaacagggtgttgtctgtcatgggtttcctgcctgagcactatgacaatgcgctcacacgatatggaaagttcaaggacgacaaggagtgtaagatagcatggaaaagaaacgatgacggcaaatggactttcattttcatggattcgttcaacgagatgctgtccgatttcgctgcctgtcagccagattggttggccggagggaaaaaggtgccttacgactggactatttattatctcaggaagaaggctctcagtcgtgcgcttacaaagcaagaacttgcctggctgttgcttaacttcaatcagaaacgcggatattatcagctgcgcggtgaggacgagcaaagcgatgacaagggaaagctcgtggagtattatgccgtgaaagtggtggatgtcaaggataccggcgagaaaaaaggcaaagacacgtggtttgatgtcattcttgagaatggaatggtgtatcaccgccctgccgctgaggctcccgattggatagggaagaccaaggagtttattgttaccaccgatgtggagaaggacggtacgccgaagaaagataaggacggaaacataaagcgctcgttcagaatgccgaaggaagatgactggacgctgataaaaaagaagacagaaagcgatatagacagttcgggcaagaccgtcggcgagtatatttacgattctttgctggcagaccctacgcaaaagataaagggcaagttggtcaggaccgttgagcgtaaatactataagagcgaactaaagaggattctggattctcagaaacgattcatacccgagttgaatgacagaacactttatacggcatgtatcgaggaactttacgagagcaacgatgcttacagacagtcgatagcctcttacgacttcacatatctgtttgttgacaacataatattttatcaaagaccgctcaagagcaagaagtctctgatagataactgtccgtatgagagccgttcgtatgtggacaaggagtccggcgaggtgaagaccgcacctgtgaaatgtgtggcaaagtcgaatcctttgttccaggagttcaggctttggcagtttataagtaatatcagaatatacgaacgccagaagattgtggatggtcatctgaaggcggatgtcgatgttacgggcgagtttataaaggatgaggacgacgtcgtgaggcttttcgactttcttaacgaccgcaaggagatcaagcaagactcgttgctgagcacttatttcaaggtgaagaaaccgaaaggcaaggacagtagttatccgtataggtggaattatgtggaagacaagacctatccctgcaacgagacaagggctctgatgttgaaaggtcttaaggatgccggggtggacgaggcatttctcgacaagacaaacgaataccgtttatggcacattctttactcggtggatgacaagcaggagataaagaaggcaatggctacgtttgtttgtaaatacaataaagatgaagagaataaaagaaaggacaagaacaataaagcaataacccttgatgacaggtttgttgaggctttcagtgccttgcctccgttcaagaaagaatatggctcttattctgagaaagccatcagacgcttgcttccgctcatgcgtatgggcaaatattggaatgtggaagctatagacgcagccaccagagtgcgtataaataatattattgatggtgtgtatgatgagactatcatgacacgtgtgcgtgaaaagaccgtcaatcttaccgatgtgtcacatttccgtggcctgccgttatggctggcctgctatgtggtttacaatcgtcacagcgaggcaaaggacgtcagccgatggaacagtccggacgatatagaccgctatctgagcagtttcaagcaacattcgttgcgcaatccgatagtcgaacaggtgataaccgagaccctgcgcaccgtgcgcgatatatggagacagtatggcaggatagacgagatacacgtggagatgggtcgtgacttgaagaatcctgcagacgtaagagccaaaatgtcaaagcgtgtggcagagaacgaaaatgcaaacctgcgcataaaagcattgctcacagagtttgtgaatcctgattttgaaatagacaacgtgcgaccttactctccgtcacagcaggatatgctgcgtatatatgaggagggtgtgctcgaaagcatggatgaagtgcctgattatataagcgagataataagcaagttcagccagactgatgagaagaaacgtcctacacatgccgagatgataaaatataaattatggctcgaccagaaatatcagtcaccttacacaggccgtaccattcctcttgcccgtctgtttaccgacgattatcagatagaacacgtcattccgaaggctcgctatttcgatgactccatgtcaaacaaagttatctgtgaggctgaggtcaatcagctgaaggaccgtttgctcggctacgagttcataaaggcacatcacggtgagaaagtttctgtcagcattggtgatccggttaccgttctttcggtggaggagtatgagcagcttgtacagagaaacttcaggaagaatcctatgaaaatgaaaaaattgctcatggacgacattcccgacggttttgtggaacgtcagttgaacgacagccgttatatcagtaaggtggtgaaatcgctgttgtcaaatatggtgcgtgagaaagacgagtgtgaggcaacgtccaagaatgtcataacatgtaatggcgccataacagacaggttgaaacgtgagtggggcgtcagcgatgcatggaatcgtattgtgcttccacgcttcgaaagattgaacaggatcaccggcacaagccaattcactactccgagcgctaacggacatctcataccggatatgccgctgaatcttcagaaaggattcaacaagaaacgtatagaccatcgtcatcatgcaatggatgccatagtcatagcctgcaccacacgcagccatgtcaatctgttgagcaacgaagcagccatgtcaaagaataaatcaacattctatcagctgtctcataagctgcggcgctacgagagtgtcatcgttacacgtaatggtgagacgcgtaccatgagtgtggcgcgtgagttttttaagccgtggcccacgttcacggtggatgtagagaaggccttacgtaatattattgtcagcttcaaacagaatcttagagttatcaacaagaccactaacaaatatcagtgcatagagaacggaaagaagaggctcaagtctcaggtgaagggcgacagctgggcaatacgcaaacctatgcataaggacactgtttatggcgaggtgaatctcagacgcatcgatgaagtgcaactcaaaaaagcagtggctaatcctaaggctgttgttgacaaggatctgaagaagaaactgatggcaatgatagaattaggattcgacttgaagaagataaaacaatatttcgaagacaacaaggacgcatggcaggatatagacctgaagaagataaaggtttattatttcaccaaagagactaacgaccggttctttgccactcgtttcggtaacgatatagtatctttgttcgccaaggttgataaacagtccaaagccaaggatattataagcagtataaccgatacaggaattcagaaaatactgctgcgtcatctcgaggcaaacgataatgatgttcagaaagcgttctcggcagaaggtgtagaacagatgaatcgtaatattgtggaacttaataatggtaagcctcataaacctatttataaggtaagaaaatatgaacaggctgataagtttgctgtaggcgtcaagggcaataaaggttctaagttcgttgaggctgccaaaggtactaacttgttcttcgctgtttaccagaaagaaatggtggacagtactaccggtgatataataaagaaacgcatattcgatactattccgcttaaaacggtgatcgacagacaaaaaaacatgcagactgttgcacctgaagagaaagacggagccaaactgttgtttgtgctttcgccaaacgatcttgtttatttgccaacagacgaggaaatcagtagcggtattataaatcagccgttggagagagataggatatataagatggtaagttgtaccggctctaggttatattgcataccttataatgtagcaaatccaataatagataaagaagaatatactcagctaaataaagtcgaatttacggatatgaaaaaatctataaaggagatatgcgtaccgataaaagttgatcgattaggaaatgttattgaaattaataatcaagcattatgataaaacgcacactgtgtttcacatccccggcttacctgtcgctgaaggatggtcagatggtggttaggctgccggaagttgagaagagcgatatgcccgagagtctgaaacgtgacagcataagaaccataccggtggaagacatcggtgtggttgtgctcgacaacagacagataaccattacgcatggtctgctcgaggcgttgctcgagaacaactgtgccgtggtgacgtgcgacgcacgcggcatgcctgtcggactgatgctgccgctgtgtggcaatacggtgcagagtgagcgtttccgccttcagaccgatgccacgcttccgttgaaaaaacagttgtggcaacagacggtgcgggcaaagatagctaaccaggcggctgtattgcgcttgctcaccgatgctgatactgggtgtatggcgcgttggatagacgatgtgcgcagcggcgacgccgacaatctggagggccgtgccgccgcttattactggaagatgttgtttgccgctatccccggactcgaatccttcacccgtggccgcgatggcatgccgcccaacaatctgctcaattacgggtatgcgatactgcgtgccgtggttgcgcgggcgttggtgtcgagtggtatgctgcccacattcggcatacaccatcacaaccgctacaatgcctattgtctggccgacgacataatggagccttaccggccgtacgtcgatcgtcttgtgtatgatattgttagagaaaacggcatcgacggacttgaactcaccaggcaacacaaggcccggcttctcaccattcctacgctcgacgtctgtatatcaggcaagcgcagtccgctcatggtggatgtcactcagaccacggcgtcgctctaccgttgcttcagcggcgagtcgaggcgcatagcctatccggaaataggttgaatgtttcgggcgctgtaccgctctgccatttatatgaattattatttatcatggaccgctttagtgaatatcgcgttatgtgggtgcttgttttctttgatttgcctactgagacaaaaaaagacaagaaggcttacgctctttttcgtaagaatctgcagcgtgacggtttcaccatgttccagttctccatctacgttagacattgtgcgagtatggagaacgcgcaggtgcacattaagcgtgtcaaatcgttcttacccgaatatggcaatgtgggagtgatgtgtatcacagacaaacagttcggagcgatagagttgttctatggcaaaaagtcgaagccacctaatgctccaggtcagcagctcgagctattctgaatatacagatttattgttttttaactttatagcaagtctgcacactttaatcattccatacaataatgttgtctttcggaatataacagaaataaggaaacaccgtcttgtttgcgatgtttccttatttctatatcagttttatgtttctgatacatcacataatcctttgctgctcagcttgttatggataatgtgctgttgcttatatagcaaaggtaagaattttagagcaaatcacaacattcagtcttaagttgtatgccggattttgctgttgcttatatagcaaaggtaagaattttagagcaaatcacaactgttcagataatccaaagttatctgatattgctgttgcttatatagcaaaggtaagaattttagagcaaatcacaacatgttagatattgaggtgatattctaaaagctgttgcttatatagcaaaggtaagaattttagagcaaatcacaacaatttgaggtcaaacaaaactttgatgcagctgttgcttatatagcaaaggtaagaattttagagcaaatcacaacaaagaacgttgttaatggtgatatgtctcggctgttgcttatatagcaaaggtaagaattttagagcaaatcacaactgagcaaaatcaatggaatcttgaccagtggctgttgcttatatagcaaaggtaagaattttagagcaaatcacaacattaagcaggaagctaatcaacgtggtaatgctgttgcttatatagcaaaggtaagaattttagagcaaatcacaacacagagaattactaacatcacttccgaaggctgttgcttatatagcaaaggtaagaattttagagcaaatcacaactaagacaaggtgatgaaactcacggaatgtgctgttgcttatatagcaaaggtaagaattttagagcaaatcacaaccgtcctcgatggaggaacaggtcgcgctcgctgttgcttatatagcaaaggtaagaattttagagcaaatcacaacaagttgtggatgtcaagtcatgatactgcagctgttgcttatatagcaaaggtaagaattttagagcaaatcacaacatgacttgctcgatgctggtgttcctcttgctgttgcttatatagcaaaggtaagaattttagagcaaatcacaacatgaactatagcgaggaacaaatccgaatgctgttgcttatatagcaaaggtaagaattttagagcaaatcacaacagaaacttacatttgactctgaacagaagtgctgttgcttatatagcaaaggtaagaattttagagcaaatcacaacaagataaccgaaaaagtgactatttacatgctgttgcttatatcgcaaagttaataattttcaaagcaaatgcccataatcaatcccgattatttttattctgaaaaacaatcggacaatattttctgatcaacttatttcgtgtcacttctccatactgttgggctctgtttttctatttcgtgaatagtgtttgtcaaaagtcttacttttcatgttgcgtgaatatatggttatgaggaagaaaagcattgttccgcatcattccaatcgctacgcgttcgggcctgtttctgccgacagttccggtttcgtgtgcctatgctttatggatcggtaggcaagtttttgccacattattatatatgatgcgtcgttttattatatgcgttgcattgctttcgccccttccatgcccgccacttgtatttcgattgttgccattatcgctccgcaataggttttattatgcgcccggcagttattattcctgtcgttcgtaattgtgcagtccgtctgtacacgtccggctcatggccgttccatccaccgtattatggtctcaggagagcattcagcggttgtcggttttatatcatattacaatgaataatttattattatacagtcattatgcgtaatctgacactgacgatatgcggtttatgtcactttttatatatccgactgccgtaccgttttatgctgcgtgccactgcgaagacggctttttgccggcgtatcgtgcctgttttatgcgtattgtgacactttcgggagcggttcacacattaatatatgactttctgtatggccttttcagtgttgtatcaaaatgcgaatgttttcagtcaaaaaatatatctgcattactgtatgttattactatatttgccatgtcaaaaaaagtctaaactattaataaccggatgagcaacaagaaagagtgtttcttcgcaatcgacctcggagcaacgagtggccgtaccataataggcagtttccaatcatcggaactggagctggaggaggtgaaccgttttccaaaccatctcattgagaacggcggacgcttctattgggacatatacgagctgttccgcaatgttgtcgaggggttgaggctggttgctcgccgtgacgactgtgagatatgctccataggcgttgacacgtggggcgttgatttcgtgtgtgtgggcagcgacggagctttcctgcgccttccgcgtgcctatcgcgacccgttcaccgcgggtgctgccgagcgtttcttcgcttcggtcccacgcgagacggtttacagacagaccggcatacaggtgatggacttcaatactctgttccagctcgacgccatgcgccgctcgtcagacagtgcgctggctgccgctgacagactgttgttcatgcccgatgccatgacatatatgcttacgggcgagatggtgaccgaatataccattgcctccacgtcgcagttgctcaatgcatccacccgacggtttgagccttcgctgctcgctgctgtcggactgacggaggacagtttcggacgtttcgtccttcccggccggcaagtgggcgtgctcacgcccgaggtgcagcgccagacagggctcggccccgtgcctgtgatagccgttgccggtcatgacacagcgtcggcagtagccgccgtaccggccgccgaccgcgactttgcttatctcagcagcggcacctggtcgttgatgggcatcgagaccgacgcgcccgtcatcagtgccgacactcaaaggctcaacttcaccaacgagggcggtgtcaacggcaccatccgtctgctgaagaacatttgcggcttgtggattcttgagcgctgccgtgcccaatggggcgcagtgccctacgacgtgctgatagacgaggcacgtgccgccgagccgttccgtagtttgataaatcccgacgaagcttctttttcaaatccgtccgacatggtagagaccatacgggcatcctgccgcagtcacagacaacctgtgcccgatacgcgcggacgtctggtgcgttgcatattcgagagtctcgccttgcgctaccgtcatgtcttcgacagcctgcgcgggctctcagagcgaccactcagcgtgctgcacgttatcggcggtggcagttgcaatgaactgttgaaccaatggacggccaatgccaccggagtgccggtggtcgccggaccgtccgaggcaacagccataggcaacatcatgttgcaggccatggctgccggtcatactgccgacttggcgtcgatgcgccgacaggtgcgcggctcggtaaatctgaaaacctacatgcctgccgacaccgccgtgtggaacgaggcctatcgcaaggctccgttcgccgtctgagcgcgtcagggctgtgatttacggcgcatgaacagggcgcgacaccggctgccgcgccacgaaaaacgataatttacacataaccataaaaatacaaaaacctgattatgaaagaacaactgataaacaaagcctacgagatagccaaggaacgctatgccgttctgggcatcgatacagacaaggcgatggacgccttgcagaatatttcattgtcaatgcattgctggcaggccgacgacgtcaccggattcgagtcgggcggcgcgctcacgggcggcatacaggctacgggcaattatcccggcaaggcgcgcaacatggaggaagtgcgcatggacatactgaaagccatgtcgttcatccccggccgtcaccgtctgagtctgcacgagatatacggcgatttcggaggaaagtttgtcgatcgtgatcaggttgagccgtcacacttcgagagctggatgcagtgggctgccgaaaacggcataaagctcgacttcaattccacctctttctctcatcccaagagcggaaacctctcgctggcaaatcccgacaaggccatacgcgacttctgggtggagcacacggtgcgctgccgcgccatcgcggaggagatgggacgccgccagaatgacccctgcataatgaacctatggatacacgacggcagcaaagacataacggtgaaccgcatgatgtatcgcgaactgctcaaggattcgctcgaccgcatcttcgcaaccgaatacaaacacatgaaggacagtatagaatctaaggtgttcggcataggtcttgagagctacaccgtgggttcaaacgatttctatataggttacggcgtgcagcatcagaagctcgtcacgctcgacacaggccacttccatccgacggagagcgtggccgacaaactatcttcgctcctgctgttcgtgccggaggtgctgctccacgtgagccgccccgtgcgctgggacagcgatcacgttacgataatgaacgacgacacgctcgacctctgcaaggagattgtgcgttgcaatgccctcaaccgcgtgcacataggtctcgactacttcgacgcctccatcaaccgcatcggagcctatgtcataggaagccgcgccacacagaaatgtctgcttcaggcgctgctcgaaccgctcgacacgctgcgccgctacgaggctgaggacaagggcttcgagcgtctggcactgctcgaggagtgcaagtcgctgccatggaacgccgtgtgggatatgttctgtctgcgcaacggtgtgcctgtgggcgaggaattcatagctggagttgatgaatatgaggcagaagtgacctcaaagcgtaaatagtttaaggttgttttgtcatggacattttgttagggttatttataattgcagtcggcagtttcggtcagagcagctcgtatgtgcccataaacaaggttaaggaatggtcgtgggagagcttctggttggttcagggcatctttgcatggcttgtgttccccttgcttggcgcgttgctcgccgttcctgcggacggcagtctgtggcagttatggagttcgggcggagcgcttcaggccgtcatctatggtgttctctggggtgttggcggcctgacgttcggcctctccatgcgctatctcggcgtcgctttgggtcagagcatagctctcggcacgtgtgcggcgtttggaactctctttccggcgctcttcgcaggcaccgacctgctccgcggcgacggtctgatgttgctctgcggcgtttgcatcaccattgcgggcattgccgttataggttatgcaggcagcctgcgctcggccaatatgagtgaggaagagaagaaggcggcagtaaaagatttcgcccttaccaagggtctgcttgtggccttgcttgccggagtgatgagcgcatgcttcgctctgggtctcgatgccggcggacctatcaaggaggcagccctcaatggtggcgtggatccgctcttcgcaggccttcccgtcatattgctcgttacgctcggtggattcttcaccaacgccgtatattgcatacaacagaacataaagaaccataccggccgcgagtatttcgcttgcagcggtagcgtgctgaccaacaacgtgcttttctgtgcccttgccggcttgctgtggtactcgcagttcttcggccttgagacaggtaagagcttccttaccggcagtccggtgctgctggcattctcgtggagcatcctgatgtcgctcaacgtgatattcagcaacgtctggggcatcatactgaaagagtggcgcggctgcggacgcaaggctgccggagtgcttgtcgcgggcctgctcatactcatagcctccatcattgtggtggccatggcacagcagtgacgggcctgtaccgcccgacccttcggatacgaacggtgaggcgggaggctcgacaatatgatatgacaatgcgtttacaggctcacgggcggcgattcttcccgtgagtgtgcataaacgaactataaaatccggactgcctgcggtgctgtcagtattatatgtaaattgatgtaatgctgcgtttgtgggtctatgtgagtgataacgtgccgtatggcatttccggaaaacctttgtatggcggacatatcgctgcagcttggccgtcgtcgcggcttgtttgtgctgcatccattgcttacttgatgacaatattccgattatccgtcctgtgttaaaattaatgatgatgaaaacaaacgaatctgtgatagtgagaaagacattgttcctgatacttgtcttgtgtctgggcttcacctgtaagctcatggctgtggacaatctgtgctgcgagatggttgtcaatcctatgggaatagacatcgtgtcgccgcgactgagctgggaactgaacgataagggacgcaacgtgatgcagacttcttatcgcattctcgtggcttctgcgatggataagctgaagcccggcaaggcagatttgtgggactcgggcaaagtcagttcggacaattcggcgtacataccgtatggcggagtggctctgaagagccgtatgacgtgctactggaaggtgtgcgtcaccacgaacaagggcaagtcggaatggagcaagcctgcccgctggacaatgggactgctcgacggcggcgaatggaaggcgcagtggatagggcttgacaaggctttcgagtgggacgatccgacagctgactgcacaagactgtcggccagatatttcagaaaggatttccgcacggcgcgccgcccggcgaaagccacgttatacatctgcggacttggtgtttacaagctgcatatcaacggcaagaccattggccgtcaggagctggcacccactcctactgattacagaaaggaagtgaaatacaacacgttcgacgtgaccggcgagataggcaagggcgacaatgccatcggagtgattgtgggcaacggccgtttcttccatatgcgccgcaccgacagggctgaatttccaaagctcatcgcccagttggaacttgagtatggcgacggcagccgcgaatatgtggtgagtgacgcgtcgtggaaggtcacatcgcacggagcgataggcgctaacaacgagtatgacggcgaggagtatgacgcacgccgtgagatgccgggatgggacaaagccggattcgacgactccgcgtggctgcctgtggatatgactgccgcaccggaaggaaagctcggcgcgcagataaacaataatatacaggtgatggacgttatcagaccgacaggtgtcacacgccttaacgacaacacctacattctggacatgggacagaacttctccggacgcctcaagatgaaagtcaagggtgagcgtggcagggaagtgaagctgcgcttcgcggagttccttaacgatgacggaagcgtcaatctggacaatctgcgcggcggactcgccaccgacaaatacacactgaagggcgagggaacggagacgtgggtgccatgctttgccattcatggcttcagatatgtggagataaccaattatcccggtacgccctctattgatgatttcgagggacaggtgctttacgacgacatgctgcagaccggatatttcgctacttctgactcgatgataaaccggatctaccacaacgcctactggagtgtgcgcagcaactaccgcggcatgcccaccgactgcccgcaacgtacggagagaatgggatggacaggcgacagagccatcggatcgtacggcgagagcttcctcttcgacaacaataatctgtacgcgaaatgggtgcatgacatacgcataacccagcgcgaggacggcagcgtgtccgacatcgctccgagctaccggagttcttacactgacaacatgacgtggcccggcacttacctcacggtgtcgaagatgctttacacgcagttcggcaacatacaaccgataaccgagcattatgcttcgatgaagaagtggctgtactatatgcgcgacaagtatctgactccggaccatatcatgccgcgtgatgtttacggcgactggtgcacaccgcccgaagtgttcaccgccaacgacccgcagataccgtcgctgattaccgacaaggcggtgataggtacggcttactattattatatgctcaagaccatgtcctattttgcctcccttctgggcaaggatggcgaccgtaacgagttcgacgaacaggcggctgttgtcaaggaagcctacaacaataagtttctggataaggagaagcgctcgtacagcaacaacaccgtgacgtcgaacctgctggcgctaagcttcggacttgtgcccgacgactatcgtaacgacatagccggcaacacggtaaggctcatagagcacgacttcaagggacacataagcaccggagtgataggatgtcagt

SEQ ID NO: 1065 - DNA, 24638 bp, synthetic construct
  source 1..24638: mol_type = other DNA
  misc_feature 1..24638: note = Synthetic
ctttattatgagcactatagttagaaaaaacttcgcatcgcccggtgaacctgactttgttggtggcgtaggatatcccgtccctcattttagcaatttctctatatggatttacaggaaccactacggtgttatgaaacttgacgagattacagaacaaaattattttaacggcgaagtggttcaaaaaacctcatccaaatcttatagcggccagccttattacaagctattatccgaaagttcaacaaactccgtaggtcaatctacgcaaactacttataaatatgcgcaggatttagttgggaccgagcaatcaccctacatgcaacaattagttactgcctacaggatatcagagccggtaatcgtcaaaacatacgttaacggttctaaaattgcagaaaagcacttcaagtacgaaagttctgccaataccggaaatctcctgttgcctatagaagtgcatacaaacaagggggtatctgatattgcgataagtagcgcgacagaccgaaaactatcatttacaaaatatgataccaatggcaatttgctggaatacaaaatggaagacggtgtgccagtaagcataatttggggctataatgcggaatatcccatagctaagatcgaaaacgccttgtatagccaggcttctgcttatgtttccgcacttcaaaccgctagtaacaatggcacccttgctcccgcgtctttctcaggactacgtaacgcgctgccaaatgcaatggttaatacttttacctataagcctttactgggcatggcgagccaaaccgatatcaaaggggatacaactacattccactacgatgataacggtaacctgaaatttgttaaagataagtacaacaatcttttagctgaaagcacctttcactttaagccataaaacattacagatgaaaacatttatatattcttattttctgttgttgctgcctttaatatgcttcggacagctgcctactgatcaaaactacacaaggtctttaatttataaggattcaacacaggttagcgacggttcaaaagcgaatatcgcagtggtatattttgatggcttaggacgggcaaaacaaaaaatttccggaaagatgagttccacaggaactgatttgatcacattaataaaatatgattcactgggcaggcctgttaaagagtatttaccgtatgtctcttcgactacaaatcaggcatttgacaccgatgcactcacgaatgtgcttgagttttataacgaccccgcttttgaagaaacacaaaatccttacaccgaaaagttttttgaaaattcacctttaaacaggatcaaaaaattagcggcagcgggaaacgcatggaagggcaacaatagcaatgacatcgaccataccgtgaaatatgcctatttaaccaatacggctaccgagttaaaaaagattacggctaccgcagcgtggagcagtacctacaatttgtatacaacaacttttgtagctaatggcaattatgcgaaaggtgaactctacaaaacaataaaacaggatgaaaacaaggccgctgctgtttacacaggaatatcatcttcctctaatattggtacgacgcatgagtttaaggataaagatgggcggcttatacttaaaagattctatgatatacttgtagttgatggttcggctgaaacagcaatttatgaaacatattacgtatatgaccagtttggaaacctaacctatgtactacccccggcaacaggtggtactttggttgaagagttatgctaccagtataagtatgacagttacaacagggttgtcgaaaagaaggtgcctggtaaacaatgggaattcattgtttatgataaaatggacaggatcgtttctacgggtccggtatttacgccatttggagggttagaaacaggttggttggagacgcgttatgacaaattcggacgtgtagcctacaccggttatcttgcagcaacacccgtaagtagtacaacccgcaaagccaaacaagcggtattatatagttacgttaacaaaacatcaacgcccacaacgattgatgggattggagtacattatgatgccttccctactggcataaagatgctaagcgtaaattattacgacgattatacatttcccaacgcaccaacatcttttcctagtatagagagtcaggctgttttaaacaatagcactagaaaacctaaggggcttgcaacaggaagctgggtccgcaccctacaaacaggaactactattggcgaagccagttacattttgtacgatcttaaaggaaggcctgtaagcagtcgtgtcaccaattatctgggaggttatacacaatctgacagcaaacttgatttcgacggcaccgtaagttatataattaaaaagcataaacgccttagtaccgattcgaatgaaattaaagtaaatgaaagatttagttataccccacaagacagactgttagcacatacgcacaaaattggcgaactcagtccacagttgatgagttataacacttataacggcataggacagttagaaacaaagaaaactggaggtaacgactttagtggtctatcttctcttcaatcgatagactatacctataacatacgcggttggcttaaaggcatcaataacgtgggatcattaggcaacgatctctttgcttacaaattgaactacaatacagtagaagagagcatcaataacaatgtccgaccactctataacggtaatatttctgaaacattttggcgtacatcaaatgacaatataaccaggaagtacggttatagctatgataatatgagtcgcctgaccgcagcttactatcaaaaacctgggcaagctgtaacccttaacaattcatataatgaaaaggtacagtatgactttaacagcaatattattagccttgccagaaatggtgggcaggacaatgcttccttggttgtagaaattgacaatcttgcctacacgtacgctcctggaaccaatcagttaaaaaaggtagtagatagtagcggtaatccaagcggatttaaagacagtactgataatacgggcgatgattttacctacgataacaatggcaacctgcttactgataaaaataaaggcatcaccgggattatatacaatcacttaaatctgcccgtacaaatcacgttcaataataatgcgagtacaaaaattacctacctttacagtgcgacaggcgttaagctcaaaaaggttgtcacaaacggaacagataccagtaccgattatttagggggctaccagtataagagcggtaacctgcaattctttccaaccgctgaaggctatgtaaaagcgaccctctcaggctcggcctataactatgattacgtttttagctttaaggatcatttaggtaatgtaaggttaaattacactgcaaacggtagtggtgtagccatacttgacgaggacaattattatcctttcggggctaagcatacgggctacaacagcacgatgtatacggtaaatagtggtatgttggttgggattataaatccgttcaacaactaccagtattacaacaaggagctacaggatgaacatggattcaacatgtatgactttggggcacgtaactatgaccctgcgttaggaaggtggatgaatatcgaccctttggcatcaaagagtttttcatacagcccttaccagtatgcgtttaataatccggtctattttgttgatatcgatggcatggtggttcaggcatctactagatttcagggcccaggggatgacaagaaagaagatcctgtggtttcggcgggagagcttaaagaggttgtaattactattgaccggtcaaaaccagcagatgcaaaaggctcaataaggtttggcgactttattccagattttaatttagcacatgcattttttggaaaggatctgtataaaagttatgacaacgtttttgcttcggaagatgggagaaagttctatcaaaatcttcataagaacgatgagaaagaggcgagaatatatgcagaaatagtagttgggtttttagttccgggcgttgttcaaatagtaggagaattaggcagtattgcattagtaggtgaagaaattgcagttatagggactgctgcggaggaagggattgtagcagcagttgaggccgaagaaatggctgtagaaggcatatatgaatttactacgactacaggcgaaacctacgttggacaatcacaaaatatagcacaaagacttcagcagcacattgctaaaggtaagctagcgccgggaacacctgtaaaaacgacagaggtccttggtggaaaaactgctagagaaattgcagaacaattaagaattagggatcttggcgggatagaaaaacttgcaaataaggttaaccctataggcaaagcgcgacaatatttattaccaacaccataatagtaatatgaacaatatagaatttgaatctggaacttatggcaccaaagctgtaattagaacggcttgggatgaatctttttttcaagtgttaatggacaaaaacgtggttgaattagagttaaacgatggtaaaggctggcgaggcgatagcgtggattttttacgttcctttccacaattaaaagctttaaccctttttgactttaaaattaaatcaattagtgcgatacatcatttaaatgaattaatagaaattaaactttcaacttattcggatgaaccggttgattttagtttatttcccaatctgcgtgtatgttcatttgaatggataaagggatctacttctctatttaatagtacgggactaacaagccttttcattaacagttttaatgaaaaaagcagcgttttgttttctaaacttattaatcttgaacaactagcagtattgaatgcgccagttgaaaatattaatggattttttacgctaacaaaacttaagtatttgagaatagcaaatttaaagaaaatcacatcagttgaaggaattgcacatctgcaacagctggaaaaattagagattcattcatgtaaaggaataaataatgtttccgaaatttttacgcttaccaagcttaaacatcttttccttcttgacatcggtaatattgccagtattaaaggaatagaacatttaagtgatttgagagattttatcttttatgagtcaacgaatgtattagatggcgatatatcacctgtattaaagttaaaaaaccttacaaagatatcttatcaaaacaggaagcattacacccataaaagggaagaatttggtaaaatgtattttcaataatataataactggctgttttactttctttacgattgaatagattcaactacacctcgaatttatgttagttgaactggctgacccttaaaagttggccagtttttttatgcttcaccttagtggtatccccctgatctcattcatgccgttcgtacggtgtaaattccttggtaacggtgctacaggtgtatttagaattattactctttatcaatatacttccatacaaacccattccactgcttgtagattcccttggcaacatcgataatagctttgtctgatagccgaagttcccttgatgcctctttaatactcctgaattctttgaccaagttaccgtcgaggtcatactgtgcaacaggcttactcgtcgcatagctttttttccagccggaacggtcagcagtgctgaggtgatgggtcatacggttcctggcaatgacgcgttgttgtttctcttttttggataccagcttcaggttttcaggacggttattatagccgtttgcatcaacattaataacatatagcccggttaatttataatccaatttagggtcaataaaggcttggtatatcagccttcgggtattaaaataattgtatttgttctccaatagcagcgtaacccttagatcaaccatcggctcgccagtaagcaagtttttgtttttaaaaaccgattggctcagtacacgcccctttacaaattgagttttcaggcgcgggtgcggtattgtccggtcaagcgattttatcctgcctaaattggaagcctggtaataaccctcaaatcctggtacatctttccatacttctcccggcagatcggccagggatttattgcggtactccgtatgtatatcagggtctgacatcagtttttaacctgcaatttacgaaatacatgagttcaacaccacattcagtaaccctacaaatgcgaaatagctattggttatccttttgacctgatttgacataggctttctccatcagtttttttgtctctttgccgctatggttatatagatagttccatgatttgcgtaaccggtcattttcaagctgcttaatgataacttgcttctgattatcactgtggtgaatgctccaatcgtataccttggtgattaatagcattaatgccagccataaaagccagcggctaaaaacaaccttataaaacagcttggcatcctgctctgggaatagcaacacctggaattttttgacggtactctttggctgctcgcctaccatttcttttattttcattaattcttttaacaggatctgctgtagcggttttacatcacctgtatcctgtaccggcattggcttgtccagttcccgcttaaggtcatccaccttactgccgatggtgttaacggcagtcaccaggtcgttcatggtttggttggtggctttctgttcctgggtgaactcttccaagaccagctctaaagtttctttgtctatctgttcattttttcctgtagtgtccataacgatacgatttaatattacctgcgtactttctgtcccggtttctttttatgttttttcttggcctccctaatcaactcggggtcaacagtatccggcgcgtattccggcatcagtaattgtgatagcataccggtaagctgtttttctatttctccgatggattcccctataaaattattagcagttagcgatgcatttacgctggcaggtgccatagacggcctgttaccatccgtttgactttgccctttaaacctgtttacggccaactgctgctggatgcttaaagcctgctcgatcttcgccagcgaaaaaccgacctcactgcccttaacctttaccttcttatcatcaataaaagatatgccccggcctttaagtacggtgtaccctaaggcctgcatctgcttttcaaaggcagcgaaactggaaacgttttctaaggactgccggatgtcatcccgtaacttctccttgcgtttgtcgtggcggggcaatgacctgtctttaggggataaaaaagcacgcgggcttaacacctcctgcaagccgtactgcttctctaaacgacggcaaagatctgccattcgcttatagctgttgctatcgctggctaccttgccatccagtcctacacggttagcggcaatatggatatgctgctctttggtatccttatgcagtacgcagatatactggttatttgccacaccaaattccctggcgcaagcctgtccgatttcaataagctgccctctgcccagcgtctcgccgggagccagccgcagggacaaatgcagtaccggtttttcaatccggccgctcagtttctgcacatcactgaactgctcggtgagttcttttttattgccgaaacactgattatattccagcacctcggcacgccctgtgtgctgtagatcatcctgcaatgacagctcttgtttcagctgctccgacagctcttttttatcctccagtacataacggatcaggtggtaaaaagaggctccgatggatacatggccgatcattgcaaatagctttttatagtcaccgcgatctctttcacctgcccggattgcacctttagtgccgctcgttccaaagggcttaattcatcattactgttccgctttttggcaagctggttcaggttcgcagccaggtggttgagcgtggcggtaaagcctaaaacctctttgggtaaagccttgtttcgcctgtcaatctttccggtaagccccatctcgcgcaggaactctgaaatggttaagcctacactttttgctttggcctcgatcactttacgctcgtaaagtgtgcatttgatcgccataagctggtctctcttaatagcttttgggggtctcccccctttattcctttgagtttcattcaatccttccatcactttccctttcatcttttatactcagtttttcgaatgcgcagcatgagaaaaatccctcaccgaatgcgatagcatgaggtgagccagcgttttggttttaccaaaacatagctggctactcactcaaatgtcaaaaagacctcctaatcctctgaccttgctttaattccggctgtttgctttgaagccattcgtttacatccttgaagccgctgtaaaaatcactgcggtctatatacttatcctgcttgccggtattccatcctaaagctttcttcgtcgctttggtgccagcaccatccctgtcgagtatcaaatgcacacgcctatagccctccatcagttccctgctcttttcaaaaaaagaaagggagtttaacaccaggcaatttgtcagaggggatgctttgttgcggttgatcgtctgaaaagacaggaagctaaaaaagccctcgaaaacagcaaggtcatttgatggttttgcagccaataaagtgaccgctttcggtgagctgctgcccttgaaattttcacttcggagttcatatccaccggcaccattttggaagccgacgacggtatgttttctaccgtacaaaaggaagtcaacctcccggcaaaaatggctcgcaatgtctatcggtatgctccttttttggaggtaatccaagagctttttatctgccaattgacgggtttcgacaatgacaattttgctctcggcattctcttttttaccatcggcaaatgatcgttgtgcagcatttcgattggctgctttctgtggctggtgaaaaggaaaagaagggattgcctgacccgctaattgttgcagaaattcgttagcagtacacttaaaatacaccgtgccgaaatctatcagattgccgccttttccctccccgtggtcgtaccatacatttagattacggttaaccttaaaagagggtgttttttcctcccgtaacggggagtgataccaataatcggaaccgtttattttagtcggcagatgtcctaaagagcttaggtagtccacaaggtcaagttgcttggcagcaacataagttaacttttccataaccccttttgccatttgaataataggagaaccttttgcttcctattattgatttctcgctaaatactatcgttctatcaaacatgaagacatttgaggttgactaaaatttcctcgatattgtcccaaatgaagatatatgcaatttacaaaaaatgtttatattaaaaaataattatataaacatttatcattaagcaatttctttttatatgagcacatatacgtgataattatatgtgtaattcaccttcttgcctattctcagaatacctattaatggggatgttttattaaatcatttatttttaaatttcaacccattccttctggaagtggtaattaggtcttgagcgggtaaaatagcaaggttgagtgaaagtgatagatgcttatacttttaagaaaacttgcgattagataattaggcaagcaatagtattgtagctaaaaagacaaataaaaaaaagcgatcttctcagaccgccataaatgttttcacaacggaataatccttattgtgaattgctttcaaaattgtaacacaatattacaaaatattatttaatgaattttacggtttcccttaaaaattattagtgttttttttattattttatggctatttaaaagatttacagatgagaaatatattaggcttggatgtgggaaccaatagcgtcggctgggcactggtaaatagtgatctcgaaaacagatcagggcgtattaaaggagccggaagtcgggtcatcccaatgagccaagacgttttaggtaaatttgacagtggtgtatctatttcccagacagccgaacgaaccaaataccggggagcaagaaggcttgtacaacggtttttgctacgtagagaacgccttcacagggtattgaatattttaaatttccttccttcgcactactccgaagcaatagattttgataagcattttggacagttcaaacctgaacgggaagaaaaattatcttcttataaagatatgacggggaaaaaccaattcctgttcaaagaaagttataacgagatgcttaccctattcagggcacaatttcctgacctgaaaaaagtgccttatgatctgaccatatactacctgaggaaaaaggcattgactgaaaggatatcggggcaggaactggtatggattttattaaactttaatcagaagagagggtattaccagcttcggggcgaagaggaagaagaaaacaagggtaaacttgtaagattctattcattgatggtaactaatgtcattgatactaatgaaaaaaataaggcgggacaaaccctgttcaatatcgtcctggaaaatggctgggactttatcaaaccaagtagtagcaatgtcgagtgggcaggaaaagttaaggaatttattattacgactgaagttgaagatgacgggataacaccaaagaaagacaaggaaggtagagagaaaagaagctttcgtgcacctttggaaaatgactggaccctcattaaaacaaagaccgaacaggatatcaaaagtagcggcaaaacaccagggcattatatttttgatgccctgctgaaagaccctgcccaaaagatcaatggaaagttggtcaggacaatcgaaaggtattattacaaagaagaattaaagcaaatcctggagacccaaagctcatttcaccaggaacttagtgatgaaaaattgtatggggattgcatcaatgaattatataaaagaaatgaagcgcataaaaacaatatcaaaagcaggggctttgcctatttatttttagaggatattatattttaccaacgtcctttaaaaagtaaaatttctttgataagtgattgcagttttgaacaacatccgctaaaagacaagaaaggtaatttagtaaggaatgaaaatggccagccaattttaaagccgctgaaatgcatcgcgagatcaaatcctatattccaggaattccgtttgctgcaatttgtaaaaaatctgagcatttatgaaagggagctgaccaatgatggaaaaatagaatttgatgtagatgttaccgcaaaatatttacctacagttaatgatttggaagaattatttctttggttgaacgacaaagctgagatcagtcaaaagcagctgttgtcctatccgaggttcaaactcaaagaagagaaatttaggtggaattttccggaagataaaatctacccatgcaatgaaacaaggagccagtttttaagagccgcatcaaaaattgaagcccttgacgaatcttttttcagttcgggcatcatgcaggatctttggcatattttatattcggttaccgacaaaattgagatagagaaagctattggctcttttgccaaaaagcacaatttgcctgaagattttataccggctttctccaaattaaagccttacaaaaaagagtacggggcttattcagaaaaagccacaaaaaagctgttacagctaatgcgcttcggcaatcagtggaatggatcagtgatccatccaggtacgctaaaacgcatcgataagattcaaaccggagaatttgacgaaaagatcgggaatcgtgtacgtgaaaaagccattcatttaaataagctatctgactttcagggcctgcctttatggcttgcctcttatattgtttatgaccgccatagcgaggcaagtgatcttgcaaaatgggaacacccggcagacgttgagcgctttttgaagaatgatttcaggcagcatgccttacgaaatcctattgttgaacaggtaattcgcgaaacattacgtgtggttaaagatatctggcagcattatggggacggtgcggcgaacttcttcgatgagatacatattgaattaggtagggagatgaagaacccagccaagaaaagggaacagatagctaaaaaaatcgctgaaaatgagaatacgaatttgcggatcaaggccatcctaacggagctgaaaaatgacggaaatatttccgtacgtccctattctccggggcaacaggagatattaaagctctatgaagaaggtgtatacagcaaagaaatccgaaaggataaacttgaagagttggataagatcaggaaaaacgcaaaacctaccccatcagagattaacaagtataaactgtggttggagcaaggctatatctcgccttatacagggaaaatgatcccgttaagccagcttttcacaaccaaatatcaggttgaacacatcataccgcaatccaggttcttcgatgattccctgtccaataaggtgatctgcgaatcagagatcaatgacctgaagggtaacgacaccggactggaattcattattaaaaattcgggccgtatcgtaacactatccggcggggaaagggttaccatatttacaaaagaagcctataatcaacacataaatagctattacagtaagcataaggataagcaaaaacgcttgttaagcgaagatattccagaatcatttattaatcgccagttgaatgataccaaatacatcagtaaagtcataaagatgcttttgagcaggatcgtgcgtgaagatgatgaacaggagtcaacatcaaagcatgtcatcacgctcaatggtgctatcacctcacgaatgaagcaggattggggcttaaatgatgtttggaatgagctcatcacaccgcgttttgaacgattgaaccggatgacggattctaatgattttggaaggctggaattgaaaaaagatgcatttggaaataccggcaaacaggttttccaaaccacagtccctgatgaaatcgccagaggattcaatagaaagcggatagaccaccgccaccacgcactggatgctttggtgatcgcatgtgtaaacaggacacatatcaactacctcaataatttaaacgcaagggatgaagatgacaaaaccgtaaaatacgaactgagaaataaaatttgctttaaagacaaaacggacaacagtggaaactatcaatggaaattccataagccctgggaaagctttacaagtgataccaaaagtgtgctagataaagcggtggtgagttttaaacagaatacgagggtgatcaataaaacaactaacaagcacctggcatgggttgaagaagaaggacacttgcaaaaagcctctgtttcccagcataaaggggacaattgggcaatcagaaaaccgatgcacgcagaaacggtaagcggaaaggtctttttaaaaagggtgaaacaaaatcccgttgccatagcaactgtcttagaaaaaatcgacctgatcgtcgacaaagaaataaaaaagaaaataaaagaaattgtaacgctttatccgaacaatacggagggactgaaaaaatacctgaaggcaaatcctgtcaaaataggagataagatcattgacagggtactgatttatgaaaccattgaggcaacggccaccagaaaagtcctggatatttctttcgacgaaaaaaaaatcgaaaaaataacagatacaggaattcaaaagattcttttgaatcacctgagacaggaaaaataccaaacggttactaatgaaagcggtaagaaaatagcatcgcatgaagccgcattttcagaagatggcctggatgatttgaataaaaatatagtcatccttaatgatggtaaaaaccatcagcctattattaaggttcgcgtgtttgaagagggtggaaaattcaggcttggcagtaacggcgcaaaaagggataaatatgtggatacagcaaaagggacgaatctattttttgctatttataaaagtgcaaatggaaagcgggattataaaactattccgctaaatgaagttatagaaagtcaaaagttgggtgccttagaaaaactaaagccttcccgatcttctataccagcaacatataccgataagaacaacctggaatatactttgcttttttatttgaatcccaatgatctcgtgtatgttcctacccctgaagaaattggaaactcggatcagatcgacattcacaacttgacaaaagaacaggtaagcaggatatacaggatggaaaaaacatcaggaaaagaatgttatttcatacaaaataatatagcagatctgatcgcaccctatgaccctaaattaaagttcggggaattcggaagccaaaataaattacagatatccgttgatggtcttaaaatatctgaatcctgtttgaaacttgacatcacccgattgggccgaattaaaaaaatctatccatgatcaaacgtacccttttctttggtaacccggcatatctcagcactaagaatgaacagctggtaatttcctatccagatgacgggttggataccaaaactgtggccatagaagatatcgggatcgtcgttctggaaaaccagcagatcaccattactaatggactgctcgaaaaattaaccagcaataatgtggcgctgatcaattgcaatcagcagcacctaccaattggcctgctgatgcccttaaatgggcatacggagcaatcggagcggtttaaaaaccagatcaaggcttctttgccgttgaagaaaaatttgtggcagcagaccgtcacgtcaaaaattctcaatcaggcaggcttgttaaaagaaagaggaattccggtcaggaacatggagcattgggctaaaaatgtaacctctggcgataccctgaaccatgaggcaagggccgcggtttattattggcagcaattggtcaaggtcgaacattttaaccgccaccaaagtggaatcccgccgaataacttgctaaattacggctatgccatattacgggcgatcacggcaagagcattagtaagctctggccttttgccaactctgggcatttttcaccggaacaaatacaatgcctattgcctggctgacgacattatggagccataccgcccatacgttgacctgattgtttgccacattatggataccgaggattacatcgatgaacttacaatggatatcaagaaacaattgctcagtatcgcaacgatcgatgtgcgtatagatgataaaaacagcccattaatggtggccatgagccggacaacgcattcactacatgaatgctttgaaggaaccgcaaggaaaatcttatacccggtctatgtatgatgatcattacacccgtttaaaccaatatagaagtttgtggatattagtcttttttgatttgccgaccgaaacgcgcaaggaacgtaaaatagcagctactttccgcaagaaattgttggatgatggcttctctatgttccaattttctatctatatgcgcttttgtgccagccgtgaaaatgcagaagtgcataccaaaagagtaaagaacagcctgccaatgcatggaaaagtaggtgtcatgcaaattactgatcggcaattcgggatgatggaattattttatggacaaaagcccgtagagcccgataaaccttcacaacaattggagctattctaatcttatagaatcataaaaatctataatgaagcatattgatatagcaaaaaaaatctgtttttttattcctaaattaacctataaataccagcatatcaacgctttacgtaaggatagctgggaattataagctaaaagtacaattttgaaagcaattcacaacgtaaacatgtttaaagaaagtttctcccttgctgggaattataagctaaaagtacaattttgaaagcaattcacaacaaaagctccctttagttttagatatacaggctgggaattataagctaaaagtacaattttgaaagcaattcacaacgaaaaaaggataaaacagcctgcctttaatgctgggaattataagctaaaagtacaattttgaaagcaattcacaacggcaatgctttgcgttacaagcgtaaccaagctgggaattataagctaaaagtacaattttgaaagcaattcacaacaagcctatttcgatatgtataacaccccctgctgggaattataagctaaaagtacaattttgaaagcaattcacaacaaatccattgcaacgatggaaaacggcgcgctgggaattataagctaaaagtacaattttgaaagcaattcacaactacgccaggcacggctgttgtaatcaaagcgctgggaattataagctaaaagtacaattttgaaagcaattcacaacctatagagtacacacaggcaatagacggtcgctgggaattataagctaaaagtacaattttgaaagcaattcacaacttattttgcaccccttaaaacgcctaaaaagctgggaattataagctaaaagtacaattttgaaagcaattcacaacgtaaagaccttaaaggtatttttgatgtacgctgggaattataagctaaaagtacaattttgaaagcaattcacaacggtttgcgccttgcaaattctttcccataagctgggaattataagctaaaagtacaattttgaaagcaattcacaacagtagttcctgattttctttgcttaactctgctgggaattataagctaaaagtacaattttgaaagcaattcacaacataaacaacttaaaagatagaggcgcgccggctgggaattataagctaaaagtacaattttgaaagcaattcacaacgcttctcgtggacattgttgggtcatccagctgggaattataagctaaaagtacaattttgaaagcaattcacaacaggtcaaatacaataattggtttggttaatgctgggaattataagctaaaagtacaattttgaaagcaattcacaactcagttacggcaaatgatgcattggctttagctgggaattataagctaaaagtacaattttgaaagcaattcacaaccgttagccttaacataatccctcgaatgagctgggaattataagctaaaagtacaattttgaaagcaattcacaacataacgagcaatccatattaaagcttatagctgggaattataagctaaaagtacaattttgaaagcaattcacaactcctttaccttccataaattgaactttcaggctgggaattataagctaaaagtacaattttgaaagcaattcacaacgttcagtcattataagaccaaactttgatgctgggaattataagctaaaagtacaattttgaaagcaattcacaactgtagcccatgccgaaacctccgtaagcagctgggaattataagctaaaagtacaattttgaaagcaattcacaacttatacgcttaacggggtggataaaacatagctgggaattataagctaaaagtacaattttgaaagcaattcacaacatgttcttctggagtaggagggtggttagcgctgggaattataagctaaaagtacaattttgaaagcaattcacaacaccggcagcatcggtaataaccatttcggcgctgggaattataagctaaaagtacaattttgaaagcaattcacaacaagggtagcgggcgggagctttgaaaaagcgctgggaattataagctaaaagtacaattttgaaagcaattcacaacatgtaagtgatagcatcttctaactggctagctgggaattataagctaaaagtacaattttgaaagcaattcacaaccagcatcgtataaatctttgagtgcttcggctgggaattataagctaaaagtacaattttgaaagcaattcacaacttaattctatttcacgcttataaacctcttgctgggaattataagctaaaagtacaattttgaaagcaattcacaacaaaatagatacaaacctatttttaagcgagctgggaattataagctaaaagtacaattttgaaagcaattcacaacactcagtgtattcatattatcatttggtttgctgggaattataagctaaaagtacaattttgaaagcaattcacaacttgcaaggtttaacgtatctatcgtgaaggctgggaattataagctaaaagtacaattttgaaagcaattcacaacatgtttctgcttgcgcatttgatattacctgctgggaattataagctaaaagtacaattttgaaagcaattcacaacggaatggataatgacattgtatacgctacagctgggaattataagctaaaagtacaattttgaaagcaattcacaacttaaccctaacaatataagcagctcctgaagctgggaattataagctaaaagtacaattttgaaagcaattcacaacgaaaagagtttcaaacatggctgatggggcgctgggaattataagctaaaagtacaattttgaaagcaattcacaactgaaaagctggaagggttagtcggcagggggctgggaattataagctaaaagtacaattttgaaagcaattcacaaccaccgacttcggacgaatcaaaagtcatacgctgggaattataagctaaaagtacaattttgaaagcaattcacaaccaaaaaggcaaatcgtcatgatcttcttctgctgggaattataagctaaaagtacaattttgaaagcaattcacaactagcattaacaacaactttaccgtcactttgctgggaattataagctaaaagtacaattttgaaagcaattcacaacgtgtctgtatgccaaaagccatgcacattggctgggaattataagctaaaagtacaattttgaaagcaattcacaacgatcggcggtatagtatgtattattgcagggctgggaattataagctaaaagtacaattttgaaagcaattcacaaccaactaatgaatcagcagtaaaaacagcaggctgggaattataagctaaaagtacaattttgaaagcaattcacaaccacgatcatcagcagcttcacgttcttcaagctgggaattataagctaaaagtacaattttgaaagcaattcacaactccagggcttcaagttctttgatcctttcagctgggaattataagctaaaagtacaattttgaaagcaattcacaacaagatgcctacgacaagtataaaactacaggctgggaattataagctaaaagtacaattttgaaagcaattcacaacgaactgacctcattaaatagtatcgtttatgctgggaattataagctaaaagtacaattttgaaagcaattcacaactagtgcttggctcggcttttaattccgctagctgggaattataagctaaaagtacaattttgaaagcaattcacaacggtagtgaacactaaaggcggtatagccctgctgggaattataagctaaaagtacaattttgaaagcaattcacaacgtgaaaaacaaaaaggatgccgcctctatcgctgggaattataagctaaaagtacaattttgaaagcaattcacaacagggtagtcattgttcttaccccaggctgcgctgggaattataagctaaaagtacaattttgaaagcaattcacaaccttccgcgcttcacccgactccccccccccggctgggaattataagctaaaagtacaattttgaaagcaattcacaacttggaaaacgtctataaaaaacattttcgcgctgggaattataagctaaaagtacaattttgaaagcaattcacaaccccacagggtttgcataaccgccaccataggctgggaattataagctaaaagtacaattttgaaagcaattaacaacgggtactgccaaaatgtgggccaagcatgtgctgggaattataagctaaaagtacaattttgaaagcaattcacaacagtttgggtattcagatcacttgaagaattgctgggaattataagctaaaagtacaattttgaaagcaattcacaactgccgacatgaaagccacccgcccacaactgctgggaattataagctaaaagtacaattttgaaagcaattcacaactggattccaagtaggcttaaggtggcacttgctgggaattataagctaaaagtacaattttgaaagcaattcacaacaaaggagctaaaaacccagcttcaatttatgctgggaattataagctaaaagtacaattttgaaagcaattcacaacaaggcggcgctcaaccatttctctttttgagctgggaattataagctaaaagtacaattttgaaagcaattcacaacaatagcttcttgttttggtgtttccatgtcgctgggaattataagctaaaaatacaatttgaaagcaattcacaacaagtattacaagtttttctacaaggttatcgctgataattataagctaaaagtacaattttaaaagcaattcacaacaaagccattgcaacgatggaaaacggttcagctgggaattataagctaaaagtacaattctgaaagcaatccgcaatagtaatagacctatcattcgggctaagaacttaacgtattaaatattttttcagtctctgtttcggagcagtcaaaagcttcattattgacatccagttatttaaatcagcatatcaataagtacatagatgtgcctgaaaatttaggataaaattcatcaggcacacaattggtctattaaaattttttgttatacatttgcgcaaccttaagaattaagcgttgccaatcgttgcaaatcttcgatgaaaaagttcgaaaattgtacaggcagggcgacaaataaaaatcatgtaaagtgatctaaaaggccacatagctcagctggatagagcacctgccttctaagcaggcggtctcaggttcgaatcctgatgtggtcacaaaacagcttaaaaccatccataaccggatggttttttttgttgtaataactcatcataatttataggtaatttggcatgcacagccatcactataaagctttccctaaatacatcccaataccctcatgtcatttaagatttaagtgttaatctaaaatcaaaactaaggatgtcaatcgcgtaatactttaaatttggtgctaacatctttactaaaactaaaatcaaatgggcttagataacaaaacaatattagagaaagctaatgcagctgttacgcaaggcaataatgaggaatttctttcttactgtaacgatgacacaacatggatatttgtgggtgaccaaaccttaaaaggcaaggaagccgtaaggcaatatatggtaaaagcatatatagagccaccaaaattcatggttgagaacttaattgccgagggtgactttgttactgccataggcaaaatcagcatgaaggatgaaagcggcaacacagttgattattcgtattgcgatgtatggcggtttaaagatggaaagatggccgaactaaaagcttttgttatagaggataaatctgaataaatccgcgttgtattcatcaatgattaatccgctgccgcagaaaaattatatggcttacataagtttaatgagccatacaggcaagtaaattgagccataagcataagctgcgaaaacacataaagctgaactttgtattgttaattaataataaataacaatgacaacaatatcaaaaatagctttaggcaataacgggccattagtatctaaattggggttgggctgtatgcgaatgtcgcccgtttggggtggcccggcaaatgatgagaatgaaagcatcgctaccattcaggctgcgttaaacagcggtatcaacttcctaaataccggcgatttttacggcagcgggcacaatgaactgcttgtaggcaaagccataaaaggccgcagggatgacgcttttataagcgtaaagtttggcgcgatattttacaacggccaatggattgggttagaccttcgccccgtagccattaaaaactttatcaattattctttagtgcgtttgggcatagatactatagacctttaccagccgtgcaggcttgatggcagtgtaccaatagaagatgtagtaggaactattgccgatttaattaaagaaggaaaggtacgccatttaggggtatcggaaattacatcagatcagcttcgtacagctaacagcgtgtactcggtaaccgcattagagataggttattctttagccgaccgtcaaattgagaatgatctgctccctaccgcaaaagagttggggattggtgtggtggcctttgccaatactgccgaggggctccttacaggcgaaatgaaagcgccacttgcagcaaattcttatcataaccacttttcgcgcttccagggagagaacctgataaaaaatctggaaaaggtagaggctttaaagtccattgcagcagaaaaaggctttactcccactcaacttgccattgcctgggttaacgcgcagggagagcatataatgccattggtaagcatgagcaaacgctcccgcctgcctgaaaatatgcaggctatggaaattacattcacgcctcaggaaatggatacgcttaacacacactttgcacagggcgcgatacttggaggtacctacctgcaacgatagttacgcaggctttagcttgtaaatttatatctttactacatgacaaatcctaccgaaataataccgggtgtactcttttactcctttctctctaaaatgcgaaaggaaaaagtaggctttttagagcacagtacgctggtattacaggtttcggggctatttacgttagctactgctacagaaactatttcgatgaccggaggaaacatgttgctgatacgaaaaaaccagctgggcgagattaccaagatacccattgatggcggagattaccaaactatagtcattctccttaaggaagacctgctccgaaagattgccttagaggaacaaatagaaacagtacaaaaatataccggtgcacccaatatacttatccctgagaatgattttttacatggttttttccagtcggttataccgtatgtaaaacatcctgaagcaaagattactgatgctttaggcatgctaaaagtaaaagaggttgtaaagatacttttgcacacgatgcctcaattgaaagaatttttgtttgacttttctgagactcataagatggatctggaaaaatttatgttgagcaattatcattttaatatgccggtagaaaaatttgcacagcttaccggcaggagccttgcagggtttaagcgtgattttcaaaaagcctttggtatggcgccccgacagtggctacaggaaaaacgactggccgaagcgcgccatcttattgaaaataagcataaaaagccatctgccatttacctcgacctgggatttgaaagcctctcacatttttcgcattcctttaaaaagaagtttggcgtggcacctacagaattacctgttaacacattgctataattacaaaaccatccataaccggatggtttttttgcttatttaaagtatcatctcatcatattaaatttatctttaacaaatattttaacatttatctaaatttcgggtaacaaaatctatcagcggacgtctaacctaaaacaccaacaaaccattcactatgaaaaaagtaacttccttcttcttgcttacgtttttgcttgttgcccaaaacatcgtggcacaatctgtaacaggtaaagtgttagacgagcaacaacaaccaataccttatgttactattggcataggccctacttataacgttgtaagcaatgaagacggagcctttattatattactgccggagcctgccgaagacaacaaagtaacctttagcagtattggctaccaaacggtacaggtgccgcttaccgattttaaaaacggcacctatgtgcttaaagaacaggcaacccaactggatgatgtttacattaccaatcaaaaacttacacctgccgaaattttggcacaggttattgccaatgcccctaaaaattatggcacccagcctgtaaagcaaaccttttttatgagatcttctcaaaacattaaactgcttgatagtaagtttgagctgctaaaatcatcgctcgaaacaaaatctacgttaaaagacctcaacaaggaacttgaagatataactgccaaagttgtaaaccaaagctcgcagctgtttaccgaatcgtatgggcatttgtatacacaagacggtaaatcaaagttagctgttgaaaaagctgttgagttaagaaataaggagaaggatatctccggcgaccagattaacagccgattaatggaagtaattaaaaagcacctggatcgcg

SEQ ID NO: 1066 - DNA, 24635 bp, synthetic construct
  misc_feature 1..24635: note = Synthetic
  source 1..24635: mol_type = other DNA
cttattttgctcatgtgcaagctacagaagaacttaaagaaaggaacaggatggattatcaggaagcactagatgaagaaatgatggcaaaaatgttgcgtttttcactagattttaacgagaaagaatccttgttttatttgtctgaaagtttaatttctgatgccgagagtaaaagtgttagagcatacgttacagggatgttttatggtatggcaaaattttatatcaacagagaaacggatgaacttacggaacagttgccctattcttttgccattcttctaagaaataaaaaagccagttttatcgattggaatttaacgaatgaaagcaaaaatatcaatgggtatacctgttataaagcgacttatacgtacattcaaaaatggaaaggaagagagtttccttggccagttattgcatggtattgtcctgaaattccagtttctttaggtcctgttcgatattcaggtttaccaggtttaattttagaattacaggaagacaaacgaggttatatagttgaaaaaattgaatttttggataaagaagttcaaatagaaaaacctacggagggtgaagaattaactgttgaagagattaaaaacagagacaataaaataaaaagagaactgttaaatcaagagtaattttaaaaatattctttttttaatgaaaaactgaaataataaatagaaagttggatatttttcgtgtaaaaccaaaaaaaaaaacagccataccttaaataaatgttttgacgaacacaaagtatgactgtgattaatttaattaaataacaaatttatgaaaaaattagtatttagtgcagttgcacttgtagcgttttcgtttgctagtatggcaaacaactcagtcgagaaggaaaacaaattaaataaagaagctaaaactgaacaactagaaaacaagattgaagaagaaaagtcttgtggcttacaatatttggatgatcgtcaatggttaagtgatatgggagtgcttgatgaatttgcaattgaaattgcttgggataattttcaagagtgtttaggattagattaaaagaaactagaattagattaaaagacattgtgttgtttaatagcaacacaatgttaaaataaaagaagatgaaaaaatttttattgttattactgtttactactactcatttccatgctcaaattaaatctggagaaataacctatggacttacacttggatatgatgaaaaattatctaatgacgacagatttagttctatttttgaaaaagctcagaatggagctaaaaaaattgcctttacgttattttttaataatgaagtatctctttttaaagtaaatgatattattactgataaagagatttctttagcaaaagcctttacaggaggtaataacatatattacacagaaataaattctgataaaaaaatgaaggaaataaatagtagtggttatggtaagtttataattaattacacaaaaaagattgattgggtaattctaaatgaaacaaaatatattaatacttatttatgttataaagctactacagaaactaccgtcgtaaattcaaaaggaacttttaaattccctgttacagcatggttttgtccaagtattccttttaattatggcccttatgggtatgatggattacctggattgattttagaattaactgagagatatacgacttatggagctttgaaaataaatttaagtaaagaacgtgatgtaattgagaaaccaaataaagggaaaactgtaactcaagaagaatttaatgagattataaaaacacaacctactttttaattatattttgagagtaatattatattttatacttttttttcaatcaattccttttcccaaaccctaacaggaactgtaaaagatagcctcaataatccattgtctattgggaatttaaataatgttaacgtatttatagaaaaactatcaaatgcgttaatgttaaaagaaacttataaaatcgcatactaaagtttcattttcggcattattactgatatgtttgtacaacataaacaagtaaatttattaattattaaaattaaaaaacaatgaaaaaattcatgtttagtgcagttgcactagtagcgttttcgtttgctggaatggcaaataattcagtagaaaaaattaacaaagaagaaattaaaaatacacaaagcaatgagatacttgaagaagataaaactccatatgattgccttagaattgcaggtgaagtttatggggaattaaaaaatgtactttcagaagatgaggcagttgataatgccatggcatattatacagactgtatagaaagtttgtaattaattgtttaaaaatatgagggttttgcgttaagaccctcattttaatttatttataatgaaaataaaaacatatttatacattattttttttagtattccttttttaataaatgctcaggaagattattattatattaattataaagtttatccaacttttggatcaattgaaaatgacgaagaaataaaaaaaagcaaaattaattatatttataaaggaattgatgatgcaatagcagatcttagttatagtttggttacatccaaagatgaatcctacttttatttggatgaaaaaatgccaaaagacaaaaaaatatatgttttagctaaaagttattctggtagtgaagatttttattctaatcaaacctttaattataagattaaaattaaatcttttttaaatcatattttttatataaaagatacaacaagttacaattggaaaatatataatgaaacaaaattgattgatggtaaaaaatgttataaagcgacaacaacaaaaaaaataactttgaaatcaagagttaaagaatatgaagttattgcttggttttatagtgatataccaacttcttttggtccaaaaggttttaatggtcttccaggtttaataattgagttaatagacgacaaagttactttagtagctaaaaatataaaaaaaggagtaaattttcctgataaaaaagagtttgaaaatgaggacgctttagtttctcaagaagcttatgataagattgttaaggaaaaagtaaatgatttttttactaataattgatgttcaaaagttgaaaaaagaattataaaagtagtttagatgtataaaatcttaattagtatttttataatttcaattacgtttttcttcaaaatcctaaccgatgtagtaaaagatgaatgttcattatcatgtttttacataatacattggtgaatagctagtttagtaaatgcattgcataatattggtatagtattatcaggtagaaattaattaaaggggcggagaagtttttaacattacttctattgaactaaaaatagatgaaactaaaaattagtatttttatagttattatagggttttatatctcatttggacaaatgaaatctggtaaattggtatatagaattattccaccagaaattgaaataagagattcattggctatagaaaaaataaaaattttagaaaaatttaatgaagatttaaaggagaagacgtttagtttgttgtttaattcaaataattcttttttcgaaaatgaagacaatttaataaacgataacaacgataattcaacaataaaaaaaattaattataatttatattcaaaatattcctatttttttaatttaaaagagaatggatgttataaaatagataattctgattctaaaataataataaagttaaaaaatgaattaaattggaaaatcacaaatgaaagtaaaaatatagatggttatttatgctacaaagcaaccgcgataaaaaaaaattcaacaatagaggagaaagagagaaaaatattatcgcttggttttatcctgaatttccatatgcttttggacctttagattataatagtttaccaggtttaattttggaacttcaagataataaattaatttatttagttgatacaattgaattttatgatgaggtattcaaaatagaaaaaccaaaagggaaaataatttctgaagatgaatatttgaaaaaattaaaaggactttctccttttaataattgaatttttatgtaatcttcaccaaacattaattaatgtacaaactactattaacaattttatgtctatttaccaattgttttcttggttattcccaaacactaacaggaactgtaaaagatagcctcaacaatccattgccaaacgcaaatgtaatagcaaaacctttggtggaaaatcaaagtttaaaatttgctattgctgaccatttgggaaggtataagttagagcttgaaaaaggaattccttatgaagtaaaagtttcctatttggggtacaaagaagcagttttaactattgaatccaacagtagtttaaaggaatatcattttaaactacaagaaacaggacaacaactcaaagaaattgtcatcgactacgaatacaaacccattattgtaaaaaaagacacgcttatttatgatgtaaaggcttttgcaaacgggaatgaacgcaaaatgaaggaagtccttgaaaaaatgccaggagtggaagtcgggaaagatggctctgtaacggtacaaggtaagaaagtaacccaaatgatggtggaaggaaaatctttctttggtggtggcaccaaattagccgtcgaaaatattccagccgatgccttagataaaatagaagtcattgaccattttaataaagtagggtttttaaaacaagtttctgatagtgatgaactggccatgaatgtaaaactcaaagaagataaaaagaaatttgtctttggtgatgtagaagctggtgctgaagtagctaatgataatggttttcatttgttgcacacggcattgttttattacagcccaaaaacgaatgtgagttttataggagatataaataacataggaaagcgtactttttcttttcaagatatgttgcgatttcaaggaggtgtgagtagttttttaaatgatagaaaacaactgacgaatctttatactttcactaatgacaacagtgatgtggttgaaaataaatcgcaatttggagcctttaatttccaacaaaatattaatgctaaactagacatagaaggatttggtattttttccaaactttttagtgcttccctagtggaaagtcagaatgaatatttacaaaatagtgcttttacttttgaagatagaacgactaagaaagacaataaaacggttttaggaatagggaactttaaattaaattacaatccaagtgatcgttctaaatggttttataatgcccaatatcaattcagtactaacgatgctacttcgcttttaacttctataagagacggacaacaaagtacttttgaaaccttaaataatgccgataatggtcagctaaaacaatttatcgaatggcacaaacaatacaaaaataccaatcatacgactacttttgtagtgaatcaaagttatgaaaacaataaacccgtaaatacatggttaacggatacggaatttttggcaggattaattccgctagaaaacgatagtttttataccattcagcaaattaaaaaagtaaaaaacaatagtgtagatgcgttattgaaacattattggattttaaacaattacaatcatttgtataccaatgtgggaaacaattttggtaccacaagcttgcaaattaacgaacaacagtttttaacagatggcacaatcaatgattttgcagcaaatggattcggtaatgatgtaaactatttgctaaacgatttttatgtagggtttgaatacaagtttaaaataggaaaatggatcaataaaccaggaatctatactcatttttatcatttgaaaaccaaacaaattgcgaacgattatactataaataaaacgtatattgaaccacaatggaatagtgaatatgaattcaatcaatcagaatcgctaaatttttcttataagttatcaaatgattttcctgatgcttctaaattgttagagcgttttaccttacaaagttacaattcggtgtttaaaggaaatgctttgttaagtaacgagagatttcatagtggaagtttacggtataagaaaacaagtatgtatcgtggtttgatgctgtttgccaatgtgaattttaataagaaaataagaaccataagaaacagtattgaactagatggaatcaaccaatttacaacacctattataacggataaccctgagacgaattggagaatatttggaaacattagtaaaaaaatataccgttttagattgcaattgaatactaattttagttggtttaattacatacaaaccctaaacaatcaaacgactacaaacaacagaaacaatcaagcggtaggtttaaaaataagtacagctactaaaaaatggcctacagtaagtgtagggtataataaaagttttagtcagttttcaggattaacctcttcctcgttaaccaatgatgtattgacctttaatttggatatcgattttttaaagtcgttccacttcaaaaccgactatgaagtcaattttaatgaaaatagtttgaatcaaaaaaacaattacagcataggaaatgcttctttgagttatcataaaaaagacaatccatttcgctttgaggtttctgctcaaaattatttaaacaatggaactataatcaataactctttctcagactttttgatttcgaattccacaacttttactttacctagaatatttttattttctataagttataaactatagcacattcatagtactaattcacaatcaaagccataaaaaaacaatagtcttacaagccataaaaagaaaaaaggctgtccctttatcaggacaaccctttttctttttaaaagaattcatttacaaagtggctttgtgattggtaatggctaaaataaaagcatcaacctcttctatttctttgttaaccctttctaaatccaattccttttctaacaaggctatagtaccataactctctttgcgatcttcaagtaagaattttctgtacactaactttgttttcttttttaatttatcttcttttatttcaccttctggtaaagaagctataacggaatctaaagcagtcagttctattaaaacaccttgtaactctgattcaacctctaatgaagtactagaatacttcacagttaagcgttcttcggaaatttttttgaaagtcaattccgctttctcttttcctgcccaagttaataacacatcgcaatctgatacttgtgttaaattgttaattgtgtaattcataatattataattttaaagattattattactaaggcttatacaaaccaaatgccatagcgtgccagaaaattgaagtttaaaacaagtttaactttttgtaagaaaaattgtaaaacgaagttaaaatttatacgaaataaatcaaaccatcgttcttattggattttgaaatcaacaaacaatttcaacgaacaacttcaaaaatcaacttcaaaaaacaatctcaaaaatcaacttccccaaaccacatcctcaaacttgtcatcccgacgcaggagggaccccactcgaaactccacaaaccacattcccaaaccaattccccaaactacatccccaaactacatcctcaaaccacatccccaaaccacatccccaaaccacatcctcaaaccacatcctcaaaccacatccccaaaccacatccccaaaccacatcctcaaaccacttccccaaaccacatcctcaaacttgtcatcccaacgcaggagggaacccactcgaaactccccaaactacatcaacataaaacaccataatcaaaaactttttttatttttataaaacaatttctccacatgaaagagctaacaaacggataccacacttattacgtttatatcttgaccaataaacaccgaactactttctacataggagtgactaataatttaaaaatccgtttgcaacagcacatcgattccgtgactgaaaacacccattcctttgtatcaagatataaagtggaatacctagtttattatgaaaagcatacttggattcaagaagccatagcacgagaaaaagaattaaaaggatggagaagagaaaaaaaattacatttaatacaatcgtttaatgagagttttgcttttttaaatcaccattttttggataaataagagacatacgtagttttggaaaataattattgaagtagatatgggttccctcctgtgtcgggatgacaagtttgcggaagtagattgcaggtacaaatagcgcgtagatgaaactgattttgcagattttttacatagcaacttcaaaatcaatttcaacatacatttctacaaacaacttccacaaaccactacctcaaacttgtcatcccgacacaggagggaccccactcgaaactccgcaatcaacttcaacaatcaactccaaaaatcaacttccacaaaccacatccccaaacttgtcatcttgacgaaggaaagaccccactcgaaactccacaaacaacttcaaaaatcaacttcaaaaatcaacttccacaaaccacatccacaaacttgtcatcttgacgaaggaaagaccccacacgaaactccgtaatcaacttccccaaacaatcaccccaaacttgtcatcttgacgaaggaaagaccccactcgaaactccacaaaccacatccccaaacttgtcatcttgacgaaggaaagaccccactcgaaactcctcaaacaactccacaaacaacttcaacaaacaaattaccctttccacaactctttttctaactgttttgtatatactaaaagcgcttttaattgtaattgaattttagtttgcaagtgaaccccatttttatctaaaattgctaaggctttattttgtatgttttctaagataacgtcatccctatccgttaggccttctttttctttgtataatgttacaaattcaattgttcttgctgctttttgataattatgttgcagttgttttatttttttttctagtagcaactgttcaatgttattattttcaatttgttttagtagtagctcttgttttttagcttgctgtgttttatgataagggaattctcttttagtaagctgagaaagagtatcggcatagtttgtcaatttagatagtttcaatagggcagcagtaggtaaatcacgttttcctatttcatacattgcgtattgacttctcttaatgcctaataacaaagctatttcttcctgtgatagcaataatgatttaaaagttgtgtcttttttcatgaggtaaattattattgtttaacgtctttataattactaatcaaaaactgtgacaaaatattttttgtaaaaaaaaatgtcacagaaatttgtgacaaaaaatttgtgacaaattattttgtcacaaaaaaaatgtcacaactttttttaaagaagtgttccaaatgtgatagattgtaaaataaattaattattgctttttatgtttgggaaaagagggagcaatacctataaaaattagaaataaaacatttttttttgcgggtttgatagaacttttattttgctgattttatgaaatgctgtttcttgtacgtatttatacgtataagaaactgtgaaaaatacgtatttatacgtattgacaggtgaaggaatagtatgtagttttatacaatgaagattatttttttataaaaataaaaaagcgacccttatgaggccgctttgaatgttttcacaacggaataatccttattgtgaattgcttcaaaattgtactgcaatatacaataaaaaatttagtattgcattacggtaaaccgtaaggatggtaattttcttttaattacatttaaaaattcattaaatagcaaataatagtcaaacataaatgaaaaaaatattaggacttgatttagggacaaatagtattggttgggcgttgattcaacaagaatttaaagataaaaaaggagaaatacttggaatgggaagtagaattatcccaatgactcaagatataaaagatgaatttggaaaaggaaactccatttctcaaactgccgatagaactggatttagaggaactcgaagacttagagaacgacacttattaagaagagagagattacatcgagttttaaatgtattaggttttcttcctcaacattatgccgatcaaattgattttaaaaaaagattaggcaagtttttggataaaaaagaaccgaaaattgcctacaaagaaatctggaatcaagaaaaagagaaaaatgagtttgattttattttcaaagactcctttgaagaaatgttaaaagattttagaaaatatcagccacaacttttagaaagcgacaagaaacttccttatgattggacgatttactatttacgcaaaaaagctttatctcaaaaaatagcaaaagaagaattgtcttggattcttttaaatttcaatcaaaaacgtggttattatcaattgcgaggtgaggaagaggaagaaaaccccaacaaattggtcgaattttattcattaaaaataattaatgtaattgctgatgaaaaagcgaatgcaaaaggtgaaacttggtattccttacacttagaaaatggctgggtttaccgtcgttcaagtaaaacctctttacaggattggacagataaaatacgggattttattgttacaacagatttaaatgatgacggctcaactaaaaccgataaagaagggaatgaaaaacgcagttttcgtgctccaagtgaagatgactggactttaataaaaaagaaaacagaacaagaaatagatagatctgaaaaaacagtaggaacatacatttatgatacattacttcaaaaacctaatcaaaaaatcaatggaaaattaatcaggactattgaacgaaaattttatagagaagaactaaaggctattttagaacatcagttaaaagaatatccagagttacaaaatgaagacttttttaatgattgtataaaagaattatatcgtaataatgaagctcatcaaactacattaagcagaaaagattttgttcatttgtttttgaatgatatcattttttaccaacgtccgcttaaaagtcaaaaatcttctataggaaattgctctttagaataccgaaaatataaaactaaagataaagaaggaaatgaaattgaaaaaactgagtatctgaaagcaataccaaagtctcatcctttgtatcaagaatttaggatttggcaatggctttacaatttaaagatttacaagaaagaagacgatacagatgtaacggagcaattcgtaaaatcagacgaagatttagaaaatttatttacctttttaatgacacaaaaagaggttgaccacaaagctattttaaaatttttacttgtatcttctgaattaaaaggcaaagcattaagtaatgaaatggctaaataccgttggaattatgtttacaattcagaaaaagacgaatctaaaaaatatccttgtaacgaaacaggctatgaaattagacgaagactggctaaagttgaaaatataaatgatgattttctaaccaatgaagttgaatttaaattgtggcatttaatatattcggtaactgataaactagagtttgaaaaagcactaaaatcttttgcgaataagcatagtttagatgatagctctttcgttgaaaactttagaaaatttccacctttcaaaagtgaatatggttcattttcagaaaaagccatcaaaaaattattacccttacttcgtttaggaaaatattgggattgggaaaatattgatattaagacaaaagatagaattggcaaaattatcacaggagaatatgatgaagaaatcaaaaatcgtgttcgagaaaaagcaattcatctaacaaaagaaaacgattttaaaggattacaattatggctggctcaatatgttgtgtacgatagacactcagaagccaatcttgctgggaaatggaattcagttagcgatttagaaaactatttaaaagaattcaaacagcattcccttcggaatccaattgttgagcaagttgtaaccgagaccctgcgtgtggtaaaagatatttgggctaaatatggtaatggtgcgaaagatttctttaatgaaatccatatcgaactcggacgcgatatgaaaaatacagctgatgaaagaaaacgattaactaatgtcgtctctgataatgaagctacaaatttgagaattaaattattattaactgaattaaaagacaattccgatggtaaactacaagttgaagaagttcgtcctttttcaccacctcaacaagaaatattaaaaatttatgaagatggtgttctaaattctaatgtcgaaattccagaagatattttaaaaattagtaaaacagcacaaccaagcacatccgaattgcagcgttataaattatggttggagcaaaaataccgttcaccatatacgggtcagcttattccgatgagtaaattgttcactcacgagtatgaaattgaacatatcattccacaaagtcgtttttttgatgatagttttagcaacaaagtgatatgtgaatcggctattaataaattaaaagacaaacaacttggcttagaattcataaaaaatcattctggagaaaaaattgaaactggatttggcaaaagcatcgaagtttttactgaacaagaatatcttgacttcataaaagagcattatgctaaaaatcgctcaaagaaaaacaaattattattagaagaaattccagaaaaaatgattgaacgccaattaaatgatacgagatacattagtaaattcatatcaaatgtgttatctaatattgttcgttcagataataatgatgatggaataaattctaaaaatattttacctggaaatggaaaaataaccaaccaattaaagcaagattggggcttaaatgatgtgtggaatgagttagttttaccacgttttgaacgaatgaatcaattaacaaatagcacaaactttacttcttggaatgaaaatcaccaaaaatttcttccaacaattcctttggaattttcaaaaggatttcaaaaaaaacgtattgaccaccgtcaccacgctatggatgctttagtgattgcttgtgctacaagtgaccatattaatttgttaaataacaagcatgcaaaatctaacgaacgctttgatttaaacagaaaactgcgaagatttgaaaaagtagcttacaatgatttgaaaactggaaaaagagtagaaaaagaagttcctaaagattttttaaaaccttgggaaaatttcacaaaagatgccaaagatgaattggataaaattgtaatcagttttaagcaaaatcttcgtgttatcaataaaacaaccaataaatacgaaagctataaagatgaaaatggcaatttaagaattggcaaagacggtaaacctaaaaaagatcttacaacccaaactaaaggtaatagctgggctatccgaaaaccgatgcacaaagataccgtatcaggcttagtgtctttaagaaagaaaaaagaagttctactcagtgttgctttagaaaattacaatgagattgtagataaagatttaagaaaagaaatactgaatttagtaaagctaaaatacgataaaaaattattgattaagtttttcaaggacagacaaaataaatggaacgacaaggatatttcgagagttgaaatttatttttgggataatgataatgtggcttcaagggtaagcttagatacttcattcaatgaaaaacggataattgaaaccattaccgatacaggtattcagaaaattttattggctcattttaaaaattacaaaaatagatttgacgaaaaaggaaaagaaattgctccagaaacattagcctttgctcctgaaggaattgaagaaatgaataaaaatattgtagagttaaataaagggaaatttcaccaacctatcttaaaaattagaacttatgaagcaaagggcaacaaatttaatgttggattaactggaaataaaaaagacaaatttgtagaagcagccaaaggcaccaacttatttttcgccatttatcaagatgaaaatggtaaaagaagctacgagaccattcctttgaatattgttgtcgaacgtcaaaaacaaggtttagactctgttccagaaattaatgaaaaaggaagtacattgttgtactatctttctcctaacgatttagtttatgttccaacagaagaggaaaaagggaatgtcaatagtattgattttgggaattttaaaaaagggcaaatgggaaatatttataaaatggtcagttcatcaggtactcaatgcttttttattaaacaaaatgtttcaacttctattgtaaacaaaattgaattttcagcattaaataaaatggaaaaatctattgatggaagtatgattaaagaattttgtattaaattaaaagtggatagattaggtaatatttcaaaagcttaatgcaatgataaaacgtactctcttttttggtaatcctgtttatttgagtaccaaaaacaaacaactggtggtgtcttatccagataaggaacaagatgccaagacagtggcaatcgaagatataggtgttgtagttttagaaagccagcaaattactgttacaaatggagtactagaaaaactgacacaaaataatgtggctttagttagttgtgatgcacaacacatgcctacagggctattgttgcctttgcaagggcatagcgagcaaaccgaacgctataaacatcagataaacgcatctgtacctttgcagaagaatttgtggcaacaaaccattagtgcgaagattctaaatcaagcgagtttattaaaagaaagaggaatacccatgcgaaagatggagttatgggcaaaggaagtaacatcgggtgatgctttaaaccatgaatcgagagcagctgtttattattgggagaagctctttcctattcctcattttacgagaggacaaaaaggaatagctcctaataatttgttgaattatggctatgctattctaagagcgattaccgctcgtgccttagtgagttcgggcatgttgcctagtttaggtatttttcatagaaacaaatacaatgcctattgccttgccgatgatattatggaaccttatcgcccttatgtggatttaatagtctgtcatattatggatactgaggatgcttatgacgaattaacggtagcacttaaaaagcatttgctaagcattgcgagtatggatgttgtgattgatggtaaaagaagtcctttgttggtggctatgagtcgtacaacaaactctttatacgaatgttttgaggggaaagccagaaaaatattgtatcctgtttatggattatgagtgtagttatctgataagcttcattttaggtatgatttttattgaattaaaaaaaaggtcaattgtggtgaaaacttacgataattattgttctgtagtttcggagtttttgttttgaaataatttagattgtctataattcattttatgaattatagcgtctgcgcttatctgctaaatctgcgtgcttttttattttcacgcagattttactgattttcgcagatgaaattagcttctgtgttccaatacctatcgggaagtatcgagaagttattacaataaattcaaataataaattggtgttagttatgatgcgctacaaaaaaatgcgaagtgactaggcagcgataagaaacagaagtgaaattataaataataactatgtatgatgaccattatacacgtttaaaccaatatagaagtttgtggatattagtcttttttgatttaccaaccgaaacccgaaaggaacgcaagatagctgctggctttcgaaagaaattgctagacgatggttttacgatgtttcaattttctatttatatgcgtttttgtgcgagtagagagaatgcagaagtacattccaaaagaattaaaaacagcttacccgaacacggcaaaataggagtaatgcaaataaccgacaaacaatttgggatgatggaattattttatggtaaaaaacctgtagaaaccgaaaaaccttctcagcaattagaacttttttagtgggctagtatttaaaaaatgtactatgctacttgaaaccaatgacttaaagtgctgttttttattttctagccaataccataactcacaacatatcagatttttagggcttgatatgttgagaatcattagtaaaaatacaattttgaaagcaattcacaacaggatatgacttcctattgcttttagtccggttgagaatcattagtaaaaatacaattttgaaagcaattcacaacatatacacgaagagacgcgcaaaacttctggttgagaatcattagtaaaaatacaattttgaaagcaattcacaaccatgtagtttattgtctgttcgtttacccagttgagaatcattagtaaaaatacaattttgaaagcaattcacaacattattgcgttgttcctttcatgcccctcagttgagaatcattagtaaaaatacaattttgaaagcaattcacaactacgccaccgctctaagaatcttcttaccggttgagaatcattagtaaaaatacaattttgaaagcaattcacaactgttaatgtcacgaagattccatctttattgttgagaatcattagtaaaaatacaattttgaaagcaattcacaacgggtggggggcgcacaaacagcccctccccgttgagaatcattagtaaaaatacaattttgaaagcaattcacaacttcgtgcccttcaattgttttatcaattaagttgagaatcattagtaaaaatacaattttgaaagcaattcacaactaactggatgaacacagaatggattgacgggttgagaatcattagtaaaaatacaattttgaaagcaattcacaactgttcttctgttaagtttgtttttgcttttgttgagaatcattagtaaaaatacaattttgaaagcaattcacaactagttttgtttttttatagcaatatcaatagttgagaatcattagtaaaaatacaattttgaaagcaattcacaactattacacaaatcatcttttgatattctttgttgagaatcattagtaaaaatacaattttgaaagcaattcacaactagcttccttaatcggcgctaatacattaggttgagaatcattagtaaaaatacaattttgaaagcaattcacaacaatataagcttttgtccttaagtttgtgcgttgagaatcattagtaaaaatacaattttgaaagcaattcacaacataccaccacaacgataggaagtgaaacttgttgagaatcattagtaaaaatacaattttgaaagcaattcacaactgttgttattaccaaatttctaaaccaccagttgagaatcattagtaaaaatacaattttgaaagcaattcacaacataccactacaacaataggaagtgaaacttgttgagaatcattagtaaaaatacaattttgaaagcaattcacaactgtttggctcacatcttcttattgaacaacgttgagaatcattagtaaaaatacaattttgaaagcaattcacaacacaaaaaaatgcatgatatttgataatatagttgagaatcattagtaaaaatacaattttgaaagcaattcacaactaatcggaatttacgatttcaattcctgtagttgagaatcattagtaaaaatacaattttgaaagcaattcacaacaagattttggcacatctaaagaagctgtagttgagaatcattagtaaaaatacaattttgaaagcaattcacaaccatttcctgattaactgcaatttctttgttgttgagaatcattagtaaaaatacaattttgaaagcaattcacaacagtatactcaaacattttatcatcaagcttgttgagaatcattagtaaaaatacaattttgaaagcaattcacaactgatgaaataaggccccaacaatcatattcgttgagaatcattagtaaaaatacaattttgaaagcaattcacaacattatgaatggtactatagaaatttttggggttgagaatcattagtaaaaatacaattttgaaagcaattcacaacttatgttcatttgtcgtattgttaaacaaagttgagaatcattagtaaaaatacaattttgaaagcaattcacaactctgttttcgtcacatactttaccatataagttgagaatcattagtaaaaatacaattttgaaagcaattcacaacgacagcgcatttaataaacttatagatgtagttgagaatcattagtaaaaatacaattttgaaagcaattcacaactgaattttgaaactcctttaaactctcaaggttgagaatcattagtaaaaatacaattttgaaagcaattcacaactttaacgggcaagccctttttttttattttgttgagaatcattagtaaaaatacaattttgaaagcaattcacaacatatcagtaaagctaattcaattcgtttcggttgagaatcattagtaaaaatacaattttgaaagcaattcacaactcaaaaccatagcattctatcaaatcattagttgagaatcattagtaaaaatacaattttgaaagcaattcacaactatatctaaaatgtctgaacatgatggacagttgagaatcattagtaaaaatacaattttgaaagcaattcacaacaagaaagaatcatgaatggattgaccggtggttgagaatcattagtaaaaatacaattttgaaagcaattcacaacaagcgtatatgtgcaatgaaaacgctaaacgttgagaatcattagtaaaaatacaattttgaaagcaattcacaacaagatttaaacgaccctagaggatggatagttgagaatcattagtaaaaatacaattttgaaagcaattcacaacatatcagaattcatgaaatattttttttctgttgagaatcattagtaaaaatacaattttgaaagcaattcacaactctaaatacccttttcctattcccgcacttgttgagaatcattagtaaaaatacaattttgaaagcaattcacaacaaagtattacacaaatactttggaacttaagttgagaatcattagtaaaaatacaattttgaaagcaattcacaacaacggctttgtaagagcttgaattgatccagttgagaatcattagtaaaaatacaattttgaaagcaattcacaaccagaatacgcaaatagcattggttctggaggttgagaatcattagtaaaaatacaattttgaaagcaattcacaactgaaaaaaagtagtgaaaattgaaatataatttcatattttgaaacatttaaaaattaatctggttttatttataaatcataattaaattattactaatttaatgtttcaatttaaacaagtaaataatgacaacagaagaacatttaaacaaaattatttcagtagctaaagattttgatacaacatttgagcaaaacaatttgagaagagcaaaatgggcagattcttttatgataatacaaaatactttggtaaacatagttaattcaatgacaagcaatattgaattttttaaaagtaacttatatgtagttggtattgtagatagtaaatctgatattaattgtaattctgcaatatttgtaaaaagtggtaatacaagattagataatgaaagacatgaaaaaggttttcaaattcactttgcaccatcagaaaatggaaggttattatgctatgcctatggatttaatgttccgcaagatagtgatcctaaattatttaaaattgcaatattagaaccagatgaaataatacaaaataaaatacatgaacttttctacgaagcttttgagaaagttaaagaaacatctattctatttcaacgataaaaaaagctacctcaaagggtggctttagtttttaattaatttcaaagtatccgtttatatcatatgttattgacaaacttaattcttcttcaagttcttcaaattcataagcacttgcccaaatattccatattgcataataagaagagtcatctatcctaaattgtaaaatgtttgcatctattgttgttctaggtgtgaaagttaaagtggtcataatgtctgtttttaaatattattataaggcaatattgggttgacaatttgtaagtatcaagaaaatatctgaaaaatatttaaaaatgttatatttgaataaccaattaaatatttaaaaatgaatatgaaatttacaaatggagatccaaaaccaaaacaaagtccgccacctccaaaacaaagtccgccacctccaagaccaaacagaggtagtccgtcagctccttcatataatccaggaaaaggagttccaagagttccaaatcctaaaaaataaaacatacatgtaagatgaatatgatcaatccagaaatcatgaatccaatactaaagttattaaatttaatagtaaaacgattaaatttttctgcttttgattcatattcttctatgttaatatttctcaaattataaaaactaattatttcttcttttgaacacttttcatcatgttcatcgtctaattgacttaaaagtgaacaataatcttcatgatgcgttctagaagctagccattgagaaataaaatttgatataatcgaaataacaagtaatgcagcagataatttcaaccaccctgaaataacaatatttttatctattagatattttccaagttcactgcatgaatatataccagctccagaaattgatataattaaaagatccatcctctggttactataaaataatgaatcccaaaccaatttttttctttcttctaaaatagacctttctctatctgttagttttttgttatttttcataatactttaaatattatttaaacaaatgtaattaatcaattcttaaaaattccaaaacgaaagtttttcttttacatttagaattggtttgttatatatgacttgattagcttgtaatcaaatgaatactatcaaatgagataaagcaattcataacttagaagcaacaacgatgttaatgtttattgttgagaatcattagtaaaaatacaatttctcaaaaccataaaaaaagcattctttttaaagaacgcttttctcatttactaaaagtaaattattttctagtgtttactctgttgttttttaatcgtttttttatcgatatcaaacgtattagtttcttgatctacattcccagttggattagtgggattggtctgtttttttgtgattttaaatttctttgaatctctaataattcccatgatagttgttttttaatgttcatccataaggtaaaaaaataaaattcaaatgctcttaaagctatcttaaaagtctcttaaaatgggaaatataaaaaggaagtacaacaagtaaaaaaagaataaatgttattttcaattgaaagccactgccaatactaaaaacatctcctctttcttctttcctcttgttaccccatcttctgaaacaaatcccaaatcacaatgccagcacttacagaaatattcaaggagtgcttgctacccagttgtggaatttcgatcacaccatcgcttaggttaatcgcttcttgagcaaccccttttacttcgttaccgaaaattaaagcgtatttttcattgggttgcaccttaaaatcatttagcatgatggagttttccgtttgttctatggaaaatatattgactttttcttctttcaattgggcaattacttccaaaacatcttttgcatattcccacgtaacggtatcggttgcacccaaagcggttttgtgaatttctttgttaggaggcacagcagtaatgccacacaaatagattttctcaatcaaaaaagcatcactggttctaaaaaccgaaccaatattgtgtaaacttctaatgtcgtctaaaacaacgataataggtgttttttcagcttctttgaattcgtctttattcaatcggtccagttctgcgttggctaattttctcatgaggcaaagataaaataatgtgtcgattaggcaatgtgtcgattggtaaatgtggcaatgtggcaatgaggcaatgagataatgaggcaatgaggcaatatgtcaatgagacgatggggaaatgagttaatctttcaatcaaaaaaacaatcattaacaagtaaataacacaaactgctttttcaaatttctatattgcttaaaaatttattttcatgaagtatatctatttatgtctggtttttcttagtagtataagttgtgctcaaaattcaacagctaaccaagaagtgaaaaaaacacaggaagctattattgaagaatttgctacgaattgtgcgcacaaatacaattataatttacccgagtggcaagaatgtttggatagaggattggaaaaggatagcactattgcctatttatggcaacaaaaagccatgcccttattcaaggcgagaaagtatgaagcgggaatggtattcattgacaaagcggtacaatatgattctaaaaggtatttggattacagagcttttatcaaatgtatttttgctaagacctataaggatgctatagtagactttaaaaagtgtatcgctttatacgggaataattatgtgatggatcatacctatcaatttcatattgcactgagttatttgcaactaaacgaatttaaaaaagcagaacaaattttcaaaaaggacacggatgaacaagctcaaaaatttggggaagctcattatttggatttgttttattacggaatttctttgtacgaacaaaaaaaatggaaggaagccattgctgtttttgatcaatccttagcgcaatatcccgagttttcagatgtgaaatactacaaagccatttgtttagcccgtgaaggaaagtcggacgcatcaaaagtgttatttgaagaagctaaaaaggatttggcaactggttataccattaatgaagaccaaattttttacgaaacctatccgtaccaaattaaaaaataaaataatgtgccaatgaggcgatgaggcaatgagtcaatttttcaatccttcaatctttaaatgcatcacttgattttgccattgaaattcgtaacttcgcaaccattcactaaaaagacatattgtggctaaaaaagcagcggaaacgaaagagaaaaaggaaacccctttgatgaaacaatacaacgaaattaagcgcaaatatccagatgcttgtttgctgtttcgtgtgggtgatttttatgaaacttttggagaagatgcggttcgtgctgcagggattctaggaattaccttaaccaaaaggggagcaggttctgatagtgaaacggcattggctggttttccccatcattccttaaatacgtatttacccaaattagtaaaagcaggacttagagttgcgatttgtgaccaattagaagatcctaaaatgactaaaaccattgtgaaacgaggtgtaacagagttagtaactccaggggtttccatgaatgatgaggtattgcattcgaaatccaataactttttggcttcggtacattttggtaagaaaacgctaggaattgcttttttagacgtgtcaacaggagagtttttaaccgctcaagggaacgaagaatacatcgataagttgttacaaaatttcagtccaagtgagattttggtgcccaaacaaaataggaatcagtttaaagaagtgtttggagaggattttcacgtgttctttttagaagattgggtgtacaaagaagattatgcagtagaaactttaaccaaacattttcaaaccaattcgctaaaaggatttggtatcgaagaattgcaagaaggaattattgcttcgggtgcggtgttgtattatttgtcggaaacccaacacaacaaaatccaacacatcaccaatatccaacgcattgcagaagatgcttatgtgtggatggatcgttttaccattcgcaatttagaattgtatcattctaccaatgtaaatgcagtgacgcttttagatgtgattgataaaacgctttcgccaatgggttcgcgcttattgaaacgatggttagcactgccattaaaagaagtgaataaaatacaaagccgtcatgaagtggtggcttatttgaaagacaatcaggaaaccttacaaaaaatacaatatcaaatcaagcaaatttccgatttggaacgtttgatttccaaagtggctacaggtaaagtctctccaagagaagtgacctatttaaatgattctttgaacgcgattattcccataaaagaattggctttacaaagtaaaaatgaagctttaaaagtaataggagatagtttgca

SEQ ID NO: 1067 - DNA, 24632 bp, synthetic construct
  misc_feature 1..24632: note = Synthetic
  source 1..24632: mol_type = other DNA
gtagtgttcggcaaagcctactatgagggaaggattgacgttaagaaacttttgaaccatgaataaaggactggctaagagaatcatcccttgtctggacgtaaaagacggacaaaccgtgaagggcgttaacttcgttggattgcgcaaggcaggcgatccagtggaattgggcaaggcatacagtgatgcaggtgccgacgaactggtatttcttgacattactgccagttatgaaggcagaaagacctttgccgaaatagtgacgcgcgtggctgccgagatcaatattccgttcacggtcgggggtggtatcaatcagttagatgacgttgagcgcatgcttcatgcaggtgccgacaagatcagcgtgaattctgctgcgataaagaatccacaactcattgaagacattgccgtccgcttcggctcgcaagtatgtgttgtcgccatcgatgccaaacttgaagacggagaatggcaatgctacctgaacggcgggcgcgttccaacagaacgccgtctcttcgaatgggccaaggaagcacaggagcgcggtgccggcgaaatccttttcaccagcatgaatcatgacggcgtaaagaccggatatgccaacgaggcgctcgccaaactgtctgacgatctgagcatccccgtcattgccagtggcggtgctgggaaaatggagcatttccgcgatgcctttaccattggaaaggccgatgcggcactggcggcaagcgttttccatttcggggagattcccattatggatctgaaagagtatttaaggaataatgacatcaatgtaagaatatgaagatagactttgaaaaagcaaacggattagtgccagccattatccaggatgctgttaccaagaacgtcctgatgctgggctatatgaacaaagaggcctatgaaaagaccattgccacaggaaaggtaacgttctggagccgttcacgcaattgtttgtggacaaaaggcgaaacctcgggcaactatctgcatctggtaaatattcaaaacgactgcgacaacgacacacttctggttaaggtacacccaagcggtcccacctgccatacaggcactgacacgtgttggggtgagacaaatacgtgcaatccactcgatttcctgaaagagttgcaagatttcattgcaaaacgccaagtagaaatgcctgaaggctcatataccacgaaactgtttcgggacggcatcaacaaaatagcacagaaagtgggtgaagaagcactggaaacggttattgaggccgtaaacggcagcgacgaaaaactcacctatgaagcctcagacctcgtttatcacttgctcgtcctgctaacaagcaggaaccttcgcattgaagacattgcccaggaactggcaaagcgccacgatccagaatgggacaagcatcggcgtatggcaaagagcacgggtgaaatggattaatcgtttaacaagaacacatcaataatacacgctatgctgattgaatacaagaaagtaaatatttaccaagaagatgttcacgtactcaaagacgtagatttccatgtcgatgaaggtgagtttatctatatcatcggaaaggtaggctctggtaagagttctcttttgaagaccacctactgcgaacttgacatagaaagttgcgaaaaggcagaggtcttgggacgcaacctgatggatctgagaagaagagaaatcccgtcattgcgaaaggaaatgggcatcatctttcaagatttccaattgctgcacgaccgttctgtactgaaaaacctgcgctttgtgctgaaagccaccggctggaaagacaagcagaaaatagacgagcgcatcacagaggtgctcgatgccgtgaacatgaccgacaagaaagacaagatgccacacgaattgtctggcggtgagcagcaacgcatcgctatcgcaagggccattctcaacaaaccgaaagtaattattgccgatgaaccaacaggaaatctcgacccagagactgccagccatattgtcagcctgctgaaacagattagccaaacaggaacagccatcgtcatgacaacccataacatccccatgctcgacaaattccccggcattgtataccgctgcaaggacgggcagatgcaggatgtgacaaaagattacaacagaatggatctgactgaagaaggagaagaagacatttagatagaacaaaaacagaataaaaaaataataggacaatgaaagtaatgaaattcggcggcacttctgtgggctctcccgagcgcatgcagagtgtatcgcaattagtcacaagaggtagtgaacccgtgttcgtagtgctgtcagccatgtcaggcaccactaattcacttgtagagatcagcaactatctttacaagaaaaacccagaaggtgccaacgacatcattaaccgcctggaacaaacctacatggaacatgtagacaaactctattccactgatgaatacaagaccaagacacgtgatttcctgaagggagaattccagtatcttcgctcttttacaaaggacattttcaccagttttgaggaaaagagcatcgtggcacagggtgaaatcatgagcacaaatatgatggtgaactacatgcaggaaaaaggcatccatgtggttctcgtctccgctcttgattttatgcgtacagacaagaacggagaacccgatcccggctacatcaaagagaaactcgcaaaggtgatggaagaaaacgaaggttatcaggtatacatcacccagggattcatctgtcgcaacgcctatggcgaagtggataatctggagcgcggtggttctgactatacggcatcacttatcggcgcagccatcaatgccgaagagattcagatatggacagatatcgacggcatgcacaacaatgatccgcgcgtggtagacaagacagaatctatcaggcagttacattttgacgaggctgcagagttggcatacttcggcgcaaagatactacaccccacctgcgtgcaacctgcaaaattcgcaggaattcccgtgcgcctgaagaataccatggatcccgacgctcccggtactattatagataatgtgaccataaggggaaaaatcaaggcggtagcggccaaggacaacatcactgctatcaaaatcaagagttcgcgcatgcttttggccacaggtttcctgcgcaaggtgttcgagattttcgagagttaccagaccgccatcgacatggttgccacgtcagaggtaggtgtcagcatgagcattgacaatgatgctcacctcaatgacatcgttgacgaactgaagaaatacggaacagtaaccgtagacagcaacatgtgcatcgtctgcgtggtgggcgacctcgactggagcaatgtaggctttgagacactggccactgatgccatgaagaacataccggtaagaatgatttcttacggcggttcaaactacaacatctcattcctcatcaaagcagccgacaagcagcgcgcactgcaaagcctgagcgacacgctgtttaacaaataacacaacataacacaaacacatattattgattgagaacatgaaaggtaaattccctacagagaggttcaggcagatacagacgccgttctactactacgacacggccttgcttcgcgacacgttgagagaaatcaacaccgaagcaggccggcacgacggatattgcgttcactatgccgtgaaggcaaacgccaatcccaaagtgctgaatgtgatatgtcaggctggcttaggtgccgattgcgtcagtggcggtgagattctcgccgcctcgcacgccggttttcccgccagcaagatagtatatgccggtgtcggcaagagcgattgggaaatcaatttaggcctcgacctggacattttctgctttaatgtggaaagcgtaccagaacttgaagtcatcaaccagttggcagaagccaagggaaagacagcacgcgtggccttccgcatcaatcccaacgtcggggcgcatacgcatgtcaacataaccacgggtcttgccgagaacaaattcggcattgccatgcgcgatatggagagcatcattgagcgtgccgggaacctgaagcacatccgtttcataggattgcattttcacattggcagtcagatacttgacatggacgacttcaaggcattgtgcaaccgcattaatgacctgcagaacaccctggaacgccatcacatccatgtggagaacatcaacgtgggaggtggtttaggcatcgactaccagcatcccaaccgggtgccgatacccgatttcaagtcctatttcgacacctacgcaaagttcttgaaacttagacccgggcaaaaactacattttgaactgggacgatcggtggtaggacaatgcggaagcctcatcacgaagatactttatgtaaaagaaggggcatgcaaacagtttgccatcgtggatgcaggtatgaccgacctgattagacctgcactctataacgcctatcataagatagaaaacctgtcaagtgaggaaacgaaagagacgtatgacgtagtcgggcctatctgtgagtcgagcgatgtctttgccaaagccattgacttgaatagatgtcatcgtggcgacttgattgcattgcgcagtgccggggcctatggtgagattatggcatcctgctataactgccgtcaactccctaagggatatatcacggaggatttataaatgctcataccgaatacgataacgatgattatagcggcagtgctcattctcatgggcattgcctcacctatggtaaacacatttttcagaaaactgaagacaaccgatacagatgccggcgaagaagcagaaggccattctctgccgcccgtatctatcattctcgccgtgcatgacaatgcgcgcgaactggaatctcacctgccggtcatgctcgcacaagactatcctgcgggctatgaagtgattgttgtggtcgacaagggtgaagacgacacagacgatgtgctcacccgcctatgcaatgaacactcgaacctgtatgtgacattcgtccccgactcgtcgcgctatatgagcaagaggaaacttgctgtcacactgggagtgaaagccgccaagaacgaatggattatgatgacagaagcatcctgcgaacccacttccgaccaatggctgaaagcaatggcggcgaactgttctgaccatttcgacatggtcatcggctatatcaactatagccaggagtctgccgactatctgcgttttgaacgccttctcacacagcgctatctgctcagtacagcccaaaaacgaacagcataccgctctgagccaggcaatctgatgttcagaaagagtctgtttatgcaagagcgcggctatgaaggcaacctgaaatacatccgcggagagtacgatttcctcgttaacaagattgccacaccgggcagaaccgctgttttctgtactcccgaagcatgtattatcgatgacgaaccggccagaaaacaactgagaaaccatcatctgttttacatggaaacgcgaaaacacctgcgcaggtcgttccccttccgccttcttttcaacgcagaccagatggccatgcacctcaattacctgcttatcattggctgcggcgcgtatgctgccataacgcatgacatatttgttggcggtgcctgtatcctttcactgatcatcacactcacgctcagaacgcttatcgcccatcgcgccatcttgcaacatggcgaggacattccttcctggaagattataccgatggaaatatccgttctgtggagaaatggctggcgaaaactgagataccatctgaccaataaagacgactttatctgtcataagatatgagaatactgcattacatacctgagcatttccagagcattgacatcaacgacgagtatatgtcaatgctgaaagcccatgtggcacgttttgcagacaacgacatcgccgtcaactattctgatttcacgcaaaaagcagaacaactcaagccggaaatcattcatatccacgcatgctggaacctgtcggcctaccgcgttcagcaatgggcagagaagcaccataaggctgtggtactgtcacttcacaaccacatgcagagttggcatgtaagccatcatcttctttttcataaactccccctgctcatcatctatcagcgcaaggccatcaagaatgccgatgcggttctttcatctacggaaacggaaatgaaacgcatggtgaaaatcggatggaacgtaaggaatgccatgattcgcaacgcgctgatgagcggttccttgacaccagaacgtatgggaacacaactgcaagcgctttaccagaaggtaattgacagcaacagttttaaactcatgacccgcgaagaccgcgaactggagaacaagatgctgcaggcttcgttccatcagcatactgctggcgaggcggttgctcagcagcagccaaacaatgacgaactgccaatgacggccgaagacatggaccggttgcgcagaataatgattcattcgaacaacgaaggcattctcagcgagattgaagcaggtgccgcacgcctgcatatccaactgcccgacgtgaaaaacggcatcagcgagcaaaccatcgacctcttccctccccgccttcccaagtcggtaaagcccattgaaaggcagaaaaccatcatgaaaagcaggcgaaagaagacggccatgacccacatcatgattgacgaaaagcccaccgagacagaacgccaaatatgtttcatgctgctgaacgtaaagcaagagttaaggctcaagacgctttcaaggcgacatctcacagaactctatcgcgccatacgcttcaccgaatatgacgaagacatgattctgcgcatgttcaagcaactcggcatcaggaaattcgcagcgcgcatgctgcaaatcatgaaagaaacctatctgcttgatgagggattcatgcccatttcacccttgaacgacaaaaaaacagaagccatcagaaaacaattatcaaccattaacacgcaataaaaccatgggaaagaaacactatgacgtagaaaaagacatccgctatctggaattgttggccaaatcctttccaacggtagcagaagccagtactgaaatcatcaacctacaggcaattttgaacctgccaaagggcacagagcatttccttgccgacctgcacggagcctatcctgcctttcaacacgtgctgaaaaatgcatcgggaaacatcaaaagaaaggtgggcgaacttttcggaaacgaaatcagggagagcgaaaagcgagaactctgtacactgatatactatccggagcgcaaactcgaactggtgaaacagacagagagcgatatggacgactggtatcacatcaccatacaccagttggtgaaggtatgccgcgaggtctcatcgaaatacacccgctcgaaagtgagaaaagcactgccgcaagacttctcatacatcatacaggaattgctgcatgagcgcaccgaggacatcgacaaagccgcatatgtaaaaggaatcatcgatacgattatcgatacgggccgtgccgacgacttcatcatggccatttgcgacgttatccagcgcctcgtcattgaccaactgcacatcctcggcgacattttcgaccgcggccccggtgctcacctcatcctcgacatgctgaaacgctacaagaattgggacattcagtggggcaaccacgatgttttgtggatgggagcctgcgccggcaacgacgcatgcatatgcaatgtcatccgtctgtgtctgagatacgccaacctaactaccttggaagaagcctacggcatcaacatgatacctctggccacctttgccatggagacttacggcgacgatccctgcacagaattcatgccaaagaccaatggaggcagcgaacttcttgacgaaaagaatgcacggctcaccgcaatgatgcacaaggccatcgccatcttacagtttaaagtggaatcgcagatattccacaaacaccccgaatggcaaatggaagaccgcgatttgctgagcaccatcaacttcgaaaagaaaacttgcatggtagacggcaaggaatatcccatgacttcatgcaatttccccaccatcaaggcaggaaaaggaaagagtgccattgaactgacacccgaagaacaggacctgatgaacaggctgcaccactcgttcaccaccaacgagaaactgcgcaagcacatcaaactgatattctcacacggatgcatgtactctatcatcaaccacaacctgctcttccatgcatcttgcccgctcaacgaagacggtacgctcaaggaagtacacctatacaacggcaagaaatacagcggaaaagacctgatgcactacacaggcatgctcattcgctcggcattccagggcgatacgaaccccgaagagcgcgactacggcatcgactatttcctctatctgtggtgcggacctgacagcatactcttcgacaagtcgaaaatggccaccttcgagcgctatttcattgaagacaaagccacccacaaagagcagaaaggcaactatttcaaactgcgcgacaacgaagagatctgcgaccacatacttgacgcattcgaagtgaaaggaccgaaccgccatatcatcaacggacacgtgcccgtacatgccgccgaaggcgagaatcccatcaaagccaacggcaaactgatggtcatcgacggcggattttcacaggcttaccacaagacaacgggcattgccggctacacgcttgtatatcacagccgcggattccaactcgtacagcacgaacctttcacaagcgaagaagatgctgtgcgcacaggagccgacatcaaaagtaccacacagattgtggaaatgacagcccaccgcatgctggtggccgataccgacataggtacagaactgaaaaagcaggtggatgacctgcgcgaactgctctatgcctaccgtcatggcttcatcaaagagaagcgctgacacaggaaagcggtgttttcggtttgcaataactatgcaatctatttacaacacctatctttataaaaagtaaaacaagttgttttggtatgcgaaacctatggttttgtcatccgaaacctatggttttggagaataaaacaacttgttttacttttttagcaaacagtttttatatgcaaaacactaacattttaacataagcaacaatatttcagcaagttatacaacaacagcaaagcacgaaacaatcattagtaaacacacatatttcaatcacttaaacagcgacataattatggcaatacatatcaaattgattcgcaacaacatcaagcgcagcagttcttacggaaagtttttcgcaaaggccgtgagccaaggaagaataacgcttgacgaaattgcagccgaggcatgcagaaacagcggcttcaacaaaggcgatgttatcggtgtggtaaccgaaatacaggatattctcaaacaaagactctccgacggccaaacagtagtactccttggaataggcagtttcagtctacgggtggagagtatgggcgttgacgatcctcgtgacttcaatatccggctccatatcaagcgcatcatctgcggtttcctgccatctggccgtcgcaaaaacgacagacacatcctctacgatgtctgcgaagacgtgaaaacagtatggcaacaaggattcaaaccataaaaaagtccaccgttaaaggacgatggacaagaacctaatgttttcacaacggaataatccttattgtgatttgctaaaaattagtgttgcaaatataaatattttctatgaaaacaccaaatatttcaaaagatatttgtaaatttgtggcagataatacaaaatcaacaaacaatgaagaagattcttggtttagatttaggaacaaatagcattgggtgggctgtagtgaatgccaatgaaacagcacgtgaaaacgataccgtatatttaaaaccatttggtataagttctgctggcagtagaataatacccatgtcagcagacattttgggcgacttcgacaaaggcaattccatttcgcaaacagcagaacgaacaagattaagaatgacccgccgactacgcgaacgcaatcttcttcgtcgtgaacgactgctcagagtgttgagcgtcatggattttttaccggagcactttgcttcgagaatcaaccgatacggcaagtttgttgatgattgtgagccgaaacttccttggagaacaagtaaaagcggccatgcggagtttcttttccaagactctttccaagaaatgctggccgattttgcccaacatcaacctcaactgttggctgatggaaagaaagttccttacgactggaccatctattatttgcgcaagaaggccttaacccatagaatcaccaaagaagaacttgcctggatattgttgcagtttaaccaaaagcgtggttattaccaattaagaggtgaagacgaagaagaagatgcctccaagaaagtggagtacctatcgcaaaaagtgataagagtagaggcaacagacgagaaaaaaggagaagacacatggtacaacgtatatcttgaaaacggaatgatataccggcgtacgagccgttttccattagactgggaaggaaagacaaaagagtttattgtaaccaccgaccttgagaaagacggttctcccaaagccaacaaatatggagagataaagcgctcgttccgtgctccgaaagaagatgattggactttgctcaaaaagaagacggaatacgacattgagcagagccacaagacggttggctgttacatctacgatgccctattgacgaatccatcacaaaagattataggtaaactcgtccgtactgtagaaaggaagtattataaagaagaattaaagagaattcttgaaatacagcaagaattaataccagaactcagagacacctccctatatttaagatgtgttgaggaactctaccccaccaacaaggctcaccgcaacagtttagggaagccagattttgtgcgcctgtttgttgatgacattctgttttatcaacgtccgctgaaaagcaagaagtcactaatagacaactgcccttacgaataccatcttgacaaagacggcaacatccatccagtgaagtgtgttgccaaatcaaacccactctttcaagaattcagattgtggcaattcgttcaaaacctgcgtatttatcaacgggaaaagaccgtctatgacagacagttggatttgtttagcaacactcctgcagggaaactgcaaacagatgttgacgtaacttcttgttttctcaaatcggaagaagactatgtcatgctattcaactggctcaatgaaagaagttccatcaagcaagacacactgcttaacacctatttcaaaataaaaaaggagaaaggaaaagacaaatatccataccgctggaactacgtagaagataaagagtatccatgtaatgagacgcgcgccgctattcttgctggtttggagaaatgtaatgtatgtgccgatttcctcacccatgagaatgaaatggcattatggcatattctctattccattgaagacaaaatcgaaatcaataaagcattgaattcgtttgctgacaagcaccaacttggaagcaatttcgccgaggtgttcagtaaaataaaaccattcaagaaagactacggctcatattcagagaaagccatcaagaagttgctgtcactgatgcgaatgggcagttactggagtgatgcaaatatcgacgcaaaaactcgtgaacgaatcgagaaaatcattaccggagaatacgacgagcgcatcaagaaccgtgtcagggaaaaagccatcaacctgacagacattaattatttcaaaggcttacccgtatggcttgcatgctatatcgtttatgaccgtcactccgaagcacaggaaatagaaaaatggaataaacccgaggatattgaccaatatttaaataccttcaggcagcattcacttcgcaatcccatcgtcgagcaattggttacagaaacgctgcgcaccgtcagagacgtctggaaacaggaagggcaaatagacgagattcacctggaacttggtagagagatgaagaatcctgccgacaagcgcaggcagatgacagagcgcattcagcaaaacgaaaacaccaacctgcgcatcaaggccatgctgatggagttcatgaatcctgatttgggcattgacaacgtccgtccccattctcccagccagcaagaaatcctgcgcatttatgaagaaaacgcattagacaatcttagcaaagaagacaaagaatacgacttcatatctaaagtgtcaaaattggcccagccgtcgaaatcggatattatcagatacaagtgttggcttgaacagaaataccagtcaccatatacaggaagaatgattcccctctccaaactgttcacttcggcctatgagatagaacatgtgattcctcaatcccgctatttcgacgattcgttcagcaacaaagttatctgtgagtcggaagtcaacaaactcaaagaccggcaactcggctacgagttcatcaagaaccacgcaggggaaattgtgcaactcagccaagggggtactgtcaagattctgtcggttgatgcttatgagaagttcgtaaaggactactatgccaacaaccgaacaaaaatgaagaaacttttaatggatgatatccctgacggtttcattgagagacaaatgaatgacagtcgctatatcagcaaagtagtaaaaggactgctctccaacatcgttcgtgagaaacaagcaaatggagagtatgaacaagaagcagtatctaaaaacctcatctcgtgtaacggcaccattacagaccgactgaaaaaagactggggcatgaacgaagtatggaacagcattatactgccacgtttccaacgactcaaccaattgactggtaaaaactgctttacaacctttaaccgcgaaggtcatgagattcccaatatgccattagaactgcagaaaggttttaataagaaacgcatagaccaccgccaccatgccatggatgcaataatcattgcctgcgcaactcgtgaacatgtaaacctgctcaacaacgaagcagcgcattctaagcacaatgccaacagatatcaactgcaacgcaaattgagacgatttgaaaccgttatcattaacggaaaagagcgtgaaatagcacaggaattcataaagccttgggacacctttactacagactcatggcagatattagacaacatcattgtcagtttcaaacagaatctgcgcgtcatcaacaagacaaccaaccactatcaacatttcgaccagaaagggaaaaaaggtcttgagaaacagaaccatggcgacagttgggccattcgcaaatccatgcataaggacaccgtctttggcgaagtgaacttacgcatgaaaaagaccgtatcactgaacgatgcagtcaagaaaccagaaaacattgtaaataaggatttcaagaagaaagtgaaagaactgctttacaacggttatgatgctaagtctatcaagaaatatgttgaagaaaacaaggacatctggtcagacatcaacctgtctaagattgaaatatactatttcactaaggatgagaagaaaaggaatggtgagcccaaggagcgatactttgctacacgtaagccccttgacacaagtttcgaccaaaagagaatcaaagagagcgtgacagatactggcattcagaagatactcttagcccatctggcttcgaaagaagacaatcctgaattagcattttcaccagatggcattgatgaaatgaaccgcaacattgttgctctcaacaacggaaagttccaccagcctattttgaaagttcgcgtttacgagaaagcagaaaagtttgccgttggtcaaacgggaaataagaataagaaatttgtagaggctgccaaaggcactaatttattctttgcattctttgaaactgaaaaagaggacaaagaaagtggcaataaagaagccatacgctcgtacacgaccatacctctcaatgttatgattgactgtcaaaagaaatatggagcacactggcgcagcaatattgaggttttcctgaaagacaaagacatggtggatgctgaggcaaaacttttgtttattcttactcccaacgacctgatttatgtcccaactaatgaagatacttctaatggtataatgcaaatcgataaaaaacgaatttataaaacagttagtttcaataaataccaatgtttctgcataaacagtaacgttgcaactcctatcataaacaaagtagaatacacggcatccaacaaaatggaacgtgccataacaggcgagatgatcaaagaaacctgcattcccatcaaggtagacagattaggtaatataatagagttgaatggcactaaagtttagaagttgttttctatgataaaaaagacactttgtttcagcaatcctgcctatctctcgttgcgaaatgctcagttggtaatcaaactgcccgaaatagaaaaagcagataacctgactgaggaattcaaaaaggctaatgagttgacacgtcccattgaggacataggtgtcgtggtgctcgaccacaaacaaataaccatcacgcaaggagcattggaggcattgcttgaaaacaacagtgccgtcattacttgcgactctaatcacatgcccgtcggcttattgttacctttggttggcaacaccacacagaatgaaaggttccgcgaccagttggagtcttccctacccctccgcaagcagttatggcaacagactatacagtacaagattcgcaatcaagccgccgttcttagacattgttcacaatcagaaactaattgtatgatgatttgggccaacgatgtgcgcagtggagacccagacaatatagaggcacgcgccgctgtatactattggaagagtctgtttggccatattccaggttttatacgtgaccgtgaaggtgttgctccaaactgcatgttgaactatggctatgccattctacgtgcagtggttgcccgggcattagttgccagtggcatgcttcccacacttggcattcatcaccataatcgctacaatgcctactgtttggccgatgatattatggagccatatcgtccatatgttgatcgtttggtttataacattacagagcaatacggagttgaggttgaattatcaaaagacatcaaggcagaattgttgtctattccaacacttgatgtggtcattggtggaaaacgcagtccgctaatgattgctgtttcgcagaccacagcctcgctttataagtgttttagtggtgaactccgcaagattgtttatccggaaataggatgatatcagagcgatttagtgaatatagggtaatgtggcttttggttttgttcgacttgcctacagagacgaaaaaagacattcgtgaatacacaaagttccgtaagcgtcttattcaagacggtttcacaatgtttcagttttccatttatgtccgtcactgtgccagtatggagaacgcagaggttcatcgaaaaagagtaaaatcaatgctgcctgagtttggaaaggttggaataatctgtattaccgacaagcagtttggcaatatagaactgttttatggcaaaaagccacaactacccaatgcagcaggtcaacaacttgaactcttttagaaaaggagaattccaacataatgatggaactctcctttttctttgcagtattttttattttctatttttctttgtaaccacctgattatcatttctttctactaatcgagatgtttatgctactgcaaagatactaatttttcagcaaatcacaacagatggttgcgtcaatatcgagttcaattggatgtttatgctactgcaaagatactaatttttcagcaaatcacaactttacccgatgctgcgcctaattgcttatagatgtttatgctactgcaaagatactaatttttcagcaaatcacaacggcggtggtaacgacatgaaggtgatggaggatgtttatgctactgcaaagatactaatttttcagcaaatcacaacaggttcttttgttagtccgcaggctggagagatgtttatgctactgcaaagatactaatttttcagcaaatcacaactgcaccttgtcacggtattttgatggctgtgatgtttatgctactgcaaagatactaatttttcagcaaatcacaactgttcgcggccgcgtatcagaaaatatggtgatgtttatgctactgcaaagatactaatttttcagcaaatcacaactctattacgttaaatattcctttttattatgatgtttatgctactgcaaagatactaatttttcagcaaatcacaactcacaacagacgagaagttgttagggtcaagatgtttatgctactgcaaagatactaatttttcagcaaatcacaacatcgtttgttttcttcagagtctatgtctgatgtttatgctactgcaaagatactaatttttcagcaaatcacaaccaccaaacaaagtatattttgccctataaagatgtttatgctactgcaaagatactaatttttcagcaaatcacaactattgaatgtgttacaccaagcgtcagaaggatgtttatgctactgcaaagatactaatttttcagcaaatcacaaccaaaacctacacacatatattcatcacttagatgtttatgctactgcaaagatactaatttttcagcaaatcacaacagaatgagattagtctataagttctacatagatgtttatgctactgcaaagatactaatttttcagcaaatcacaacaatgtcgcataccgccgcatgggcacgcccgatgtttatgctactgcaaagatactaattcttcagcaaatcacaaccgtggtgagggctgctgtggtacagcagcagatgtttatgctactgcaaagatactaatttttcagcaaatcacaacaaattctgctccttggcttgattgatgaaggatgtttatgctactgcaaagatactaatttttcagcaaatcacaacggacaaaatgctcacaaaaaaagtgccgccgatgtttatgctactgcaaagatactaatttttcagcaaatcacaaccataatcggggtaattgatatttttcttgaggtgtttatgccactgcgaaagtaccaacattcggcaaacaacatcataaagcattgacaacaagcagtatacgctcatcgactcaacccatcatgcagtttcatataggcatagaaaaagccttgtataaaacatgtgctgcttcgaaaggatggctccgcgagcgcaataatcatatcttatacaaggcttacatatacttctgccgctcatttaagcatcagaagggcagatcgtcggcagcactctcgccttcttgcggctgtgccggagggaacggagtggcctgctgaactggctgtcccacaggtgctgcactggcgggtggcggcggcgggaaggcaccaggtgctgccatgggctgctgtcccatcattgctgcctgcgcagcagcgggatccactctgtcaacacgccacgcagagagcgtattataccatcttccctgatattcgcgcgcatctacgtcgaaactaacgcgcaattcctcacctatctggatattcatactcgcgattctgtctgctccaaacacgcggaaacagcattttcgcggatactgatcgtgggtttcaataacatattcctgacttttccaggcattacctgtgcgcgatgaaacaccgccctgctctggaagcacggcaataacttttccttctaattccatattcttattattattgaatgatttaatgatagtttcaaccatgatggccattggctttgaggtgtctgcaatgattgctgcagcgcgataaagccggctctttttgctttcagtttgcgaaattaataaaatagttctaaaatgagaaactttttgagtgttttttttgttttcctaatcggttttttgtatttttgtacccaattgcaaggcatgaaaccggcaagagagaaaataagaatactgaataaattaatagacacctatgagatttacattatcaagcacggcgcttaacagccgcctttcaacactttccaaggtaatcaacagcaagaatgcgctgcccatcttggattgtttcctttttgaagttaccaacaatacgatgaccatcaccgcctctgacagcgagaacgtgatgaagacgaccatcaatttagatgattgcgacggcgaaggcaagtttgccgtaaacaaccgcaccattcttgacgcagtaaaagagttgccagaacagccgcttacaatcgacgttgacactgcaagcatggccatcaaggtgatctaccaaaacggtctttacaatttcacaggtcagaatgcagacgactatccatcggtgcttccgatgaccgataacgccacttcgcttgtattacccaacaatgtgcttgccgacaatatcactcgctccatctttgcaacagccactgaggaactgcgcccggtgatgaacggcatctatttcgaccttaccaacgaggctttggctatcgttgcaagcgatggacacaaactggtgagaaacaagaatttcaccgtgaagagcgacaatcccacatcttttatcctgccaaagaagcctgccacactgctgaaaaatgtgctgggcaaggacggcagcgatgtggtgctccgctttgacgaccgcaatgccgacgtgacatttggcgacaccatcctgcaatgccgcctgattgagggccgctaccccaactacaacagcgtgattccgatgaacaatcccaatcaactcaccatcgaccgcaaggtgctgatcggtgccctgcgccgtgtgctgccctttgccagcgaaagcagtcagttggtgcgtctgcatttggagagcggaaagattgaaatatcatcagaagacatcgactttgctaccagtgccaaggaggaaatagcctgcgactacaccggcagcaccatgaacatcggcttcaagggttcttcactgaacgagattctgaacaatctctcgagcgaggaggtggtgctcgaactggccgaccccagccgcccatgtctgattatccccagcgagcagcccgagaatgaggatgtgctgatgctgatcatgcccatgttgctcaacgactaacacacgcacacacttatgaaactgaatcttactaagcccctcgttgtcttcgacttggagacaacggggcttgatcttgtcaaggacaggattatccagatatcatatattaaggtatttcccgacggaaaagaggaaagggtgaaccaatttgtaaacccgcagtgccccataccagacgaagtggtagaactgacaggcatcagcaacgaggatgtgaaagacaaaccaacattcaaagaactggcaccgagcctgtcttccgtgttttcgggatgcgattttgccggattcaactccaaccactttgatattcccctgcttgcagaagagtttctgcgcgcaggcattgacttcgacttctccagaagccgcttgattgacgcacaaaccatcttccacaagatggaacgccgcaacctggctgctgcctataaattctattgcgggaggaaaatggaagaggatttcactgctcacaaggccgatcaggacacagaagccacctatcgggtgctgcaggcacaactcgacatgtatgctccaggcagacaggaagagccggaacgccaactgaacaatgacatggatgaactggcagacttctcaaagaccaatgacaacgtggactttgctggtcgcattgtgtggaaaaacatggtagacgcagacggaaacgtgctcaccgacgcagagggaaagccgcgcagatacgaggtgtttaacttcgggaaatataaaggatggggagtggccgatgtgttgcatcgcgatcccggttattacagttggatgatatccagcgatttcacttataacaccaagcaggcactcacacgtatccgtttacgcgaattcaacaagaaataattctgacgccatgctcaaagggaaaaaaatcgtattaggtataacaggcagcattgctgcctataaggcatgtctgattatcagaggtctcatcaaacaaggcgctgaggtacaggtggtgataacgcctgcaggcaaagagtttatcacccccatcacgctgtcggcattgacgcataagcccgtgataagcgagtttttctcgcagcgcgacggcacgtggaattcgcatgtagacctgggaatatgggctgatgccatgattgtggctcctgcaacggcaagcaccatagggaaaatggctaatggcattgccgacaacatgctgataactacctatttgtcgatgaaagcccctgtttttgtggctcccgccatggacttagacatgtatgcacatcccaccactcagcagaatctggcaaggctcaagtcgtttggaaacaggattatcgaacccaaaagcggtttcctggcaagcggactcgaggggaaaggccgcatggaagagcccgaaatgattgtgaaagcgcttgacgagttcttcgacgaagaagaggccaagaaccttgaaagcagaaagatgaagggcaagagaatcatgataaccgccggccccacatacgaaaagatagacccagtgaggtttatcggcaactattcgagcggaaagatggggtttgcccttgctgaagagtgccggaaaaggggtgccgaggtgactctgatagcaggcccggtgagtctgacatgccattcaggaatcaagcgcattgacgtggagagttgtgaggacatgtatcaggagtccataaaggcttttgccgatgtcgatgcagccatcctctgtgcggctgttgccgatttccgtccagaaaccgtagccgacaagaagattaaacgtgagaaggacgacctcatactgcgtctggctcccactcacgacattgcagccgccttgggcaagatgaagcgcgacgggcagcgcatggtgggattcgcactggaaacccacgacgaagaagtcaacgccaagaagaaactgcaaaagaagaacctggatttcatcgtgctgaattccacaagaaacaagggtacgacattcagaagcgacgacaaccagataagcattatctctgaaaacgggcagaaggatttcgcaaagaagccgaaaaccgaagtggccaaagatattatagacgaactggagagcattctatgagccgtgctgataaccaaaagacaaacgtaagaccaggcatgagggctgccaaggcgcggattctcatgctcgtgctgttctcgttgctgaacgttgcgactggtatggctcaggaactgatggcaaaaataaccatcaatcacaatcagatacaaggtaccgatgccagcgtgtttgagaatctgcagcaaaccatggagcagtttatcaatgaacgccaatggacggcattgcaattccagcaaaacgagcgcatcgtctgcaatttcaacatcacggttaccaaatacgaccaaagccagaacctgttcacctgcacggctcttatccaggcaaaccggcctgtttacaacagttcgtataccaccactctgtataacaacagggatgccgacttcaattttgagtttacacagtttgaccagttgaacttcaacgaggagcaaatagacaaccaactgacagccttactggcttactatgcttacctgattatcggtatcaacctggattcattcgctccgatgggtggcgaagaaatcctgcaacagtgcatgaatctggtgaacaatgctcagaacctgagtttttccggatggaaagcattcgacaacagcagaaacagatttgccatcatcaacgactatatggaaggagccatgcgcccattccgccaactgcaatacgactactaccggtcgggacttgacgaaatggcaaacaacgtggaacgaggaaggacaaacatcaccacagccctggagaatgacctgaaaaagtgccacgaagaccgtccacttagcatgctgccccagatttggaccgactacaagaaggatgaactttccaatatatataaaggtaaaggcacgcaaaaggagaaagagagcgtttacgaaatactgttctctatcaacgcttctcagaacaattattgggaaaatatcaagaaataaatgctgaaacaactatatatcaagaattttacgctgatagacacactggacatcgtgtttcgtccagggttttcggttatcacaggtgaaacaggagccggcaaaagcattatcctgggtgccatttccctgcttttgggccagagagccgattcaaagaccatcaaaaacggcaccaaccgctgcatcattgaggctcacttcgatctgagcaactatgacatgagccggtttttcactgacaatgacatcgaatatgatgctgaagactgtatcttgaggcgcgaactgacaagcagcggcaaaagccgggcattcatcaacgacactcctgtttctttgaatcaactcagaacgttgggacagcaactggtggacattcactcgcaacaccagaatctgctcctgcaagaagaagatttccagttgaatgttgttgatatcattgcgaaaaacaagcaaagactcaatgaatgcaaacagcaattcaaagcatatcagcaggccaagaaggcagtggaagaccaagaagagagaatcgccaggacgagagagaacgaagatttcctacgtttccagttgaacgaacttgctgatgcccggcttcaggctggcattcaggaagaactggaaagaaacagcgaaacgatgtcgcatgctgaagagattaaaagtgcactctatgaatcggaaaacatcctttctggcaatgagcacagtatcctcacgcaaatgaaagactcttcacgactgctggacgatatcagaaaggtgtaccctgacatcggtgaatgttccgacagactggccagttgctatattgaattgaaagatatttcccaggaactgtatagccatacccagaatatagactacgatccgaaggaactggaagccatcaacgaacagttggaccacatctattcgctggaaaagaaacaccacgtgcaaactgtggaagaactgattgagattcagaatgaaatatcaaggaaactcgaccagattgagaacagcgacgaggaactggaagaactaaggaacgcggcgcaagagaggctgaacgaatgtttagaagttgccgagcaactgtcggaacaccggaaggccgccattaagagcattgaaaaggaaatggtggacaggctgattgcattgggcataccccacgtgcgcttccagattaagatggaagacaaggaactgcaagcagacggcaccgaccgtatcagtttcatgttcagtgcaaacacaagcaccgccatgcaaccgatcaaggaggtggcttctggcggagaaatagcacgcgttatgctttcgctgaaagccatgatcagcggtgcggtgaaactgcccactattatctttgatgagatagacacaggtgtcagtgggaaaatcgcagagagaatggcagacatcatgaaggaaatgggacagcataaccgccaggtaatcagcattacgcacttgcctcaaatcgcagcatccggctcatcccactataaagtattcaaagaagagggcgacaagggtactatctcaaggatgtgcgaactgaacaaggatgagcgtgtgatggaaatcgcacagatgctgagcggtgccgatatcacaaaggctgccaaatcgcaggcccaggaattgcttaagcagaaacagaacagaaaagaatgaagtataatatatgaaaagaagaattatgaaaagacaattattgaccatcacgattgctatattcagcatcatcatagcccaagcacagccggcatctgtcaagaatgccgctaagagtgtgttctcgttgacaactttcagggcagacggctctctgctggcatcatcacatggtattttcataggtgacaacggagaggcagtcagcgacttaacaccattcataggcgcatcaaaagccgtggtcatcgatcagaaaggcaataagatgaatgtatcacgaatgctgggaatcaatgaaatctatgacatcgcgcggttccgtgttgacggcaaaacaacgcctgccacgttagcacaagccacggttccggcaggcggcaagacatggctggtcggctatggtgtgaagaatccctctatcgtagagaccaccg

SEQ ID NO: 1068 - DNA, 24629 bp, synthetic construct
  source 1..24629: mol_type = other DNA
  misc_feature 1..24629: note = Synthetic
ttctccaataggctcaacaccatattggtgccccagtctttcatggattggagcaatgcccgtttcgcccctggcgagccgaccaagtccacgaggcttatcgtgcaagtgggcaatcctgccgatgagcgtgtcacgacctatttggaaaagaaaggctacgaggtggaaagcgataagttggcggccgagaagactacctatttcctgcgcatggtcgtgtcgctggtaatggtcgtgggattggtgatatcagtgttgagtttctatatcctgatgctaagcgtctacttgctggtgcagaagaacgcctccaagctggagaacctgttgctgataggctatagtcctgctcgtgtggccatgccctatcaggtgctgaccattgcgctcaatgtggctgtcctctttatggcctgggcgttgttgtctgttgcccggggctattacatggatattctcactacgctcttcccccagatggagtcgggcgggctgtggccttccatagtggcgggtctcattcttttcctggcggtttccgtcctcaatgtcatcgtggtgcgccgcaaggtcatgcgcgtttggcataggaaagacattgagtaggcgagtggatagattgaagtgccgtcgtgcgcttatccctttgaaggtcatccgttggatggcctttttcgtttatgggacgttagttttctggatagcgcgagtttttaacccaaatcggtcattagactttcgtcagattgtccgcttatgccttgcgtattgcttcacggcttggcgatggtgtagcgggctacaccgagccaaggcggggagcaaggcgctggcagaagtgggcaagatggtggaagagcatccctcttgcaagcggaaatgttacttcatgcggtctgatgaccgatttgggtttaacctcttaatacttaagcttatgacttccataaaactgaaatttcgaccttcgaaggtcaatgggaaacagggtacattgtattttcaagtgattcacgaccgcttgccccgacagataggtacgggctacaaggtctattcccatgagtggggagacggcggattgagactcccgcctcaggggacggaacgccggagttatctcctgggtgtgcaagtccgcttgcgaaaagacgtggagcggttgaggaatatcatcacacgcctgcagcagtcttgcgagtcctataccgtggcgcaaatagccgacatttacaaacagccgcgtaacgacagttccaagttgggggcgtttctcaacactacggtgagacatctccgtaaaatcgggaaggtgcggttggcggaaacatacacggtcatgatgaatagttttctccgtttccgcggagagaaaggtgatgttcgttggcgggagatagacacggatttggtcaaggagtatgaatattatttgctggaggagtgcggattggagttgaataccgtctctttttacatgcgcaatcttcgcgctgtctacaaccgggccgtggagaaaggtctggtggaggagaaacgttttcttttcaagcatgtgtatacgggggtgagaaaaacggccaagcgtgccatatcgcctgccattatccagaaaatcaagacgctggacctctcttccttgccggccttggcgcgctctcgagactatttcatgcttagcttctatttgcgtggtatgtcgtttgtggatttatcctatctcaagacatcggatttgttgggtgaccacttgcactaccatcgccagaagaccaatcagccgctttatatcaagtgggaagagcaaatgggggaaatcgtgcgccgataccatgtgcctggctcaccctatttgctccctattatcagcaagcccgggcgggacgaacggcggcaatacctgaatggtttacatcgggtaaacaaccacttgaagctgatagggcagatggtgggatgccctatcaagttgacaacgtattgcgccaggcatggatgggccagcatagcgaggagcatgaatgtgccgttgtcggtcatcagcgaatccatgggacatgggtcggaaagcaccacacgcatttatctggcttcattggatgatacggtcatcgatgatgccaacaggatggtgattaatgctatttagcgtcgtttcacggttcaatggattttcagtggggaataaccagttcttgccttgcggtgcccgctgatatgcggaggtgttgtgagcgacgtgcgtgggagagggatgaatgagtgagtaaatcttgacaaatcctggatggggttggaggcggttcgggtgcgaggaaaaacgcaactagttgcatggccccacgcaactagttgcgatggccgatgaaactagtttcgtgaccctttgatactagtttcgtttcccgccgcctgtacatgggctgcctggggctttcgttcccgcaagaacgtggaagtaagatttcttgatattctcccgcgcgtcccatgcctggaaatgccccgtgcgccacatgtcgcaccttgtcgatctcctgttacctcatgatatttccactgagtcgtacatggtgcagccacgcaactttcgccgaactcatgttagatataaaaagcgtggaagaaacaccatctgtttcttccacgcttttgagagcctcttgtcggattcgaaccaacgaccccgagattacaaatcacgtgctctggccaactgagctaaagaggcaggtgggcaagcgattcctatcgcgccgctacaaccaagtacccttgctgcgttcccaccctgggggattccgagggagctggccgtaggagacttgcccatgtcgctgttaagcgggtgcaaatttacacattatagctggaattagggtgggaagtggcctttaattatattttattaacttatctgtctgcgggatgggcaggtatgtacctggtctcactggagaatctcggccttgagaatgcgcacgtcttccaggggtcggtcgttatcatcagtgtctacccactggatttccttcaccacgtctaatccctctatggtttctccgaatacggtgtattgaccatccaggctgggcgtgccgcctattcgcttgtaggcttccctcaccgcaggggtcaatttcactttcccttgggtgtactcgtcgagccaggcttgcgccttgtcgagcatggcatcgtcgtatcgcctgccatagacgatgtaaaactgggcttccgaggatgatttctcaggattgacatcgtcgccacggcgggcggcggccaatgctcctcgtttgtggaagaagagcgggtagcgaatctcggcgggtatctcctggctttcgatagactcgcccagtttttgtcctggctgggcatggcggctcaggctgtctccgctctgtatcatgaacccgctgatgacgcggtggaagagttggccgtcatagtatccctggcgcaccttgcgcaggaagttgtcccgatgaaggggtgtctcgttgtagagggccaacttgatatctcccttggtggtgtggaggcataccacgtgacgcagggagtctgtctcctgtgcaggtaccagggacgtcaccaggcagaaggcgcatagtaacagcagtgttctcataggggatagactggagggttattcattttcggaaggcaggaagccttgtcggcgcagggcttctatcatgccttggctcatggcctcgttgtctttcttggtgtagcgaaggtcggtgaacacctgggccagcgtctgcttgtggttgatgtccacgaagtattggttttcgggcaacgattccttgggttgatagaagcggtcgatgcgctcgggcgtatagtcttggtaggtctcctggtgtatcatggcctccaggggaagcctgtccggctggggaggttgctccgcgggccagcccagggtgatagtggccacggggaacacgaggcggggcaggcgcagggtatctatgatgagttggggcatgtatacggtggtgcccaggaaacaggtgcccaatccctcttcctcggccaggttgcagaaggtctgggtatagagcagggcatctgtcatggcgttgaggaaggaaaggaagttatcgtagcctggtgtcgcttgccggttctcggcccaaagagtggtgcggcggaagtcggcgcagaaggtgagcgtgacaggtgcttcccgcagcatgggttgttggaaatgggcgggcgctagagctttcttcatctcttcatctcgggtgatgactacgctgtagagttgcaggttgcccatggtaggggtgcgctccgcttcctccaatagtctgtggagcaattcgtcagacacttctcgctgggcgtatttgcggatggttcttctctgtctcaatgattccatagtgtgtatccgtgttatatatataagtatgtatagcgaaatggttctatccgcgaagatagtgagaatatgggagaaagccaaataatttgtccgcgacatttcgataattgccacaatatttttccgtatggaaataattgactaattttgcaagcgattaataacgcatgtactatggacaaccagaagacatattcgcaagaagaggcttacgaggccagtttgaagtattttggcggtgatgagttggccgccagggtgtgggtgaataagtatgccatgaaggacagcttcggtaatatctatgagtgttcccccgaggatatgcactggcgcattgcccgtgagttggctcgtgtggagcggaagtatcccaatcccctgagtgaggagcagatctttgagttgcttgaccacttccgctatatcattcccgcgggaagccccatgactggcataggcaatgatttccaggtggcttcgctgagtaattgtttcgtggtgggactcgatggtgacgctgattcctatggtgctatcatgcgtgtggacgaggagcaagtgcagttgatgaagcgacgcggtggcgtgggacatgacctgagccacctgcgtcccaagggcacgcctgtaaacaactccgcgttgacaagtacgggcctggtgcctttcatggagcggtatagcaattctacccgtgaggtggcacaagacggcaggcgaggagccttgatgttgagcgtaagcatcaagcatccagatagcgaggctttcattgacgccaagatgacggagggaaaggtgacgggtgccaatgtctcggtgaagttggatgacgagtttatgagggcggccatagaggacaagccttatgtgcagcaattccccatagacagtcctaatcctgtggtgaaaaaggaagtctccgcccgcaagttgtgggagaagattgtgcataacgcttggaagagtgcggagccaggtgtgctgttctgggataccatcatccgcgagagcatcccggattgctatgccgacttgggcttccgtaccgtgagcaccaatccttgcggtgagatacccttgtgtccttacgacagttgcaggttgctgagcatcaatctctatagctacgtggataatccctttaccgccgaagctcgctttaacatggagaagttccagcgtcacgtggcattggcccagaggctgatggatgatatcgtggacttggagatggaaaagatagaccgcatcatggagaagattgcccaagatcctcaaagcgacgaggtgaagggcgcggaatatcacctgtgggagaaaatcaagcgtaagagcggcatgggcaggcgcacgggcgttggcattaccgccgagggcgatatgttggcggccttgggattgcgctatggcacgcaggaagctaccgatttttctgtcagcgtgcatcggcagttggccttgagcgcttatggctcttcggtgaacatggccaaggagcgtggcgctttcgagatttacgacgccaagcgtgaggagaacaaccccttcgtgttgaggctgaaggaggctgatcccgcgctctatgaggacatgcgccagtatggcaggcgcaatatcgcttgtctcactatagcccccacgggtaccacgtctatcatgacacagaccaccagtggcatagagccagtcttcatgcctgtttataagcgtcgcaggaaggtgaatcccaacgacacaaacgtgcacgtggactatgtggacgaagtgggcgacagctttgaggagtatatagtctaccaccgcaagttcctcacctggatggaagcacaaggcatagacaccacccagcgttacacccaagaggagatagacgctttggtggctcggtcgccttactataaggccacggccaatgacgtggactggttgatgaaggtgaaaatgcagggggctatccaaaagtgggtagaccattccatcagcgttacggtcaacttgcccaacagcgtagacgaggctttggtgaaccaactttaccaagaagcatggcgcagcggatgcaaggggtgcaccatatacagggacggcagccgttcgggtgtgatggtctccgtatccaaaaaagacggaaagaaagcctctgcccagcccacggaagagatgcctccctgcaagcaccccgaagtgaccgaggtgagaccaaaggtactggactgcgatgtcgtgagattccagaacaacaaagagaaatggctcgctttcgtgggactgcttgatgggtatccctacgagatattcaccggtttgcaagatgacgatgaaggtatcatgttgcccaaatcggtcgtgaaaggcaagattatcaagcaggtgaacgaagacggcaccaagcgatatgatttccagtttgaaaacaagcgcggctataagaccacagtggaaggactgaacgagaaattcaatccggagtattggaattatgccaagcttatatctggcgtgttgcgctatcgcatgccgatagaccatgtcatcaagttggtgggacagttgcagttggatgacgaaagcatcaacacctggaagaatggcgtggagcgtgcgctcaaaaagtatgtcagcaacggaaccaaagccaaaggacagaagtgtcccaattgcggcggagagactctggtctaccaggaaggttgcctgatttgcactaactgcggcgcttctcgttgcggataactcgtaattttgccatggccttgaaggaaagtttcatcacgctccataacttgcgcttccatgcctttcacggcgtattggcgcaagagagggtggtgggcaatgactatgagctgtctctgcgcctgggctatgacgtgacccgagccatctgttcagacaaagtggaagacacgctcgactacgcacgggtttaccaagtggtggcgcaagagatgggagagccttccgcgcttcttgagagggtggcaggcagaataggtgagcggttgttccagaagtttcccgctatcacctctgcccatatccatttggtgaaacgtaatcctcctatggggacggactccgaaggggcaggggtggagctatatttaataaatgataaaacttaaactaaagtttaggttttctcgtgtaaatatgttaatttcgcgacgtggcaagatatcagatgttttataggttgctggcctgtcttatggccataagcgtgtggagcgcggaggcatggtctgccgacaggcgttttaccctggtgatagatgcgggacatggtggccacgacacaggagccataggtgcgatttccaaggagaaggacatcaatctcagggtggctttggcttttggcaagtatgtggagaatggttgtcctgacgtgaaggtgatttacacccggaagacagacgtgtttgtctcgttgatgaatcgtgccaacatagccaaccgcaacggcgcggaccttttcatctccatccataccaacgccttggccaagggaaagatagcccgcggctttgagacctatacattgggtatgcaccgcgccaaggataacttggacgtggctatgcgagagaactctgtcatttccatggagaaaggctatcagcagacttatgcgggcttcgaccccaagtcttccgaaagctatatcatgtttgagttcatgcaggacaagaacatggagaaaagcgtggagctggccagcatgatacagcgcagcgtgtgccgtgtggctggcaggactaacaagggcgtgcaccaagcgggcttcttggtactgcgagagacctccatgcccagttgcctcatagagttgggctttatcaccacccgcgacgaggaacgggctcttaacgacaagggaacggtagacgatatcgcccggggtatctaccaggctttccgtgaatataaacgcaagcacgctggcggaggcgcgggaacctacgcagtagcttcctctcccgaagccgacagctcttcagagcgggaaacccgtaaagaggaaaaaagagaggaacggcggaagcgcaagtcggacaaggaagcccctgtattcaaggtgcaggtgatggcctccgacaccaagctcaagaaaggtgacaggcagttcaagggcgagaaagattgtgaatactacaaggagggcggactttacaagtacaccataggcgagtcgcgtgactataacgagatttaccgtctgcgcaagaaactgctggagaagttcccccaagcctttatcgtggctttcaaggacgacgagaagtgtgatgtcaaccaggccatcagggagtttaagcgaaaccgctaacgccctcggcctatatacatattatatatataaagacgaaccacaatgagcaagatgcgatttaccaaagagataaagatagccctcgtgggcgtggtaggtatagtggtatgttatttcgggctcaacttcctgaaggggttgcccatattctctaccgacacgatttactatatcacgttcgacgacgtgaaaggcatgggcgtgtccacccccatttatgccgacggctaccaggtgggcgtggtcaagaatctttcttatgatttcaaccagggaggccccgtgaaggtggccgccagcattaacaaggacttgcgcatacctttgggcagcaccgcggagatagacaaggacttgatgggcaacatacagattaacctgttattggccaacaatccccgccagcgtgtggaggtgggcggctctatcccgggaggcatcaacgcgggtgccttgggaaagatgcaggacatgatacccgccatccaaaagatgctgcccaagctggattccatcatgaccaacatcaacttgttgctcgccaatcctgccatcgcccagtcgttggccaacatgcagaccgtctcctccaacctcacggtctccacccgggaactcaatacgctcatggcttccctcaaccgccaggtgcctggcatgatggcgaaggcagacaacgtgctcgacaataccgagcgactcacgggaaatttggcggcgatagatgtgcaggcgactgtggacagcgtcaaccagacattggccaacgtcaatgcgttcaccgccaagctcaacagcgataagggtacgctggggttgttgcttaacgatccctcgctctaccgcaatctcaacgctaccatgagttccgccgactccctgttaatagacctcaggcagcatcccaagcgctacgtccacttctcccttttcggcaggaaggacaagtagggaaaaacgaacataagcgaatcgggcaagttgcgtaagtgaaatgatcaactcacttatgcaacttgcccgattcacttatgtttataaaaacttgcgtttagattggttttgccttttggcatggctttcgggagattatgtgtgaaagctgtaaggttacgatttcttggaaattttagaggaaaagatggaattttagggatgttttctgattttttatgggaaaacatcaaaactctcgcgctaaatcactatctttgtgactattcttaaccttaatataaatatgtatggaaaagagaattttaggtcttgacctcggtaccaacagtataggttgggctttggtaaaaggagagcgtcatgaaaacgataatgagaccatattgagctatatagaagcggctggcagcaggatattgccactggacgccgcggcgcaaggagatttcgagaaaggaaatcccgcgaagacacaaaccagtgagcgtacccgtatgcggggcatgagacacttgctggaacggagcttgttgcgcagggaacggctgcatagggtgcttgacatcatggactttctgcctccgcactactcccagtcgcttactcgctatggtaagttcaaggccgatacggagtgcaaattggcttggcgcaagacggagacgggacattatgagtttcttttccaagactctttccaggaaatgctccaggatttccaaaatcacggcaagttggaggaaaacaagaagataccctacgactggaccatttattatttgcgcaagaaagccctcacgcaacctgtctccaagcaggaacttgcctggatattgttgaacttcaaccaaaagaggggttactatcagcgagaagaccaagccgttgacgataatcaaaagaaacgggtggagtatcaggcactcaaggtgatttcggtagaggatactggtgagaagaaagggaagaacacgtggtacgacgttcgcttggaaaatggtttggtttatcactattccgctccgataaaacccgactggaaaggggagaccaaggagtttattgttaccaccaccatagatcagaacgggaagcccgaactagacaaggacgggaagccgaaatattccatgagggcacccaaggaggatgactacaagttgctcatggagaaaaccaagaaagacatcactgattcaggaaagtcggtaggggagtatatctatgacgcattgttggtcaatccgcagcagaaaataaggggcgggctggtgcgcacgatagagcggtatttctacaagaaggaactagaaaagattttgctttcacaagaacgtttcatccccgagttgacagaccgagagctctataggcgatgcgtggaggaactttatccctctaatgacgcatatcgccatttgatagagagcagggacatgcgctatctcttggtggaggatattctgttctaccagcgacccctgaagagcaagaaatccttgatagacgattgcccctatgagtcacgctcttacgtagaccgagagacgggagaaatcaagtcttctcccgtgaagtgtattgcccagtcacatccgcttttccaggaattcaggttgtggcaattcatccataacctgcgtatttaccaaaacgagaggtctgtggaaggcaaattacaactggacgtggatgttaccgaagaggtcttgccaacgccggaaagcaaggctgcgctgttccgctttctgaacgacagggaaaatgtgactcaggaaatcttgctgaaggaagttttcaagggtaggaaactttcagtgaaagattgtccctatcgttggaattatgctggggaggggaagaaatatccttgcaatgagactcgccacctgatgctcaagctgttgaagaaagcgggtatagacacggctttccttaccccagagaaagagcaagccctttggcacatcatgtattccgtggaagacaaagaccaatatgaaaaggcgttgagcacgttcgccaggaaaaacgatttgcctgatgggttcaaggagcaattcaagaaagcccccactttcaagaaagactatggcgcatattctcttagggccatcaagaaattgcttcccttgatgcgcgtcggtgaatattggtcggcggactgcatagacagcgagacgaaagagaggataagccaaattatccgcggagagatggatgagaaggttagccagcgcatgacgaaatcacgggatagctttactgatatctcccagttccagggtctgcctgtttggcaggcttgctatgtggtttatggcaggcatagcgaggccactgaaatccagcgatgggaaaagcccgaggatatagacgtttacctgaaagcctttaagcagcactcactgcgtaaccccatcgtggagcaggtagtgttggaaactctccgtgtggtgagggacatctggaagacttatggcaaggtggacgagatacacatagagatggggcgtgacatgaaaaacacggccgaggagcgcaagcggattttcaatcgcaaccagcaaaacgagaatgacaatttgcgtatcaaggctttgctgacagaattcatgaacccagacttcgagatagagggcgtgcgtccctattctccttcccaacaggaggcgttgcgcatctacgaggatggcgcatggagtggcctggacgaagagaaggaagacaagaaagaattggaagctatcagggagatattgggcaagttctcgcagtcggacaaggcgaagcggcctactcactccgaggtgttgcgctacaaggcttggctggagcaacgttacagttcgccctatacgggcgaggccattcccttggccaagctctttaccccggcctacgagatagagcatgtcattccgcaatcccgcttcttcgatgactctttctccaataaggtagtatgcgaggcggaggtcaacaagcttaaggacaggatgctgggctatgagtttatcaaggcgcaccaaggagaggtcgtgtccctgagcggcacgggaagatgtgcgcggatattgtcccccgaggaatatgagcaaagggtgaccgactgctacaagcacaataccgccaagatgaagaaactgctgatggaggaaatacccgacgacttcatccaaaggcagatgaatgattcccgctatatcagcaagttggtgaagtccttgctttccaacatggtgagggaagaaggcgaacgggaagccatttccaagcatgtcatcacctgtaatggcactatcacggaccgattgaagaaagattggggcgtgaacgatgtgtggaaccatatcatattgccccgcttccagcgcatgaaggatttgacgggcaggaacgatttcgtggccgtcaactcgcaaggccatgagattccttcagtcccgccagagttgcaaaagggattcaagaagaagcgcatagaccatcgccaccacgccatggacgctatcgtgatagcctgcaccaccaggaaccacgtgaatttgctgaacaacgaggcggccatgtctgagaataaggccaacaggatcgccctctccaggaaacttcgccgttatgagaactgcgcaatctataagggaggcgaaaccaagaacatcagcgtggctaaggaattcctgaagccttgggcaacatttcccgcggacgtggagcgtgcgctgggcgatattgtcgtgagcttcaagcaaaatctgagggttatcaacaaggccaccaatcactatgagcactataaagatggcaagaaagtgaaggtaccccagaagaagggcgacatgtgggtcgtgcgcaagcccctgcacaaggatacggtgtatgccttggtgaacctgagaaatgtgaaaaccgtgggattgaaagacgctatcttgatgcccgaccgcatcgccaacaaggacttgaagaagaaagtgaaagagctcttggcgcaaggcgatgacttgaaaaagataaagaagtatttcgagacggagaaagacacttggcaagacgtggacgtcaagaaaatagaggtctactacttctcggaggaaaccgccaaccattactacgccactcgcaagccgtttgatgccaatgtcaagatagacagtgttactgacacgggcatccaaaagatattgcgccgtcacctggaggaaaatggcaataaagcagacgtggctttctcgcccgagggcatcgcccgaatgaatgagaacatcttccgcctcaatggcaacaagcaccaccagcctatctataaggtaagggtgtatgagaaggccaataagtaccccgtgggacagacgggcaacaaggcttcgaagtttgtggaggcagccaagggaaccaatctgtatttggcggtttacgaaagcgaggtggtagacaagaaaacggctgaaatttccaagaaacgttcgtatgtgattgttcccttgcgggatgccgtggcaagacagaagcaaggggtgcccgttgctccagagcggaatgaagaagggggcaagttgctctttgtcctctcccctaaggattttgtatatgtgccgacggaagaggagagaagcaaaggggaagtgctgttgcctttagataagaacaggatttatatcatgatggacgctagtgatggaatagtcaactttctgccttattccgtggctaacctcatctacgctcttccaaaggaccaggcttcgggtttctgtacggatgggcgcatgatacaaaacgagtttggcttgggaagcccaaagtccaagaacgagcgagccctcacgggcgagatgatcaaggaaatctgcttgcctgtcaaggtagaccggttgggacgtatcacggaaatcaacgggaacaaggtatgataaaacgtacgttgtgtttcaccaatcctgcctatctgtccttgaccagcgggcagatggtagtcaagatgccagaggtggagaatgccgacttgcccgagcctatcaagcaggagagcgtaaggactattcccgtggaggatattggcgtggtggtgctcgacaacaagcgcatcaccattacgcacggactgctggaagtcttgctggaaaacaactgcgctgttatcacttgtgattcgaggagcatgcccgtgggattgctcctgccgctctgtggcaacacggtgcagagcgagcgtttccgtcaccaactggatgcctcgttgccgttgcggaaacaactttggcaacagacagtgaaagccaaggtggacaatcaagctgccctcttgcaagctgctacccatgccgaggtgggatgcatgagaaagtggtctgccgaggtgcgtagcgcggacgtgggaaacatagaagccagggcggccgcttactattggaaacagttgtttgccgaggtggagggactggagaattttacccgtgaccgtgaggggatggctcccaacaacctgcttaactatggctacgctatcctgagggcagtcatagccagggcgttggtgtctagtggcatgttgcccacgttgggcatccatcatcacaatcgctataacgcctactgcctggcggatgatatcatggagccttatcggccatttgtggacagattggtgcttgacatcgttacgcggcagggtgcggcttcctgcgaggaactctccagggaactgaagatggcactactctccattcccgtgatagacgtgaagattggcggcaagcgcagtccgctgatggtggccgccagccagactacggcttccctttataagtgtttcagcggtgaggcgcgcctcgtctcttatcctgtgctttgaatggcggcggacaggtttagcgaatatcgtgtcatgtggatactggtgtttttcgacttgcccacggagaccaagcgtgacaagaagacgtacgccatctttaggaacaagttgcgcagggatggcttcaccatgttccagttctccatctacgtgcgccattgcgccagcatggagaacgcggaggtgcacatgaagcgcgtgcgcgcctttctgccaaagtatggaaaggtgggtttgatgtgcgtcacggacaagcagttcgccagcatggaacttttctatggccagaaaccccaaaagcccaacgccccaggccagcagctggagctgttttagaccagaggcgttggattctctttatagtctcaccgcgtcggagttaccagcgcattattttttcaacacatatatggcgtgtgtcctgttgcctgtgcgcaggatgcccgtactctcgtcatgcgaccatttggccagttcccggtaggccgtggtgcggctcaggccggaaagggcaacgtagtcggccaggtacatcacgctgtgttccgctatgaatgccttggctcgcttcaggcgttcttcctccgtgtagggagacacacggcggcggaatcttcccggtgctttcgtgaggtgcatgtggtcattgacagcgttcatgagctttttctccgggccggaagttaatgctccccacgcagaagctggtggcgtttctgcggccgccctctccgtcctccgtctcccgctccacgcctttacggtaggccagggagggagtgaacacgcccagcccgtctatcttcacggagtccccttcacccaggttctccgccatgtagctccatagatagtctatcacggccactatttcgcctctggagaacgtggtgtggctggctatctgcttagccagcgcattgctgtcaacacattgcccgattattaatttagggtaggtcagcgtctttccctccttgttgaggtcgacagcctcctgcattacgtattttgccataccttgttgaattcgtattacttacctgcaaagatacaaaataataggagcaaatgcaagagaagatagctgaataatctgttccacgacgtggaatagaactattagttggctttttgcgatttataccttatttatcatgagtttgacggattatgttttgcgcatatcctaaatgtagagacgtggcgtgccgcatgtatgtgtcacgccatttctgcaatttttctcgaactcacgttatttagaaaagatttgttataggtgttttttttgattcttttcatttcttttcaaattgtttatacccagtttcgccttttcatggaaaaagaaagagcgtgaaggtatataagcaagaaggaagaaacctctcgtttgttgaggtctcttccttcaagcatgggatttttcccatttctatcattgcttacaacactctcatattgagctacttccacataatcaggtgttgttcaataagcaaagatacgaatttttcagcaaatcacaacatacgctgtctacttaacgttatttatacgggtgttgttcaataagcaaagatacgaatttttcagcaaatcacaacatgattacgattgcccccccaatactttttggtgttgttcaataagcaaagatacgaatttttcagcaaatcacaacagagtgaagccgatggcggactttctgaatggtgttgttcaataagcaaagatacgaatttttcagcaaatcacaacattgacacattggcattgtcggtcggggcaggtgttgttcaataagcaaagatacgaatttttcagcaaatcacaacatgaaacctctcgcgaggaatgtttaaccggtgttgttcaataagcaaagatacgaatttttcagcaaatcacaacagatctttgtagtttttttaagtcgttgcggtgttgttcaataagcaaagatacgaatttttcagcaaatcacaacactggctctgtggttcgtcacctgctacaaggtgttgttcaataagcaaagatacgaatttttcagcaaatcacaactgctgtacttcctttccgctctattgcttggtgttgttcaataagcaaagatacgaatttttcagcaaatcacaactagaaaccgccgcagtccgtgccattaagtggtgttgttcaataagcaaagatacgaatttttcagcaaatcacaacactggctctgtggttcgtcacctgctacaaggtgttgttcaataagcaaagatacgaatttttcagcaaatcacaacagcggacgaaccgcccatccagcatcacgtggtgttgttcaataagcaaagatacgaatttttcagcaaatcacaacactaccgcagaattatcgccaagttgggcaggtgttgttcaataagcaaagatacgaatttttcagcaaatcacaacatttaaatgttcacttgggaaaaggaaagaggtgttgttcaataagcaaagatacgaatttttcagcaaatcacaacagaaatgaagaactgaagaactgaatggaaggtgttgttcaataagcaaagatacgaatttttcagcaaatcacaaccagtgcactactgctgaatggcgatatatggtgttgttcaataagcaaagatacgaatttttcagcaaatcacaacgatagcctgtttagggtgatgatgcaacggggtgttgttcaataagcaaagatacgaatttttcagcaaatcacaactgatagcatcggcagttccgaaagcgtccgggtgttgttcaataagcaaagatacgaatttttcagcaaatcacaacttttagcctccgtatacccgtcggcgttcaggtgttgttcaataagcaaagatacgaatttttcagcaaatcacaacgtgaagaagtcggtattactattgatttaaggtgttgttcaataagcaaagatacgaatttttcagcaaatcacaacggccgtgccgctaagacttactccgctcagggtgttgttcaataagcaaagatacgaatttttcagcaaatcacaacagcgtatgtgttgtgtttctcttgcggattggtgttgttcaataagcaaagatacgaatttttcagcaaatcacaacatatattgatatgcttattgctttccatgaggtgttgttcaataagcaaagatacgaatttttcagcaaatcacaactctctgagattgatgctaaaactgctggtaggtgttgttcaataagcaaagatacgaatttttcagcaaatcacaacagagattaagacgttatatatcttatgataggtgttgttcaataagcaaagatacgaatttttcagcaaatcacaacatagctttccatgataagaatacattggatggtgttgttcaataagcaaagatacgaatttttcagcaaatcacaaccgaatttcttttcgggtcaaaatcctacttggtgttgttcaataagcaaagatacgaatttttcagcaaatcacaacaactagacagttctagttatataaaatgaggtgttgttcaataagcaaagatacgaatttttcagcaaatcacaacccatgcgcctggcgtaccagtccagcattcggtgttgttcaataagcaaagatacgaatttttcagcaaatcacaacaaggttcagttagatattcaacagagattcggtgttgttcaataagcaaagatacgaatttttcagcaaatcacaacggtttgtaaactcttccatttgacgcatgtggtgttgttcaataagcaaagatacgaatttttcagcaaatcacaacggctttcaatgatgaagataaaaaagtattggtgttgttcaataagcaaagatacgaatttttcagcaaatcacaacttgaaaatgcaaccaaagaagagatggaaaggtgttgttcaataagcaaagatacgaatttttcagcaaatcacaactacgcccagttgtcgctctgcccgaagcgtggtgttgttcaataagcaaagatacgaatttttcagcaaatcacaacacagcttggtgagcgacgcactcgcgccgcggtgttgttcaataagcaaagatacgaatttttcagcaaatcacaacaaagcatgggcggtcattttcaccaagaaaagatgttctgtcattctattgctgagatggcgtttgccttagtcttaggagaaggggagaacctataaatgttcatcaccccttcgccatagcttcccacggagaaaacagttaccgagaatacagttaggtggcaactcccaatataggcgaagccccgaacgcatatctattcaattgccaagattggtgtctccgtaaaaagccatggtgctattaagttgttgcctctagggtttatcgtatgacgaatttctttccgccacggatgtagatgccccttggcaggttgtcggtatcgggcatacggatgccttgcaggttgtagattgcctcatcttcttcaaccgtgatggtcgacacggaagatattgaggtggtttcgcttgaatagtcgtcgttgttggtcaggtacatgtcggctacgtctatgatgccttccgctccagcccatagggaaataatcgagacgtgggaaacgtccataggttgtcctttcaggtcatcgccgctggtataggtgatttcctggagcggtatggcgatagtcgtcgtattcggttcgatagggtggctgtggttaggtgtccaaatattgctctcgggatagatgttgatgctggcgttcacgttttgcggcttgtccagcttcagtactaggtatttgtaatcgctcatgtcgatgccgctgctatatacccaacccatttgtccgtattggccaggagagaatgaccgcgtagcttcatcgtagatgccttcaccgaagaggtcggtgtggatgaattcctcgctgaaagggaaataggtggctcgcagggtgaaagtggcggtgagtgtctggcctgtcgggtcggtgtaggtggctttcacgtctgtttctccctgggcgagtcctattaccctcccgttggagacgcgtgccacttcggggttgctcaactcgtagctggcgatggaggctatgttctcaatgtatccgtcaccgaagtccgccgttaggttcagctcttttcccgtccctatctggatttccatgtcggtctcttccagggtcagcctctcggcaggccgttcgggcatgcctggcaacatgcgatagacgtttttcaatacagacatggcgtaatgctttcccagttcccggtagcccgcggccgtgaagtgtaacccgtcgttcgctcccgcgcagccctcggaagagacaacataggcgttcatcatgtctgggaggcgggcgatgatgtcattgtggccgtagcagacaccgccttcttcctggcgcagcgtttctcccgcgaacaggggcacttcatcgccatccaggttgaggtcgtgtatcaggtcttcatatatctttcgcactttcattggccagtcgccttgcgtgttgttgctttcgccttgatgaagcaagatacccttgataacaccgtctttttgtgctttcttggccatggtcaccattttcgcgtagggatttccgtcatataaatccatcagcgagcgttgccagtcgtcggtcgtggcatagtagttcttgtagttctccttgtcaaaggcatcgatgccagagcctcccatggccacgacgattacacctatacgatggatatttggcaggtattctaccaaagtacgcccgaaatagtcgacgggagttaggcctgtattggcgcggcacaatggaggaatggccgtgtaccattcaccgggaacgcgattgatgtcacgatccccgtcgcacatgctcatcacctggaagcgatcgtctactcctgtcttgtcgatttcctctatggcggcgtttccttccatgttggattggccgaaacacaggtagatgtggaagttcggatcaggttgtgtggcgtctctttcaggtaatgggttgtctgcgaacgtagcggatgccatgagcgtggccgccagaagtatgtaaagatgttttttcatattagatgtttatggtattattatcttgttctttacaagacttcgcgaagttatgaaaataaatccgaaaaccttgaaagatggtgtaacgaatacttttcgccatgtcgcgaagttgggtgatttggatacgatgggggtgtacgctattgttccgctccgtgcgcaacttcctcgtcaacctttgctccgcgctcaccgcctacagttccttcgacaacaagccgggggcattgcccgtgcatgtcgaaagaactgctcaactggaacttttctaactatactttatcccgaactcaaatattatttcatgaagaggctatccccaaactggtcaggaagggtagactcttttgtgtatgcttggacttattgcttacttgccaaagtattataggatacttgcccatttatccaataatacctgctcatttattattggatacttgggcaagtaatctatggttcagtaacagcgtggctttagtcggcttatggtgatcaaacttccgattaaaggtttctaattcgaaatctaccttcattaccaattctttcagtgtcataagcaaatagttttgcgtaaagcaagtgtttttctgtgccaaaacaaagtactgggttgatatattttttgcttatgcctcaattcggcacacgccttctcttattttgtactcgtaaactctaaataggtgaaaacaatgagaaacattcagaatcacgacgtgaagatattcacggacaatatcgaaacgaccgccatcgaacagatagaacggttgctgactatccccgcattcggcggttgcaaaatccgcgtcatgcctgatgttcatgcaggggcaggttgtgtcattggctttacaggtgacttgggagacaaggttatccataatatcgtaggtgtggacatcggttgcggcattttggcacaaccgttcacctgcatgaaagagatagattaccacgccttgaatgagttcatcctacatcacatcccgtcagggcgcaattatcgggacaacaagtatgcaccactgccacaaaagtatatggatgcttaccgcgagagcaagaatctcatcaaacagatgcgttgctaccgggaattgaaagagacgaaacgcctcaatctctccatcggtggaagagaaagctgccaatctgctttatttcatcaccaagaaccacagttttaacgatggcaacaaacgcatagcggcagctttgttcctatactttctcaactgcaatggcgtcctgccttgacggaatgcctccagttctgcgtcattcagcggataacaggaagaatagcggataagtacaatcgcatggtcatatcggtctaaatcaagttgctggtattgcggacaaaagggagaataaggcaagcatgaggctggagagcgcggatggaatattttgatagattcagatgtttctttccaatattagaatgttcttgtagtaattttattatccttgtagcccgatatatagttgcttcttaaacaaaggcagaatattatggaagagcaagtttcacgacaatatatagcaatagacctaaaatcattctacgcttccgtggaatgtgtagagcgagggcttgatccgcttgacacgtttcttgtcgtggccgacccagcaaggacggaaaagaccatctgtcttgccgtgtcgcccgcactgaaaagttacggtatcggcggcaggccacggctgttcgaggtggtacaaagagtgcgtgaggttaatcggcaacggggacatagcggaaaatcgcactccaaaaaggaactggacgcgcataaggaacttgctgtggattatctggtagcacagccacgcatggctcactatatcaaatacagcacacgcgtttacgaggtatatctccgatatatcgccccggaggatattcacgtctattccatagacgaggtgtttatggacgtgacggcatatctcaaaaattataagatgaccgcccatgagttggctatgaaaatgatttgtgaggtcttgaaagaaacaggcatcaccgctactgccggcatcggaaccaacctttacctctgcaagatagcgatggatattgtagccaagaaaatgaagccggacaaggacggtgtgcgtatagccgagcttgacgagatgtcctaccgccgccagttatgggaacacactccgctcacggatttttggcgcgtggggcgtggaattgccgcacggctagcaatctacggcatcctgacaatgggcgatatcgcccgatgttccatcgagcacgaggatttgctgtataagctgttcggggtcaatgcggagctgctgatagaccatgcctggggatgggagccggtgacaatggacatgataaaggcataccgtccggagacaagctccatcagcagcggacaagtgctccagtcaccctacacgtcggccaaagcccggaatgtggtgctggaaatggcggacagtctttcactcgacctggtggacaagaaattagtgaccgaccagctcgtgctgaccgtcggttacgacaccgaatcgctgacggacaaagatatccgaaaaaagtatcagggcaaggtggcgaccgaccgttacggtagacaagtccctgctcatgcccatggaacagccaacatggagcgtccgacctcttccgaaagaatcctcatggagaaggctggcggactgtttgaccgcatcgtaaaccccgacctgctggtgcgccgcatcaccctgtcggctaaccatcttatgcacgagacggatatacagccgaacaataaagcaatccagctcgaccttttcaccgactatgagcagctggaaatggaacggaaagccgaagaagagatgttggccaaggaacgccgtcgccaggaagccgtgctgcagat

SEQ ID NO: 1069 - DNA, 24626 bp, synthetic construct
  source 1..24626: mol_type = other DNA
  misc_feature 1..24626: note = Synthetic
actaagagaatgcgctgtaataaacaacagcaacaatgtgaattgtgaattaattataaaattagaattatccgagacatgaattaattgagtcaagacttgaaatttaagcagtaacaaaagtaccaaacctattcccccataagcgccaatagcactatctttcatgataatcaatattttttctttggtccaaccacctccaaaaccatcgcacacatcagcaaaaccatcttcatgaaaagcccccgtcaataaaacggatgcaatcatagagaagattattgcaatttctggagtcagtaaataattaaaaatacagtacactccaaaagcaacgcaccctactatccaaccgattaatgggaaataacgagaagctttgtttaaataatccggattgtgatcaatagttgcaggacaagaaatcctagtgtaaaacatcaatgctgtaaaaaaaatatgtatttctttcttcatttttataattatttggctttagccaattgtatctctacttttaagttaaagttttttactacttactcctgcgctttcaaagctggccatatcattcaaaaaagcaaccgctgactcgataatggggaacgcaagggcgcaaccagtaccttctcccaatcgcaaatcgagctgaagaatcgcatcaactttaagataatccaacaattttttgtgcgcttgctctgctgactggtgactaaaaatcgtatttttcttgattaatgggtttttagtaaacgcaactaagtacgccaccgtacaaataaaaccgtctactaaaataagcatattatttctgtaggcttccagcattccggccgccatttgaagaatctcaaaccccccaaaataagccattttactttctagatcagcttctcccgtataattttcaatcgatttctttaaaatttctattttttgttgcaacttttcatcatttattcctgtaccctttcctacgcattcttcaattaaaaaacccgtaataacactcattaaaacagatgccgtagaagtatttccaattcccatttcaccaaaaccaatacaattactgcctgtttttgcaatggttttaacaattgtcgcccctttgctaaaacacaattgcatttcggttttactcatcgcagcggtgtgtaaaaaggattgtgttcctttgcctatttttgccgaaatcaaatccattttcataggaaaatcataattcacacctgcatcaacaatggaaaggttaatctcattctgtttacaaaacacgtttatcgccgcgccaccatcaagaaaattagtaaccatttgacgcgtaatatcttgtggataggcactcacgccatgatttgcaattccatgatcagcggcaaaaacaacgatatttggttgtactattttcggttctaaagtttgaaaaaccattgctatttgtttggcaagtacttctaaaactcctaacgaacctgtcggtttagttttttgatctattttatattgaacggcttttgcaaaagcagcactatttatttcatttggaacttcaaaaaatgtagtttcgactttactttgatgcaaaatagaaagttcctcaaccaatgggttttgttgtttttgcttccaattgagttgctgcaacatgggctgattatcataatctgtggctggtttacccacgcagaaataccctatcggctccatattatcgggtaagcctaataattctttgaactgataataattcaagatcgaaacccatcccatggaatagccttgctccgttaaggaaagccaaatgttttgcgccgcacaaaccgaactaaattttattgcttcattactcccaacggtaccgatggtaaaattatttaaaacggaacggtcatagcaaataactaatccgagtggtgcttcctctattgcttctaatttcagcgctttataggctgctttttgtggttcgttctctgtcagggcaattgctttttgatcataatccaaaaacaaatctttaatggctttcttcatttcgaccgacctgatgagatagtattttgtagcatcagtcaaacctacagaaggcgcccagtgaccagcttgcagtgctttttcaagaacagcatccggtatttgttcctccgtaaaatgacgcgtgtcccgacgggattttaaaatttcatctaaataagtcatcttaaaataattttttatgtttcttcccaaacgatgaaacaataattctcataggtcattcgagtaaattcaggcaattcaattgcatccaaaaacaacggacaattaagcaccaaagtatgaaactctccattttcgccgcagggatcaattcccttctccagtaattcttgcactaattcattggtcaatattttacctaaatagctttctcccattgttacattacatgaaacaatcatcgtttcaataccattttctagcatttcgtttaccaaaataaggcggtcttgttgccacaaaggcagtaaagcctttagcgaggcagtagcacaaactttgtcctcccagtctttatgcgcttgtaaatcaatatccccaaaaacagcaatctccaaatcatatttggcttttagcgattttaaaacagtaataaacttggcttcgtaatctccccaagttgctggaacagtttctataggtaaacccattttttgagcctgttgatttaaaatagatataggcaatccgtgagaacgggaaacttttccgttctcattcatcatatttagcagcacttttgggacaaatccttgctgtactgactgcattactgcataacaactgtcttttcccccactccaagaagttacaaaattcattttttttcttttattgttacaggtataccggaaatcattagtacaaccgtagtagcatttttagctatgtattgattcatccaaccttgaagctccgtgaattttcttccaatgagagtgtctgcatgaacgcccattcctatttcattggttacaataataattgtcgcgttttcttgtttggcgatagcgtcaaattcggctttcgcttgttttaaacacaagggaacgtcatttttagtatctacaaaaaagttagtcaaccacaaagtaacacaatcaacaactgcaactttcccagaaaaatcaatttcgctcaaatgtttttctttttctatggtcatccattgttcattacggtctttttgatggcgatcaattcttttttggaaatcattatcccattttctggctgtagccacatacattggtttttccgataattcttttgctaaattctcggcataactacttttgccggagcgttctcctcctgtgattaaaactatcattgtaattataattgttaattatttaaaataccaatcttcctaccattcatagaaacacaatccatttttagatgaaattacgatttaaaataaaactcccattttctaaataatagtggattccttctatcagactagttgttgtttttttcaataatctttaactttattatttgtttcatttttagacgatagcgttgcaactcatctttcaattgcagtttagcaagcagtcacacatacatgggaatagataaaaattcacaacttcaagaagaataaaaattactagagaattattgctcttagctttacttccgccagcggtgcctcatcaaaaaaaagaagttttgcaggtggatcatttttttctcgaatagtaataaaattttctcatgaattactttactttttcactagcgtgaaaagaaaggtatttgttttctaacttctttggaacttcaaataaatcaggatgaaatagtgccgcaagcaattcaattccgtctacaacagttgtactaggctgcgtaaacaaatcggcatcagccaaaaaaactgcattattttggactgcctgtagtgtatcccaaccttctaattttgtcaatgcctccaattcctgactggaacgattcacatcaaagccgcaaggagccaccaccaatacttcaggattatataacaatattttttcccaagccgtaactatagaatatcccgaaggattcgaaagcatgtctactcctcccgcttgtgcaatttggtaaggtatccaatgtccacaattgtatattgggtcgagccattccataaccatcacccgctttagtggagcgttatttttgcgaagcgtatcaaggatgaaatcggttctttttttgagttttgctagtaattcatacccgcgttcttcttgatcgaaagctttggcaatcgtaattgcattctgataaatgtcctctaaattccgcgggataagtggtattagttcgggctctttggttaatttatataccgaacgagctacatgactcgtatctatttggcaaacgtcacacacgtcttgcgtaaaaataatatcgggagctaaagatgctaataaagagtcatctatgtaatataaacttttgccttgtgccttagattgcgatacaatctggtcaatttcttggctcgtgtgattggtaccttcaaggtaagaacgcactactttcggtttgtcagaatggcattcaaaagtaacaccaactaattgattttctaatcccatttcgtaaatcatagaagtagcagcgggcaaaaaagaacaaattttaatcatcgtatcagagtttaaatccttgttttggtttaaaatagtttttaaataaattcatttatgcacgacacaaaagcgacacacaaagcaagcgaaaacaatatttattaaagtagcgttccgatctatttttatttcaaacaaaaaaagccagatatccaaatacaaatataatcgtatgactataactattagcatagatatctgtttatgttttgcgttgtaccgcgattttcaaaatactttaaaaagtttgtccctgattataaaaaaattataatttacctttgtcttcaaattcgcaaaaaattatgaaccaaaattatattaaattttcatttttcgtattatttttaatgctgattgggtgcaaaaaaaacgaacaaaataccaataaaaccaacactattgttggaaatacgataagctattccaaaaatttagctatttataaatacgaaggctattcagtagtaaccgtttcaaatccttggccgcaagccaataaaaactatacatacatattaaaagaaaaaaacagcagcattcctgacagtctacaaaaatacactacaatttcagttcctttgcaatctgttgtagttacatcaacaaccattattccttttttagaaactttgagagttgaaaaattattagtcggttttcctaataccgattatgtttcttccgaaaaaaccaggaaattaattgacgatggtgctgttaaaaacattggaaaaaacgaaaaattaaacatagaacaactcattgaattggatcctaatttaattgtagcttatggagttgacaacaacaatccaatgttagataacttacaaaaaagcggcttaaaagttctaattcaagctgattggatggagcaaacgccactgggcaaggccgaatggataaagctgtacggcgctttatttggaaaagaaaaagaggccaaaacgttttttgataaaatccttaaaaattacaacgacgccatagatttggttgccaacaaaaaaccaacagctaccgttttatacggttccatgtatcaggatcaatggtatgtggcaaaaggaaacagctgggtagcccaatttatgaaagatgccagatctaattatttgtgggcgaatgaggcaggaactggaagtcttagcttgtcctttgaaaaaatattagacaaggcaaaaacagcaagatattggattgcaacgggttctttcaaaaatagtgctgaattcgaaaacagtaatccgcattacagtcagtttgatgctttaaaatctaacaatgtctatacttttgaaagtaaattaggccgcactggaggaacaatttattatgaattagctacaagccggccagatctagtcttaaaagattatattaaaatcttccatcccgaagtacttcccaattatacttttacttttgcacaaaaactaaattaaatacttacatgcacagtagtataggggctttgcaaagtagagggcggtgaaactgaaagtaaatatattttaaaattaaatattaaatcatcttgctgaaacaaatgacaattgaataatcaaaaacaaaatacgattctatttttcttgctcactttgggtcttgtgcttttgtttttcataaacatcagttttggttccatcaaaatcccttttaaagatatttatactagtttgacgggtggacaagcgagtaaatccagctgggaatatatcatcgttaattatagactacccaaagcaattacggcaattctcgtgggaatgggattgtcaataagcggtttgctaatgcaaactctgtttcgaaatccactggcaggaccgtatgttttaggactgagttccggctctagtttaggcgttgcttttgtaatactaggagcgagtttacttcctccttttttaagtactattttattgtcctcttatggcgtggttttagcctccactattggaagttctattgtattgctcgcagttttagcagtatcacatcggttacgcgatacaatggctatccttattgtaggcttaatgtttggtagttttaccagtgcaatagtgggcgttcttgcctattttagttcggctgaacaattgcaaaaattcactttttggtcgatgggaaacttaggcagcttgtcatggtcttcgataatagtattaacggtttgtgtatcgattggcttgctattaagtgtctttagcatcaaaccgctcaatgctttattgctgggtgaaaattatgctcgcagtttaggtttaaatttcaaaaaaacacgattgattattatttttgcaaccagtattttggcgggaagtatcactgcttttgcaggtccaatcgcatttataggattagcggttcctcacatagcaaaattagtatttcaaaccagcaaccactcggttttattttggagcaccttacttctaggagcatcaattatgcttttttgtgacgtaatttcagaaataccggaattagagataactctaccaatcaatgcagtaacatcaataattggtgctccagttgtcatttggttattggttagaaaacgaaaaatgattgcataatggaaaataaaatcatcttaaaagcttctcaaattaacattggttattctcataaaaaagagaaaatcgtagtggcttctgatatctctatttctttagaaaaaggaaaactgattgctttaattggtgccaatggcgttggaaaatcaacccttttaaaaacgataacaggaattctgaaacctttgtctggcaatgttttattaaatgaaaagaagattactgcttatgatcctttggagttagctcaaaacctaagtatcgttttaacagagaaattaccacccagcaacttgaccgtttttgaattaatcgccttaggaagacaaccttacaccaattggattgggaaattaacagctactgatttaagtaaagtaaacgaagcaatggagctcacacaaataagtcatttagctgataaaaagcattatgaaattagtgatggtcaattacaaaaagtattgattgcaagagcgttggctcaagatacaccgttaattattttagatgaacccactactcatctcgatttattgcataaagtttctctttttaaattactaaaaaagctaacgcaagaaacagaaaaatgcattcttttctctactcatgatattgatatggcaatacaattgagcgacgaaatgatcataatgactcctgaaattgtaattcaagatgaaccttgtaattttatttccaaaggaatttttgcaacattattcaacgatgaacatattatttttgaccaagaaaaagggaagtttattattgtttaagttttacttttttagcgcgatttgtctttttgcttcaccaacaacaaatgcaacagaattggcaacattaaaacttcgaattaatggtgacatgggaattgtcaaatgattttcgaattgggataaaacttcggcactcaatcctacactttctttaccaaaaaccaaccaatctccatcctgaaaatcaatttcaaggtatgatttattagcttgggaactcgttaagaaaactcgggataaatccggcacagttgctttccattccgctacattttcatattcagttacgtcaagatgtggccaataatccaatccggaacgttttaagtttttatcactgataacaaatccaaaagggtgaatcaagtgcaagcggctttcagtacctacgcacaaacgccctatatttccggtgttgtttggtatttcgggttctactaaaacgatgtttaacatttcttattgattaatcggttatttgtttattcggttgtttgaaaatcttccacttcaactacttctcctgcctgcaaatcattaagatgaatattccctattcgcacgcgcactaaccgcaaagtgggaaaaccaacagcagcagtcatttttcgcacctgacgaaactttccttcattgacagtaatcgaagcccacgaagtaggaccatgacgctcatctcttattttttttcctctagcaccaaaagctggaatttgatctatcaaagaagctttgcagggtttggtcatatattttgtaccattaaaacctatttcaactcctttttggatctgctcaatagcctcctgattgataattccatcgacttgaacataatattctttatctacttttttacttctaatgttttcactcatcattccgtctgtggtcagcaacaacaatccttctgaatcttcatctagacggcctattgccatagtaccttttgggaaatcgtataattcgccaagtagtttcttctttcttttcagttcgtaaataaactgacttaaatagccatacggtttgtgaatgatgaagtgcgaatgagccattttatactatttttaaaacttgcaaagatagatttgtttaaagaatttaacaacagaagcgtatcacaattcaactaaaaatccaaaatccgcgttaaatgatttcacgaaaccattaaaaaatcgtaatcttataagtaataacatttataaaaattaaataaatcaccatggaaaataacgatctaggttcaaaaaagactaataataagcaaagtactaatgagggtttcagcggtaaaaatattcccgaagattataattctgctgatttaaatttaaaagaagaagttgaaaccgatgccaaaggaaataaaaaaattgttcaacgtgcccgtaatgttgatggaactgaagcctcaattcccgatgaagaagagagaacatgggatgaaaatgaaagtttgagtagaggtgtaaccaccgaaaaagaagcaatgaaaacagtcgaaaatgaagacctaaattcggatattaccgcccatcgatatccaaattctcatcctgacaatcacgaagatagaggcaatataaagcttgacgaatagtattttagattaaatttttaaagaaaccagcaagaattaaatttcttgctggtttttttggtttaaaaattatttttaagccaaaagaaaattatgttaaaaatgaaaaaagcgacccttttgaggccgctttgaatgttttcacaacggaataatccttattgtgaattgcttcaaaattgttatgcaatagtacaacaaaaattttaatattgatttacggtttcccgtagagatggtaaatttcttttgattatatttcgaaactaaaattttaatagtagaaatctatatgaaaacatctaaattatgaaacgaatattaggattagatttggggacaaatagtattggatgggcattaacaaataatgactttgacaataaatttggaaatattgaaggtattggaagtcgaataattcctatgagtcaagacgttcttggtaaatttgatagtggagtttccatctctcaaactgctgaaagaacaaaatatcgaggcacaaggagattagtacagcgttttttattaagaagagaacgtctccacagagttttaaatattcttgattttctacctaaacattatgcaagcgccgttgattttgataaaaagtttggacaatttaaaccagagaaagaagagaaattttctttttttaaagatgaaagtggtaaaaaccaatttttatttttggaaagccatcaagaaatgcttgctgaatttaaattaacaaatcctgatttaaaacaagttccttatgactggactatttattatttgagaaaaaaagcattaactcaaaaaatatcaagagaagaattggcttggataatattaaattttaatcaaaaaagaggttattatcaattgcgtggagaagaaaaagaagagaataaaaacaaactagaggaatttcatacgcttacagttgttaatgttattgaaagagaaaaaggaaaatcaggtatctggtataatgtaattcttgaaaacggttgggtttataaacgtgaaagcaaaataggattatttgaatgggttggtaagcaaaagaattttatcgtaactaccgaattaaatgatgatggtacagtaaaattaaacaaggacaacgaagaaaaaagaagttttagagctccaaaagaagacgattggggattggtaaaaataagaagtgaacaaactattaatcaaagcggaaaatcagttggttcttatatctatgataatttacttaaaaacccgaatcaaaaaataaaaggtgaactagtacgaactattgagagacattattataaaagcgaattaaaacagatacttgaaactcaaattgaatttcattcagctacgttaaaagacagaaatctttataaaaaatgtattgatgaattgtacaaacacaatgattctcataaaaacagcataaaagaaagaggttttgactatatatttttagatgatatcatcttttatcagcgtccactcaaaagtaaaacttcgttgattaatgattgtagtctggaatttagacctattaaagataaaagaggtaatttagttaaagatgttaatggatatcaaattctaaaacctttaaaatgtattgctaaatcaaatcctatttttcaagaatttagactgttgcaatttgtaaagaatctaaaaatatataaaaaagatattgcaaatgatgttgatgtaactaatgattatttaaaaacagaagaagatgtagtcgaattatataattggctaaatgataaagctgaaataagtcaaaaacaatttttagcgtaccaaaaatttaaattaaaagaagataaattcaggtggaattttgtagaggataagatatatccttgtaatgaaaccagaaatcaatttttaaatgcaattgcaaaaatcgatatggacaaatcattttttgatgcaaaaaacactcaggatttgtggcatatcctatattctgtaactgataaaattgaaatttctaaagcaattacaacttttgccaaacgatatagtttacccgatggattcataataaatttttcaaaattaaagccatacaaaaaagattatggcgctaattctgaaaaagcaataaaaaaattactgccgttaatgcgtttcggaaatcattggaatgaaaaaaatatcgacaccaaaacattggcaagaattgacaaaatagaaacaggagaatttgacgaaaatattaaaactcgagttcgagaaaaagcattgcatttaaatgtcctttcagattttaaaggactgcctttgtggctggcttcctatatcgtttatgatagacatagcgaaactagtgatatttcaaaatggaaaactcccgcagatattgaacactttttgaaacacgacttcaaacaacattcacttcgcaaccctattgtagaacaagttattacagaaactttacgagttgtaaaagatatttggcaatattatggagagggaaaagaaaacttctttaatgaaattcatattgaattgggtcgtgagatgaaaaacaatgcggccgatagaaaaaaaataactgacaatattagtcacaacgaaaacacaaacttgcgaattaaagccattttaacagaattgaaaaatgatggcattagtgacattcgtccttactcaccgagtcaacaagagatattaaaaatttatgaagaaggtatttatagcagtgaaaacagtaaagaaaaaatagaagaagttgataaaatcagaaaaaatgcaaagccaacaacttctgaaatcatcaaatacaaactttggctggaacaaggatacatttctccttatacaggaaagctgataccattaagtgatctttttacaacaaaatatcaaatcgaacatattattccgcaatcaagattatttgatgattcattgtcaaacaaagtcatttgtgaatctgaagtgaatgatttaaaaggaaataagactgcattagaattcattctaaaaaatgaggatagaattgtgactttaactggtggaaaaacggttaaaatatttactagacaagcctataatcaacatataactagctattacagtaaaaacaaaagcaagcaaaaaagacttttaagtgaagatattccagaaaaatttatcgaaagacaattaaatgatactaaatacatcagcaaaattgtaaaaaatcttttgagcaaaatagttcgagaagacgacgaacaagaagtaacatcaaaacatatcatttcattgaatgggtcaataacttcaaaaatgaaacaagattggggactgaatgatgtttggaataacatagttacccctcgctttaaacgattaaataccattacaaattccagtgactttggaaaattagaattcaaaaaggatgaatttggaaacacaggcaagcaagtatttcaaactactgttccagatgctatagcaaaagggttttctaaaaaaagaattgatcatcgacatcatgctcttgatgctttggtaattgcgtgtgtaagcagagcgcacattaactatttaaataatctaaatgcaagagatgaaaatgacaaaacaattaaacacgaattaaggaataaactttgtttaaaaactaaacccgatgcaaatggaaattacaactgggaatttcacaaaccttgggaaaatttcaccaagcacaccgaagacgaattaaatcaaaccatcattagtttcaaaaaaaatactagggttatcaataaaacggtaaacaaatacgtgagctataaagatgaaaatggaaatttaaatttaaatttaggtaagaatggattggtagaaaagaagattataccacaaaaaaaaggtgataactgggcgattagaaaaccaatgcacgctgaaactgtaagtggaaaagtgtttttaaagcgaattaaacaaagtcatattaccattgcaaatgcaatcgagcaaattgaattgattgttgataaagaagctaaaaaacaactggcggtaagaataaagcaatatccaaacaatgctgaaggtttaaaaaaacacctaaaagcttttcctgtaatgattgatggaaaagctattgataaagttcagatttatgaaaatttagaggcaactgcaacaagaaaaacgctagatattacttttgatgaaaaaagaattgaaaaaataaccgatactggaattcaaaaaattctattgaatcatcttaaacaagaaatctaccaaaatactattgatgaaaatggcaaaaaaattccagctcacgaagttgctttttctgaaaatggtttagatgacttaaataaaaacatcactgcattaaatgacggcaaaaaacatcagcctattataaaggttcgcgtttttgaggaaggtggcaaatttagcttaggacaaactggaaacaaagctgataaatatgtagaagctgcaaaaggaacaaacttgttttttgcaatttatcaagatgagaaagggaaacgaaactataaaacaatccctttcaatgaagttattgaaagacaaaaacaaggattaagttcagctctagaaaaacacgaaaacggaaatcgtcttttatttacgttgtctccaaatgatttagtttatgttccaactgaagatgaaaaggaaaatttgactctcttagatttcaataaattatctaaagaacaagcagaacgcatttataaatttgtaagttgtactagtggtgaaggacattttgtttcccataattactcaaaagagataatttctaatgaaaatggctccaataataaaaatgaacgaatgttagaatttaacccctcaaatactatttatgatgaaaaggaaaaacctgtgatgatcaaatctgtttgttggaaattagaaatcgacagacttggaaaaattaaaaaaattatcagatgataaataatgatttcaaaaatcaataaaattgggttttaacccaatcaataaaaataaattaaaataggcttcagccaaaataattcggctaaagcctaatttttataatatcaaatatccctccagctaaagctggaggcaattcaaaagctgatggcaattcaaaacatgaaattaaatcaaaattctaaatttaatatattccaaaatcaatacaattaagctaaagcaaataacataataatcaaaacctcatccctctaaagctggaggcaattcaaaatcaggaggcaatagaaaacctaaagatatttttaaaaaagacagcattagatttttgcacattaaaataacaataaacattccaaaatcaataggtttgggctttagcccattcaatgaaatttaaagttaacacaaatggctttagccaaaacattttatttaaaattaaaatctatgccatatatcagcacctatatccattttgtttggagcacaaaaaacagaattccttttttggacaacaaagaattaagacaaaaagtgtggtatcatatcaaggaaaatggcaaagagaaaggaatctttgttgattttgttaatggatatactgaccattgtcattgtttagtttccttaggagccaatcagaccatacaaaaagtgatgcaactcatcaaaggagaatcttcgttttggattaatcaaaataaattgtgtctaaataaatttgaatggcaagatgaatattttgcagtttcagtttcagaatcgatgctggataaagtgagaaattatattaaaaatcaagaagaacatcatagcaaacaatcttttcaagaagaatataatgaatttatcgctaaatataaattcaataaggaatagttttttggctaaagccaatttcattattaacatttttatccctccagcaatcccaataattatcagaagttccaacatcaataggaatgggctttagcccattcaaaactataaaataattcaaattggctttagccaaaatattatataaaacatttttaaaatttataaaatgataaaacgaacccttttctttggcaaccccgcttatttgagtaccaaaaatgagcagatcgtcatttcttacccagacaaggaacaagaaaccaaaaccgtggccattgaagatattggggttatagttttagaaaatcagcaaatcacaattaccaatggtttgctggaaaaactaatcaacaataatgttgccttaatcaattgtgaccaataccatttacctattggtttgttgatgcctttgagcggccatacagaacagtcggaacgatttaaatatcaaatcaatgcttctgttccgctgaaaaagaatttgtggcagcaaaccattagtgccaaaattatgaaccaagccggattgctcaaagaaaaaggaattgcgtgccgtaaaatggaactttgggcaaaagaagttacctcaggtgacgcgctcaaccacgaatcgagagcagcagttttttactggcaaaacctcatcccgctagaaaattttacacgagggcaaaaaggaatgccgccgaataatttattgaattatggttatgccatcctccgagcgattacagcaagagcgattgttagttctggaatgttgcccactttaggcatttttcatcggaataaatacaatgcctattgtttggctgatgatattatggagccgtatcgcccttatgtggacttaattgtttgtcatattatggaaaccgaggattcttatgatgaattgactattgaaattaaaaaacaattgttaggtattgcaacaatcgatgtgttcatagatggaaaaaacagtccattgatggtagcgatgagtagaactacacattccttacacgaatgttttgaaggaaccgcaaggaaaattttataccctatttatgtatgacgaacattacacccgtttaaatcaatatagaagtttgtggatattagtattttttgatttaccaactgaaacacgcaaagagcgtaaaattgctagttcatttcgcaagaaattattagacgatggcttctctatgtttcaattttcaatctatatgcgtttttgtgccagtagagaaaatgctgaagtccataccaaaagaataaaaaagaatctccccgaacacggaaaaattggtatcatgcaaataactgataaacaatttgggatgatggaacttttttatggtaaaaaacaagtcgaaactgacaaaccatcccaacaattagagttgttttaaagcatcaggattagaaaaatgactaactccctgtactgcaagaaagaagcagcactccttttcgatttcaaaataaactcataactctcaacatatcaaacacttgaatcgcggtatgttgggaattataagctaaaatacaattttgaaagcaattcacaactgtaaatcgctacttaaattatttgaaattgttgggaattataagctaaaatacaattttgaaagcaattcacaacaagcgggaagcgtgaaagacaatttagatcgttgggaattataagctaaaatacaattttgaaagcaattcacaactggattttgttcgtttttgttataaaatccgttgggaattataagctaaaatacaattttgaaagcaattcacaaccaccaaaaaccgttactatttgactcgcccgttgggaattataagctaaaatacaattttgaaagcaattcacaactcagtcgcatttgtaaattcttctttgacgttgggaattataagctaaaatacaattttgaaagcaattcacaactatgaggaacctaatgtaattgttgagaagttgggaattataagctaaaatacaattttgaaagcaattcacaacaagatcaacttcgtcctgttccttctcttgttgggaattataagctaaaatacaattttgaaagcaattcacaacagcatcgacaaatatggatcattttctattgttgggaattataagctaaaatacaattttgaaagcaattcacaacatagatcagaaactcgaatatttaaaatcagttgggaattataagctaaaatacaattttgaaagcaattcacaacccaagactattggtgtttgttctgcagttgttgggaattataagctaaaatacaattttgaaagcaattcacaacgcgaaaccactaccgtgactaagacctttggttgggaattataagctaaaatacaattttgaaagcaattcacaacttgcccaaataggtgtttcatttttaaatgttgggaattataagctaaaatacaattttgaaagcaattcacaacttgtcctcgccaatatatcaagtgcttgaagttgggaattataagctaaaatacaattttgaaagcaattcacaacatgctgtaacagcttcatccgatctaccttgttgggaattataagctaaaatacaattttgaaagcaattcacaactagatctaaaaccagccatttgtaaagccagttgggaattataagctaaaatacaattttgaaagcaattcacaacacagtatggcatcctcttttttagattcagttgggaattataagctaaaatacaattttgaaagcaattcacaactaattaaactccacacatcaagtcctgtgggttgggaattataagctaaaatacaattttgaaagcaattcacaactaaatataatcacgcaaatcaggcgattggttgggaattataagctaaaatacaattttgaaagcaattcacaacacaagattggtaaattaaatatatccgatggttgggaattataagctaaaatacaattttgaaagcaattcacaactcaagctatcaatatcgctaatacctaagtgttgggaattataagctaaaatacaattttgaaagcaattcacaacgaattgatgttgattcgcaaagaaaaaaagttgggaattataagctaaaatacaattttgaaagcaattcacaactactgaggaacaatatcctcaaacattagcgttgggaattataagctaaaatacaattttgaaagcaattcacaacagcaaattagcatcatgcaatactaatttagttgggaattataagctaaaatacaattttgaaagcaattcacaacctagtttctcaacttgaaagtagggaaggggttgggaattataagctaaaatacaattttgaaagcaattcacaactaaatggagaaacgaaagtataaaaggctagttgggaattataagctaaaatacaattttgaaagcaattcacaacgtgtttgatgcatcgcctcgtcaatatcgtgttgggaattataagctaaaatacaattttgaaagcaattcacaacccattgtccataattgcgcaatatcctccggttgggaattataagctaaaatacaattttgaaagcaattcacaacgcaaagctcatacatacgttggctccatttgttgggaattataagctaaaatacaattttgaaagcaattcacaactaaatcaactcgtcgaaattacacatcaatgttgggaattataagctaaaatacaattttgaaagcaattcacaacagccgctatcgttccgttctcaatttgtttgttgggaattataagctaaaatacaattttgaaagcaattcacaactggctgtcttactacccgccaaatggctggcgttgggaattataagctaaaatacaattttgaaagcaattcacaacactacataaagataggtaaaacttatcatgttgggaattataagctaaaatacaattttgaaagcaattcacaacctagctcctctttacttttcatgtaatatggttgggaattataagctaaaatacaattttgaaagcaattcacaactagccaatactgcttgtaattgtctcccatgttgggaattataagctaaaatacaattttgaaagcaattcacaacagtgttctgttcgctgaacttggtaaatctgttgggaattataagctaaaatacaattttgaaagcaattcacaacagcagttagcagataatttaaaaatatctagttgggaattataagctaaaatacaattttgaaagcaattcacaacttgtcgatgaacttattctgatattggtaagttgggaattataagctaaaatacaattttgaaagcaattcacaactaatatctaactgttgcttttctaattccagttgggaattataagctaaaatacaattttgaaagcaattcacaactgattattgccatgtgtgcagcagtcaaacgttgggaattataagctaaaatacaattttgaaagcaattcacaactaataataaagattttcttaaatctggatcgttgggaattataagctaaaatacaattttgaaagcaattcacaactaaaaaggccgttaataaaattataattttgttgggaattataagctaaaatacaattttgaaagcaattcacaactattatttcaaagtataagcgtcaagatctgttgggaattataagctaaaatacaattttgaaagcaattcacaactaacaacagaagctatttcgaagaaaataagttgggaattataagctaaaatacaattttgaaagcaattcacaacaaggaaggattaaggcttcttgtttgattcgttgggaattataagctaaaatacaattttgaaagcaattcacaactcgattagcgtcagctcataacgggaagtagttgggaattataagctaaaatacaattttgaaagcaattcacaactagcatcaacaccacccacgtaggagatatgttgggaattataagctaaaatacaattttgaaagcaattcacaacttactgaaacatacatcccgtctgaaagtgttgggaattataagctaaaatacaattttgaaagcaattcacaacagtactgctataattaacaaaacagttacagttgggaattataagctaaaatacaattttgaaagcaattcacaactagccactaaagaagttaaagcttcgttaggttgggaattataagctaaaatacaattttgaaagcaattcacaactaaagttttggcatcgctaagtggatatggttgggaattataagctaaaatacaattttgaaagcaattcacaactaatggaagatgtaaaggctaacgatcttagttgggaattataagctaaaatacaattttgaaagcaattcacaacagatctgttgtataaggcaaaacagaaatgttgggaattataagctaaaatacaattttgaaagcaattcacaactatgttttgtaactacttgactttcaacgtgttgggaattataagctaaaatacaattttgaaagcaattcacaacacaaaacaaatgaagaactcttaaaaatgtgttgggaattataagctaaaatacaattttgaaagcaattcacaacatataagacggaataaattttataagttcagttgggaattataagctaaaatacaattttgaaagcaattcacaacttaaagcggggtttgaaaaaatacaatttgttgggaattataagctaaaatacaattttgaaagcaattcacaacaagtaaggagctttgaaagtgtaatctgttgttgggaattataagctaaaatacaattttgaaagcaattcacaaccggttctaccaaactgacggctaacgtttggttgggaattataagctaaaatacaattttgaaagcaattcacaacagaaacgatgtaaagccttttttaactgcgttgggaattataagctaaaatacaattttgaaagcaattcacaacccgttttgacatattgctttaaaataaggggttgggaattataagctaaaatacaattttgaaagcaattcacaacggcttagtttcaaataatgataaatcaattgttgggaattataagctaaaatacaattttgaaagcaattcacaacagatattaagcaaaactatcgtgcctttgagttgggaattataagctaaaatacaattttgaaagcaattcacaacatattgcgtagtcttttgtcggaaccgcttgttgggaattataagctaaaatacaattttgaaagcaattcacaaccgtgctcaactaaattaaatttttctctaagttgggaattataagctaaaatacaattttgaaagcaattcacaactaaaaatagaaggagtttatagtaataatttgttgggaattataagctaaaatacaattttgaaagcaattcacaacggattaactattagtactgcaaaaatagagttgggaattataagctaaaatacaattttgaaagcaattcacaaccatcttttacttttatataaaatatgataagttgggaattataagctaaaatacaattttgaaagcaattcacaaccatcgtcaatgccgtgttccaggtggccacgttgggaattataagctaaaatacaattttgaaagcaattcacaacaggtcgattataagcgtgctttgaccggtagttgggaattataagctaaaatacaattttgaaagcaattcacaactacctgtaaacaattaaaatctttaatgtgttgggaattataagctaaaatacaattttgaaagcaattcacaacacattcgtttaatacttttattccattagcgttgggaattataagctaaaatacaattttgaaagcaattcacaacaaggtaaataattataaaaacattaaacaagttgggaattataagctaaaatacaattttgaaagcaattcacaactggtacgaagtgaagcattggaacaaatgcgttgggaattataagctaaaatacaattttgaaagcaattcacaaccaaaactacctgctgatcattgggctaaaagtcgggaattataagctaaaatacaattttgaaagcaattcacaactcaaaaatattatgtctctactacgtagacgttataactttgagttgtgagttggaggactaagagttaaaaaaacaatttcctttcctacccaaatcccatagccctgagtgaaatggaattccttatgcaatggccttgcatttttttcttgacgataaagagcgactcaaagaagctcctttattgtcttagaaaaaatcaaggatataagtaagaatgaaatgtaaggcaggaaaaagctccaataaatattggtacttgagcttcctaatacagttgaaagaagaacctatttttaaatcttggcttttttttgaaaagctaaaaaaacaaacaaaagaccgtctcctatatttcgttgtaagtctaaaattattaattttataatattctcttaacgtaataagtattaatttcgtacccaaattaattaaaaattatatgaaacacaattaccatttacgccaaatgctggcctttttgacttttttttattgcttttcggcagctatttttgcacaaggaacagctcccgtgccacaggaattgccttattcgcaagatttctcctctttgctgacaacagctactgcctaccctgcaggttttcaaggctggactgcaagtgtagcaccaggagctactttcaatacatcaggaacactagtagctgatagagccttatttccaaacagtaatgctagtataacaagcggaaatatccataactatgatcgcaaaattgggtttttaaatactggttcattagatttaaccataggatttgcatttaaaacaactggcaaatctggaattacagttgaatatgatgcgatggttattcgtaatccacataatggcacgacaaatacccgtattaacgaattagtactgcagtatcgcattagcacgaccgatgcttttgttactttattgccaactgtatatgcgaatggtacaacggctcaaacatcgggcacaaccgaacaaagtagtcaaaaaatcaaaatagtgttaccaacggaatgcgataatcaggatgtcgtacaaattcgttggatttcgagacaagtttccggtggtggttctcgtccgtcttttgcagttgataatattagcattatcaacgatgtaactcctccagtaaatgctattggttatccacaaatcaccaatattctttctaatggatttgattttttatctcaattagatgaaattggaaaaacatatttcgtcatattgcctgcaggaagtcctgaacccactgtggctcagataaaagcgggaacagatattacaaataccgcagctatcaaagctggtctacttgcagtagatgacgctacacttgtctatacgcaaaataatacaggcttgatattaggaacaacttatgtagtttattctatttctgaagatgcttttggtaacattcaaaccgtagtaaagaaactggacgtaacaacctccagcgctgctgttccctccttatctactactaaaacttcgttagagtttagttttgtcgaacaaaatttcagttcatctgtactaagttatgaactgcaaggggctaacttaaatggagctgtgacactcacttcaactggaaattttacaatttctaaggatcaaaataatggttttcaaccaatattaaatttcacagctgctgattttagtagtggagcttcaccaactgtttatgtaaaattttcacctaatgcaactggcattttctcaggccaaattacacatgaatcaactggcgcaacaaataaaatagttgcactatcaggaacaggaataaatccttatacacaggattttaataatcccaatgtgctaacaaatagtggatggtttgaatatagcattgctggcaatacgattaaatgggcaagtacaaccacccgtttta

SEQ ID NO: 1070 - DNA, 24626 bp, synthetic construct
  source 1..24626: mol_type = other DNA
  misc_feature 1..24626: note = Synthetic
catcagcagtaaatacagtgattggttcaagagtaggggtcgtcagggtattgataagatagtaagttccaaatagaacggcaatcatggcggctattcccatacttactttccagaagttggaacgcattcttgtcgtgtattgttttttcttgaatcgttctagctccatctctatattgggtagttccattccgcttttttgttgtaggaagaggctactatccatgatgtcgcgacaagcctgcagggtttcttcatctttaagcatttcctgcagttgttcgacgtttatttctgaagagctctccataatgtcgagggccttctctacagatttatctgtattatctatattgtcaatatctttattcatcactgtttgactgtatcatacttatttatattacgtttaatcataaaataaagacacctgctttatgatttttttgcacattcttcacgtatcacctgtaatgctttcacaatatgcttcctgactgcactgacactaatatttaactcctctgccacttcctgatatttcttacgttgaatatagcattcttcaagaatatgtttggtatgtggagtcagtttttccatagccttgctgatatgcatcattctttcgtcctgctcctgatactccgtctcaacataacttttggtcagttcggaatagatttgtacgtactgttcatgtgtgctctgatgtcgcagaaagtcaatacttttgttgcggacatagacatatagataagatttagctgtggctttatctattttagcataattggcccaaataaattcgaaggcgtcgctgacaatatccttactagcctccatattattaatcaaatgaaatgcgtaataataaagttgaggatagtactccttaaaaagaaaatcaaaatcggccttatcttccacgtgctttaaaagtgttgaatagtaaataaatcgcgttgcaaataaacaaataataattgagaaaagcaaaatggcttttattttatatttatcgtatctttgtggcatcatattttttgaatgaatattcatgtagaacttgggaagtaataatggagagtgttttaattacaggtgcaagtggttttataggaagtttcatcgtggaggaagcgttgaaacgaaagtttggtgtgtgggccggaattcgtcccacgagtagcaagaggtatttaaagaaccggaaaattcactttctggaattggattttgcacatcctaatgagcttcgtgcccaactctccgggcataaaggtacttacagcaaatttgattatatcattcattgcgccggtgtgacaaagtgttctgataaaaagacctttgattatgtgaattatcttcagactaaatattttatcgacacgctgaaggaattgaatatggttccgaagcagtttatatatattagtacgttgagcgtattcggacctgtacgcgagaaggattatactccgataagcggagaggatgctccgatgcctaatacggcttatggattaagtaaattgaaagcggaattatatattcagagcattcccggttttccttatgtcatttatcgtcctacgggagtttatggtccccgtgagtcagactatttcctgatggccaagtccattcagaagcatgttgacttttcggtcggttttcgacgtcaggacttgacttttgtttatgtgaaggacattgtgcaggcgatttttctgggaatggagaaaaaagtggttcaaaaggcgtatttcctgacagatgggaaaatctataaaagtcgtgccttttcggatctgatacaaaaagaattgggtaatccgtttgttcttcacttgaaatgtccattaattgtgctaaaagttatatctttgttcgctgaattcattgctacacgttccgggaggagcagtaccctgaattcggataaatataagataatgaaacaacgcaactggcaatgcgacatatccccggtgatgaaagaacttgggtatgtacccgaatatgatttggaaaagggagttcgtgaaaccattgcctggtataaaaatgaaggatggctttagacttatttaagcgcgtagaaacccggaaagggttgtttgctgtggaaaagattacactgatttataatctgttgacttccatattgattctgttcctgtttcagcgaatggatcatccatggcacatgttgctggatagggctatgatcgcggcgatgacttttttgttgatgtatctttatcgtcttgccccctgtaagttttcagcgtttgtacggattgttatccagatgagtctattgtcttactggtatccggatactttcgagttcaatcgtttctttccgaatttagaccatgtatttgcaactgccgaggagtttattttcaatggtcagcctgctatctggttttgccatacgtttccgcatcttattgtcagtgaggcatttaatatgggatatttcttttattatcctatgatgctgattgtggcgttgttttatttcatttataagtttgagtggttcgagaagatgtcttttgttctcgtcacttctttctttatctattatctgatttatatattcgttcctgttgcagggcctcaattctatttccctgccatcgggattgataatgtatctaaaggtttttttcctgctatcggtgactatttcaatcataatcaggaattacttcccggaccgggttatcagcatggattcttttatagcttagtggaaggttcgcagcaggtaggcgaacgtcctacggcagcattccccagttcgcacgtcggcatttctactattttgatgattatggcatggcgtggcagtaagaaattgtttgcttgtctgatacctttctatatgttgctttgcggggctaccgtatatattcaggcgcattatgtgattgatgctattgtaggatttttctctgcattcctattgtatgtggttgtgacctggatgtttaagaagtggtttgcacaaccgatgtttaagtagaaaattggaacatacttctgtattttgaaacaagtaatctccatccgcaggagtcagggtttgcggatgaagattatgatctatagtggattaaatttccggattctctttacgctgggaagtgatttcttcaaatatgcggaaaagttcttcctttgtttctgcccgtaacatggcaatacgcgtattacggaaattaggtattcctttgaataatggactggcagccaaatgacggcgtacgtgcagaatacctctgcgctcatcaagtagatttacactgtcgaccacttcctggcgaagcacttccatgcaccagtcgaaacttagcggtggtaattcttcaccagtttccagatagtgtttcacctctttgaatatccatggacgaccaaagctggcacgaccaatcatgacggcatctactccataacggtcaaaacactctttgcagcgttcgggcgtcgtcacgtcaccattaccgatgataggaatatgcatccgtggattattcttcacttcgcctattaatgtccagtctgcttctccggtgtacatttgtgcacgggtgcggccatgtatagtcagtgcagcaatgccacaatcctgtagttgttctgctagttctacaattactttgttgttagcatcccatcccagacgggtcttgaccgttacggggattttcaccgcatctactaccgcacgggtgatctccagcatcttagggatattctgtaacatacctgctcctgctccttttccagctactctttttaccgggcatccgaaattgatatccagaatatcaggttgtgcctgttccacaatcttggcagcttccaccatcgtttccgtatctttcccgtatatctggatggcaaccggacgttcggcatcactgatacttagtttctgtgcggtcttgctgactgcacgtatcagtgcgtcgcttgatacaaactcggtgtataccatgtctgccccaaatttcttgcacattaagcggaaagccggatcagtcacgtcctccatgggagcaagtaggatagggtatgtacctaaatctatgtgagctatcttcatatatagtattactgctaattatttgttcttttattggttgctttatatttctgcttcggatggttagggattccgggatatagatgttcgattgttccattttttatcatcttgggaataatcttatttgctatataatcaatcgttcgatctaccttcttagctatttcatttatggtgatataatcctccgcaatagacattattatggattggagttcttcaaacttgagtctttttgaggttccaacctttgtaccggaattctctatattattttccgaggttccaacctttgtaccggaactctctatattattctccaaggttccaacctttgtatcggaactctctatattgttctccgaggttccaacctttgtaccggagctctctatattgttttccgaggttccaacctttgtaccggagctctctatattgttttccgaggttccaacctttgtaccggaactcttcatgttattctccgagctgtcaacctgtccctcggattcattaatatggtatttcgttcccctaccatttcctgctgaaatcaagaatccttcattacaaagtttttttagcatctttgtaatatccgaacgatgttgtggaacgacatattgtaattgagtgttattgatttcgctttcactatagcaagtaaccaaaacggttaattcatcttgtgtcagggtttcaatctttccatcaaacaactcttttagtttgatgacagtgtcatccggtaataaactaatcatcggtagagttaactctaccttgtccggacgattaaattcctcaacatacggtttttgccagttagcttctctccaaccttttataatcttattcactccacttcctgctttctctgaaaagccgatgagcatgaacattttttgcaatgccttattgcggcatacactatctccgcctgaataatattgcgttttgctgaccagcattgtgccgggattcttgaagcggtatttatctacccattgttcgacaacaatgttcccttcttccgagaaatcgcaatgaataagcgtattgataaatgcttcgcgtatggcaatgtgtgtgggagtttcgtcaatacgtataccatttcttatttggaaaggtttaggtaatatggctgttagtttggggtaaactttacgataaaactgaaagagattcgcttcccaggttccgtccggacaaatacgatccgaccatctaagagaatcgtctgctcccaaatgttccctgtaatcgggaaaataattgggggcacattcaggatcagtgatactttctgtttttccgaacataagtattccggctaaagtgaatccttcttcttttgtatgccggtctttgcggtatgcttccagcttagtgaggaattctaaattattcagactaagccaaggatgagatggtttcagattagcgaagagctgtctatattgcgtcaaagtttccttgtcgatatcttccatggaataattgcataaaatccttgaatcccgtggatgactttcgtccgaatcggcaatcatacgtttcacttcagcatctgtacatttatagtctccttcgtggttacgtttaaatgtatgtccactgaatggattttttgttctataaatagggcgttgcgtgcgactggccctggggacatagatgagaagaagatttctttctttgtaacaaccttcatataagtcattgtctgaaagtagattctcgtttacgcactccgtgttattaatctgattccagaagtcttttttgtattggctgatttgctctttagtcagtccttcgatgataaattgctgtttatgctctttcactccaagtacaatgactcctccgtctgtgttggcaaaagaagaataagtatcccatagactattgggaagaccatctttggcaattttgaattccagatctacagcttcctctttttgtataagtgagtctatatagtcggtaaaatcccactcttccaaattgttgagtacaattggtttcttattttccatatcttctttctgctttattctctgcaaaaatacggataaatttgtacctttgcatacttctatcatatttaatgattatcagacaataagatgaatataaaagattttgaaataatggctcctgtcggttcgcgcgaatctcttgctgcggctattcaggcaggtgccgattctatctatttcggtatagaaaacctgaacatgcgtgcccgttcggccaatacgtttacgattgatgatttgcgggagatcgcccggacgtgtgatgaacacgggatgaagagttatctgacggttaacacgattatctatgataaagatattcctttgatgcataccattgtcgatgcagccaaggaagcgggaatttctgctgtgattgcagccgatgtggcggtgatgaattatgcccgtcagatagggcaggaggtacacctttccactcaactgaacatctccaatgcagaggctttgaaattctacgcacaatttgcagatgtggtagtattggcccgtgagttgaatctggagcaggtagccgaaatctatcgccagattcaggaagaacatatttgtggtccgagcggtgaacagattcgtattgaaatgttctgtcacggtgcgctttgtatggctgtatcgggtaaatgttatctctctttacatgagatgaaccattctgccaaccgtggtgcttgtatgcaggtatgccgccgttcctatactgtccgtgacaaagagacggatgtggaactggatattgataacgaatatatcatgtcaccgaaagatttgaagaccatccactttatgaataagatgttggatgccggtgtgcgtgtattcaaaattgaaggccgtgcccgtggacctgaatatgtacgtacagtggtagaatgttacaaagaggctatcaaggcttatctggaaggtacatttaccgacgaaaagattacagcttgggacgaacgtctgaaaactgtattcaaccgcggcttttgggatggctattacttgggacaacgtttaggcgaatggaccagaaactatggctcggcagctacggaacgtaaaatatatgtgggtaaaggtatcaaatacttctctaacatcggagtttctgaattcctggtagaggctgcggaagtcagcgtaggcgataaacttctcattaccgggccgaccacaggtgctctattcatgactttggaagaagctcgtgttgacttggaatctgtacagactgtgaagaaaggccagcacttctccatgaaatcggataagatacgccccagtgacaagctgtataaactggtatcaaccgaagaactgaagaagttcaaaggactcgatattgagcaaaaaagaggctaactgctatttctcaacttttaattctcaattctcaatttaaatgaactatatctatgaattggaaatgaaggtgcgtgattacgagtgcgaccttcaagggattgttaataatgcgaactaccagcattatctggaacatacccgtcatgagtttctgacgtcggtaggcatcagttttgctgcacttcacgaacagggagtcgatccggtagtggcacgcattaatatggcattcaaaacgccgttgaaaagcggagacgagtttgtctctaaactctatatgaagaaggaaggtatcaaatatgtattctatcaggatattttccgtaagagtgatcataaagtagtagtgaaatccactgttgaaacggtatgtgtggtaaacggacgtttgagtgacagcgaattattcgatagcgtctttgccccttacctgaaatgagcagttccgaggaagaacagatttatagtatcgccctgacaatggtgcccggtatcgggcacataggggcgaaacatctgatagacggaatgaacaatgctgttgatgtcttccgtctgcgtaaagaaataccggaacgtattcctgaagtgagtcaacgggtggtagacgcattggattgtccgcaagctgtgatccgtgccgaacaggaatatgaatttatccggaagaaccggatttcctgcctgactttccatgacgaggcttatccttcccgtttgcgggaatgtgaagatgctcccatcgtccttttctttaaaggaaataccgatttgaattccctgcatatcataaatatggtaggcacccgtaatgctactgattatggtacccggatttgcgcctctttcttacgcgatctgaaaatactttgtcctgatgtgttggtagtcagcggacttgcttatggaatcgatatccatgcacatcgtgaagcgctggtcaatgacctgcctacggtaggtgttcttgctcacggtctggatcgcatttatccttatgtccatcgaaaaacagccattgatatgctcgaaaaaggaggactattgaccgaatttctgtccggtacgaatcccgacaaacataatttcgtcagtcgtaaccgtattgtcgcaggtatgtgtgatgctacggttgtcattgaatcggcagaaaaaggaggctcattaatcactgctgaacttgctgaaggctatcatcgcgattgctttgcttttcccggccggataaatgatgaatattcaaagggatgtaatcggttgattagagataataaggcttccttactattatcggctgaagatcttgtacaggcaatgggatggaatataccggcaacttcttccgagaaagtaaatgtgcaacgtagtctttttctcgacttgtccgaagaagaacagaagattgtctctatcctggagaaacaggggaatttacagattaattctctggtagtagaagcagatattcccgtacataagataaatgcaattctttttgaactggagatgaaaggggtagttcgtgtattggcaggaggaatgtatcagttattgaattaactcgtataaactaacctcatatatggatataaaaaaaggagcaacgccttgctccaacctttgttaaccttaaatctaatactatgaaaaaaatcacatgacaaatgtatgtctttgcaaactaacctccaaataattctgttgtatttgtttctcttttaaattctttcactgattttcactgttatcgcacacggaacacttttaatggctaaaatagaatgcttttaggataagtaatagggaggaaagtaagtcttcctgaatatcattacagcttctgggaaaattagaaaataaggtctgaatataagtgttttcttggtttaaaaggaacaccccgttggtttaaaaccaaggcatcgttcctttaaaaccaacggggcgttccttttaaaggaaaatgtgaacctgtatattatgtgtagtatatagaattatcttttcataatagccatggtagatttttggctgtcaaattcgatgactaccaatgaatgtttttatgagaatgctataacactgatgcttgtcactacggagcataagttctatataataaagaaaagtgttacgaggactatttgggaaaaatcaacaaaagttttcataaatgtatagaaggagattgtatgattcattcgaaaaatttggcgttgaaagatgatataacatatctgttgatatgagatattttgtttgtagtacaaaaaaaggcgaggcaaatgccccaccctgaatgttttcacaacggaataatccttattgtgatttgcttttaattagtgtggcaaagatagtaatttattttgttttaatgtctaatttgtggaaaaatattaatatatttgatgagttataataagatagggcaaatatgaaaagaatattaggattggatttgggaaccaatagtattggttgggcattggttgacagcgaagagcagagaattttaggaatgggtagtcggattattcctatggatcagggtgtgttggatactttcagtggggggaatccggtagagactcaaacagctgcgcgaacggcctatcgtggcacacgccgattgcgtgaaagagcattattacgtcgtgagcgtctgattcgtgttttgaatatgatgaagtttttacccgaacattatgcttctcaaatagattttgagaagcgattagggcaattttttgatgaaaaggagcccaaactagcttggaaacaaaatgatgaagggaggttcgagtttatttttcaacaatcttttaatgaaatgatagaagaatttaagaataagggggtggttagagaagataaaaaaatcccatatgattggactatctattatttgcgtaagaaagctctttctcaagagatagagaaggaagaactagcttggattttattaaatttcaatcagaaacggggatattatcaattaagaggggaagaagaggaagagaaccctaataaattagtagaatattattcattgaaaatagtggatgtcatagccgatgaaaaaccgaatagtaaaggtgatatatggtattctttacatttagaaaacggctggatttatcgtcgctccagtaagattccgttatttggatggaaagataaaacacgtgattttattgttactacagatttgaatgacgacgggacagttaaaaaagataaggaaggaatagaaaagcggtcttttcgtgcgccaagcgaaaatgattgggtattgttgaaaaagaagacggagagtgatatagaaaagtctcataaaacagttggtacgtatgtctatgagacattactgcaaaatcctatgcaaaaagtttgtggaaagcttgtacggacaatcgaacgtaagttctacaaggatgaactgaaacaaattcttgagaaacaaagagagtttcatcccgaattgagagatgaagatttatacaacgactgtgtcagagagttatatcggagtaatgagacgtaccaatttattttaagtaaaagagattttgttcatttattcttagacgatattttattttatcagagaccattacggagtcagaagtctgcgataggtgattgtatacttgaatttaaaacatacaaagataaagatggaaataatattaaagagtatctgaaggtcatttcaaaatccaatcctctttatcaggaattccgtatatggcaatggctgtacaatttgaagatatatcggaaggaagatgacgaagatgttactttgcaatttattgcaaacattgaagataaagaacagctatttgatttcttgagtaataggaaaagtatagaacagaaacctttgcttgaatatctgataaaggcaaaaggtctgaaaaaacaggtaaagacagaggcatatcgatggaattatgttgaagataagatatatccttgcagtgaaacaaaaacgatgatttctacacgtttggctaaagtaaaaaatgttccagaggatttccttacaaaagaaatagaacaaaaactttggcatatcatttattctgttacggataaaaatgagtttgagaaagcgttgggaacttttgcaagaaagtatgatttagatattgcttcttttgtagataatttcaagaaaattcctccctttaaaaatgaatatggatcattctccgaaaaagcaataaagaagttgttacctttgatgcgtttggggaaatattggaaatggagtgatattgataataatatccaaaatagaatatccaaaataatcataggcgagtatgatgaagaaattaaggatatagttcgtgaaaagtccattgctctaactaatgaaaacgattttcaaggtttacagttatggttggctcaatatcttgtttatgggcgacattcagaagctgatattgcaggaaaatggcattctgttgctgatttagagaagtatttgaatgagtttaaacagcattccttacgtaatccgattgtagaacaaataattacggaaactttacgggtagtgagagatatttggcaaaaatacggacagggagcagaaaacttttttagtgaaatccatgttgagcttggacgtgatatgaagaacactgctgacgaaaggaaaaaaatagctaatgttgtaacagaaaatgagaataccaatttgcgaatcaaagcattattaatggaattaaagaataattctgatggcaaattggaggttgaaaatgtccaaccctattcgcccatgcagcaggatattctgaaaatatatgaagagtatgcaattagcactgggcttgataacgaaaaggatgaaaaggtaaaggaagatataaagaaaataagcagggttgcacaacctacaacaacagaactacaacgctacaaactatggttggagcaaaaatattgttctccatatacgggtaaagtcatcccgttagggaagctctttaccgaagaatatcagattgagcatatcattccaaaatctcgttactatgatgatagtttcagtaataaagtaatttgtgaggccgctgtaaataaattgaaggataaatgtttagggttggagtttataaaaaactaccatggacagattgtggaaacaggctttggacaaaaagtaactatctttgatgaggaagcgtatcagaattttgtaaagcagcattatgcttataatcgttccaagaggacaaagcttctattggaagaaatacctgaaaagatgatagaacgccaaatgaatgatacacgttacattagcaaatttgttctccctcttctgtcaaatcttgtacgtgcagaagaaaatgacaatggagtaaattcaaaaaatgtacttcctgtaaatggcaagattacaactatgttgaaacaagattgggggttgaatgatgtttggaatgatttgattcttcctcgttttgtgcggatgaatgagttggcaaagactatcgcattcaccagttggaatgaacaacatcaaaaatatttgcctactgttccattagaactatcaaaagggtttcaaaagaagcgtattgatcatcgacatcatgcaatggatgctttggtaatagcctgtgcaactcgtgaccatgtcaatctgctaaacaataaacatgcaaatactgatacaattcgatatgatttacaacggaaattacgattgtttgagcgagtgacatatattgacccgcaaacaaaaaacaatgtaacaaaagatattccgaaagaatttaaaaagccatgggataatttcactgttgatgctcgcaatgaattggaaaaaattattgttagctttaaacaaaacttgcgtataattaataaggcaaccaatatatatacgaaatatgaaaacggtaaaaagataaaggtaagccagaaaggtcttaattgggcaattcgtaaacctctacacaaagaaactgtatttgcaaaagtatcacttcgtaaaagaaaaaccgtacgtttgagtgaggctttaaaagattggaaaaggatagtcgataaaaagctaaaacaagaaataaaacggcttacctgtcaatatggtaaatttgatgtggatacaatcttgcgatattttaaagatcggaagtaccagtttggagaagtagatgtatcaagagtagaagtatattattttgatgaagaaaatgcggcaaccagatttcttaatgatttagtttctatttttaaaggtatcaccacagcagataaagcaaaagaaactataaagaaaatcactgatactggaatacagaaaatattgttcaatcatttagaagtaaaaggtaataaacctgaaattgcattttctcctgaaggtatagaagagatgaataaaaatatcatagccttaaataatgggaaatttcattatcctatttgcaaggtaagagtatatcaggctttgggtaataaattttcggtcggaacaacgggaaataaaaaagataaatatgttgtggcagaggctggaacaaatctttttttcgttgtttataagaaagagggtaaacgaaattatgaaaccataccgttaaatgaagtgattgaacatcaaaaatggcgtggtacattatcaaaagaagagcaaaggagaattcctgtaattcccatcaaaaatgacagaggtatatttgtattctatttatctcccaacgatttagtttatattccgacggaagaacaacttagtaatgttgatataagtattaatgatataaagccagatagaatttatcgatttacggattcaagtgatactacagctaattttatacctatgtctattgctgatgttctatttaattataataaggacaaacaaaagaaaatgggtatcgagtatcctattcagaatgagattggaattggtagtcaaggttctaaaaatcaaaaaagtataaatggcgagatgattaaagacgtttgtataaaactaaaagttgatcgattaggaaatattaaaggaatatctggtttatgaataaaaacactaacaccccaattccctctgatttctttctttataaagacagtaatggagaagtgaaagtcgaaatctatatctttaatgaaacagtttggctgacacaggttaagattgcgcaattgtttggagtggatagaagtgtggtgacaaaacatttgaagaatatctttcaaacggctgaattgcaggaggatgcagttagtgcaaaaattgcactaactgctgctgatggtaaaaattatcaaacgaagctatacaatcttgatgctatcttatccgtaggataccgtgtcaacagcattcaagccacacattttagaatctgggcaaacagtgtactgaaagaatatttgattaaggggtttgccatgaacgacgagcgattaaaaaatccgcaaacgctattcggcaaagattatttcgaggagcaattggctcgtattcgtgacattcgtagcagtgaacgtcgtttttatcagaaaataactgatatttattcgcaatgtagtgctgattatgaagctggtagcgaggtgacaaagaagttttttgcaactgttcagaataagttgcattgggcaatttccggacagacggcagcggagataattgttgctcgtgtggatgcagagaaacctaatatgagattgactacttggaaaaatgcgcctaacgggatgatacgtaaaccggatgtatccatcgcaaagaactatctcaatgaaactgaaatggatgatttgaatcgtattgtttcgatgtatttggattatgcagaacgtcaagcgaaaaaagggcaggtgatgtatatgaaagattgggtgaagaagctggatgcattcttgcaatttaacgaggaagcggtattgcaacatagtgggcaggtgagtcatgaggtcgccaaagcattggcggaacaagaatatgacaagtttcatgttaggcaacttcggaattacgaatcggactttgataaacttttgaaaggaatgaataatgattaagaaaacactttatttcggaaatccggtttatctatcgttgcgcaacgcgcagttagttattaaactgcctgatatggaaaaagcaacggccttaccggaagcattgagaaagcagacggaagtaacaaaacctatagaagacattggcattgtagtgttggataataagcaaatcaccatcacttccggtgtgttggaggctttgcttgaaaacacttgctccataatcacttgcgatagtaagagtatgccagttggactgatgcttcctctttatggaaatacaacgcagaatgagcgttttcgtgaacaattggacgcttcgttgccattgaagaaacaactttggcaacaaactattcaggcgaagattaacaaccaagcatctgtgctcaaagattgtatgaataaagaggtaaagtgtatgcgcgtgtgggcagctgatgtacgtagtggcgaccctgataatttagaagcacgtgctgctgcatattattggaaatctttatttgcagatgttgacggttttacgcgggatcgtgaaggtattcctccaaataacctattaaactacggatatgcaattcttcgtgcagtggtagcacgtgggttggtaataagtgggttacttcctactttgggtatccatcatcataatcgatacaatgcttattgcttggcggatgatattatggaaccttatcgtccttatgtggatgaattagtatttagcttaatacaggagtatggaaagggtgtggagctaacgaaagaggtgaaaacacgattgcttattattccgacattggaagtgataattggaggtaaacgcagtccgttgatgattgctgtagggcaaactactgcctcactttataaatgtttcaatggagagcttcgtcgagttgcctatcccgaacggtaatggatcgtcttagtgaatatcgtataatgtgggtgctcgttctttttgatttgccaactgaaacgaagaaggaaaagaaggcttatgcggatttcagaaagaatttgcaaaaagatggttttacgatgtttcagttttccatttatgtgcgtcactgtgctagtagcgagaatgcagcagtacatataaaaagagttaaatctttccttccggagcttgggcatgtcggagtcatgtgtattacggataaacaatttggggatatagaacttttctatggaaagaaggcgcagagtgttaatacaccagggcagcaattggaattgttttagaacacaaaatctcgcattaatgcgagattttgtgttctaaaaagtcctcttttttcttttctaatcttctttgtaactaattgaatttcattttgttatacgaaatgtgttgtttccaatagttcaaagatactaatttgagagcaaatcacaacttgttgagtttaagtctacgggctgcaaggttgtttccaatagttcaaagatactaatttgagagcaaatcacaactgatttttgtttctatcattgcagtgttgtgttgtttccaatagttcaaagatactaatttgagagcaaatcacaacaaatgggtgaaatcgctccggttcaatctagttgtttccaatagttcaaagatactaatttgagagcaaatcacaactggtcttaaggtagccgcctttcggataaagttgtttccaatagttcaaagatactaatttgagagcaaatcacaacgctatccaaattgtcattatttgtcttttcgttgtttccaatagttcaaagatactaatttgagagcaaatcacaacgtatcgtctaacgtagtgtttgacttgaagttgtttccaatagttcaaagatactaatttgagagcaaatcacaacgatatactgattaatactaaatatttggacgttgtttccaatagttcaaagatactaatttgagagcaaatcacaactgtactttccatactgtaaaattttataaggttgtttccaatagttcaaagatactaatttgagagcaaatcacaacaccaccccctagagcttgatattgttttggttgtttccaatagttcaaagatactaatttgagagcaaatcacaactagcagaactatcacaggaaaatttcaaggttgttttcaatggttcaaagatactaatttaaaagtaaatcacaatccattcatgtatctctttttaatataaatatgttatttcttgtgattcaaagattaccatttctgtataagtatttttaagtttccctttgtgagcattagacttaattttagtgttaaatattaggaatgtttaatctaattcaattgcttagtaattaggttaataaaggtgggcatctctttatgttaacgataaaatcccaaaagacttgacaaacgctttttgatgttgtatatttgtataacgaaagaaacaatgaaacgataaattaaaactttaaaaacgaaatgagacgaatcttatcttttgctgtattagctgcattgtacttccccggatgtacgaccagtaaaaatgcagtgcgttgtctaagccgatggattaaagactgtaacccgttgaccaaagaacttgtaccgaccggttatatgccgtataatcatcgttatctgacgatgaaacagtataagattataacaaaacatctaggagatccttatgaggattagggtatagacgacccgataaaaagcttgaggctgcaaccttttatagggtttgcagccttttttgttgcataaattcaacgcgaatccttctgaaagctacattcgggtttttaataaacttggataccgtttttaataaactccttaagaatttattagaaactcaaaaggcgtttatgcagaaaagataaacttttttcggtatatcgaaatacagaggtttcaagttctccttatttgattctttatacagtaaattatcgtgatattattggcggtcgtttaatttaacagcaatgaaacctgtaactaaataaattatgtttcagctgttggcaacttgctctccagaaattctattcgcttgtgtaacatatcaatgagacgactgtttgccttgatgagctcacggaggtcgtcagcggcttcgatgcgtacggtgctacagtcttttgctactccgatatttgttccgattgttccggagttgttgacatatacattcccatctatcttattaaatagttccaatgcagacatattgagcacttctgctattttattcagccttgttaatgtaaggtctgtttctccatattcaattttgcaataggcgcttgtcgataagttcaacttttctcccatttgctcttgagtgagattcttttccatacgaagcatttgcagccggtgtcctactatcttttttaaatcagtttccatatatattgttattgggaatcaatttattattggacaaatgtaacaattttagtggatataccaaatgctattttacacttattctttgaagttggaaaaatagtatgatacgaagaacttaaacgggagaaaatcgctctattctatttgatagattgcacatacagtcctttgtctttgaaatttggggagtatttaccgaatataggttgtttgtagtaattatagtgtatataattaacatcgctatgtgcttaactttgcaaccaaacaaacatgtaagctaataacaaataatatattaatatgaaaagaattttactactactatctatttgcttgattccgatgttgagttttgcacaaacagaagagaatgaaaaagaaagagtttacattgattatttctcgcgtcctacaactatcaagcctattttggcagaagcattgcgcaataaagtgatcgaaggtatccaggagatggaacgtgtagtgctgattgatgttgactccgatgaggcgttgaagaacgaagctaaaagacgtcaggaggcttctgctatgggggatgtcgtttccagaagtgaggaaatgacgacgttgggtgcccaatatctcattcagggaaacatcaccagtatggaagctctccaaaaaacagatagtaaggggaaaacttattataaaggaagtgtctcttatacattaaagattgtaaaccctactaacggtacacttataggtacaaaggcattctcccacgaaggactgaccggaaacacgggcgatactcccgacgaagcaatcatcaaaacattggattatgcaaagattagcatggacgactttgtcaacgagtattttaaaattgaagggaccatcgtacaagtggaaagtaccaagaaagacaaggcgcaaactgtatatatcgacctcggaaccaaaaggggaatcaagaaaagtcagaagttcagagtttacattgaaatggacattgccggtgaactgtcactcaaagaggtaggacgcttgaatgtaaaggaagtcttgagcggaacacgttctttgtgtacggtgagcaaaggcggggaagagataatgaaagccactagagaggaaaagaaattgattgttatttcccgaccggatactttcctgggattctgattggcctgacttaataaattagcaaactgaaaagagaaatgaagacacgactgattctttggggactactgtcggtatgcgccattcatctcacggcgcaggagttatactctaatgaggtgatttgtgtgaaagcggatgataatttggctgttattactgctgccggaatatccgataaaaagaaagaggtatataatatggcattgaaatccatctttaatgctatattcctgaacggtattgacggagtggagaatgggcaaccgttgatcgggaaagaggattcgtactatatgagccagttcttcggttcgcgctatatgctttttgtaaaagactacgagacagtgggagaacctgtgcgacaaccgtccaaactctataaggggacagtgacagctcgggttctgttaggtgcacttaagaaagacctgatacggaataagttgatggagaaatcgcaggaagacaggtcgatgaaagaaatccgggaacaaatagccttgccgacgatcatggtggttccctataaaaggaatgaccggaattcatatgctactattttgaagaacgattttgatctccgcatagcggtcagcacggtaaaagacggatttgtcaagcttggtgtaaagaccatagctgccgagggaaagttggaaggaactctgcgcgcttccgaatgggaaagtaaaaacgccgattctaatgataaacagttattgatgaattcgggggcggacgtgtatgtgattgtcgatttgcaaaaagatatatcggcaactgcgggtagtagagtttcgctgatcatgactgctcgtgaaacggctaccggaatggatttggccagtcgtaaaagttggactaaccgttttaggacaacagatgtggataaattatgcgcttatgcagcgcaggacgtattggatggttttctgaaagacatctcaaaagaatttgcccggaaagtagaacacggtaatacggtggttctccgtgtcagtctggccgacaatgctatcaatacgatgaatagcaggattaatgggaataccacactttcggcatacatacgtaactgggtacgaaagaatgcccagggaggacgttatcatattcaaggtgccgtggatgatagcctcatatttgattctgtccagattccggcgaaagatagcgacggattgcctctggactgtattacgtttgccgataatctggtgaattatctgaatgattccggcatagatagtgaacacagagtggatggaaataccatttatttgactattcaataatcgaagcgcatatgaaacattggcttttatttgcccttgcggctttctggtgttatcttccactgtcaggacaacagaaaaaccggccggactgggtacggcagcatccggttgacagattgaattacagcggagtggggatggcagaagtctcggaaaaagattatcagcagaaagcaaagcaaaatgcgttgtccgaccttgtatctgaaataaaagtggaaatagccactcattctttgttgaacactattgaggaggctggcagtgtgaaacaaacatttgccgaaagcatccgtacgcaaacccgcgaggagatagaggattttcgcttggtggattcttggcagggtgacaatgaatattgggtatattatgaactgaataaaaatgattatgcggattttgtggaggctcgccgtcaaaaggcaatccgtaatggctttgatttttggtataagggtaacgttgtcctccggcaaggagatctggtgactgccattgaattgttctcgaagggaatggatgctatccgtccggtactcaatcaagaattattctgttcttatgagggaaaaacgattaatttggccacagagttgtatgcagctttagcaggtgtatttgatggagtagcagttgtcttaaatccgccaacagtttcgggtgcaccgtttcaaggcataaaagaaccggttgctgtaggagtgtaccgtaatggaagtccgttgaggaatatccggctcaaagcagaattcatttccggatccggagatttgtcctccatgtctcccactggtgaaacgggagtgaccgctctttatgtacacaatattacttccaaacaagcccggcagcaaatcggcatctcactggtggacgatgcgttcgatgtattccgtaaaggagcttatgctgccttattcaaacagatactttcttctcttcccaaagctactttaactattgaagcggagcaaacgcaggtttctgcttatgtgaagagtgttcggaacgatgtagatatggtggagcgaactgtaaagagtctgttgaataaccacttcttcaatgtggttacatcgccctctgaagcggacgtcattgtcatgttggacaataagtgccgtaaaggcaatactgttccgggcgaactctacaattttattgagttcttttctactttgggcattaaagtgaccaataaccggacgggacaaatcatgttgaattactccatcaatgacgaacgcacattggttcccgagagcaaggcaggttctcaaggtaagaatatggcagccagggaagtgataaaacggttgaatcgggagtttgcccgcgaactgaagaagctgacattcgacaggaccggaaagattcctgaaaggcaacaggaggatccggatattcctgtcccgatgatcgatccttctacttcagcgaaagaacctgctccggttgtatctgtccctatccctgtggagattcccgaggtcactccttcttcggttccggtgaagaaaaacggaatggaaccatcgaaagcactccgggcggagtggttcgacggagttttcgtagaatttgtgaagcttacggttttaggggataaatcaaaaatacatcttcgaataatgaatgagactgctgatgattgcgaggtggatctttacagtggaaatatcacgattgtaaacgacaaaggggaagagcgtccggttttgaatctaaaactggggtctaagtccaataattacagagtcagtgcacttattgtgcctaaggtgcctacggagatggttattgaagtgggaaaactgcaatcggtggcattgctccaattgaaagatttcaaaggcaatacgattaaattgagagacttaaaatgattttatattaacattaaaaatgtacagacatgaaaaaaattagtttattgggtgcttcattactcaccattgctgttatgacaagttgcggtagctcaaagcctgtggcacaacctgtgcaacaaccggcagttcagcaggatgtcgaaattaacgttccttgctcgggtcccgagttccagacaaataaggaatattttagggcgagtgcaatggggctttctacggatatgtccatcgctaagaaaaaagcgatgacggatgctcgtgctgaaatagcgaccgctatcggtgcgaaagtaaaatcggtgactgacagttacgtttcttcctatcagcaaggagaaaacgatgagagtaaaagccgttatcaatcattaacccgtacggtggtagaacaggaattgagcggtacgcgcgtcatttgtgagaagacaatgaaaactcctgatggtaagtataaggtatatgtatctttggagctggcaggacaggaaatcatggatgcgatggccaatcgcattaagaatgatgaaaaattgcgcattgactttgagtacgaaaagtttaaaaaagtgtttgaggaagaaatgagtaaaaatgctcaataaataactttcgagaatcataggaggtataaaaataatttctttaagtaactacccaatcatctaaaaactgaataatgaaatgtgatttatcggacatacggcatagttgggtagttatttttatgattttgctatttttctctccgactgatgagatgtccgcgcaggttgcctctgccgatacggtttataatcattcttatgattgggtggcagggcatcgggaagccttgccggaatgggtgtttgctccccggcaacaagatagagtgataggggtttccgatccgtgcatgaaccccgaagcagctagaattcaggctttgcaaagagcggcctatctgtattcgttacaggagggtgtacatctgaatctgttatccgatgtgttttcaagcacggacactgctgtcaatacttatgaggacgaaagaaacaagatacttactttaggagtaatcgagcaaactgtacgtcgggaggcttaccggattgaggaggaatatacttccgcatacggtgagaaatttatacaagtttcttttatgcaggcggatagttgtgacttatcttatcattcggtcagcgaactgatgtttttgttta

SEQ ID NO: 1071 - DNA, 24623 bp, synthetic construct
  source 1..24623: mol_type = other DNA
  misc_feature 1..24623: note = Synthetic
cgggagcagttcctctatattgtgcttctatggaaactaagatgctatcgaagaagccaagaacttgtgttgaaaatataactaaaagaacaatagcaaaattctttgtgagttccccaggacttaacccccaagtgtagccatctttatccgcaataccttcattatattttttaaggatatttattaaaaagaacagaacagcaagcgttttcattccggcaatagtgtattgcgaaaagctgctgttctgtattgtttgaaatacagcgtctatgtattccagtccaatccctaaaagtatcgttgcggtcatttttagtatgctgtttctcgattattcactttatcctgcattttcctgaaagaaataatatctctgtatcgtttcgtttttgtttgaatattggaaaccatttctttcgattccaattctttttcttttaagacttctgcacgttctgcatcactcatttttagattatcactggataatatttcacccataaattcaacggtgtccaatgagttttgaattatcgcatcaaatgattgtgcaacccgtgtaacttcctctggttttatataagaggagttcaggatgtcttgcaaatcatgctgcattacattgataaggcgctggttgttttgtgctatttcttgaaccgctctaagttgttgtactacacttgatactttttctatactttcctttgcatcttttaaaaactttacagatttaatcatttgagcggtttgtttgcctgattctacaagttgttttatcaagcttacaaaattagtgttgtcataagtgggcaatccctgtgcagttgcaccgtttgagataaatagcgttatggctattgttattattgaaattttcatttttgatttcataattttaggttttagatgtgaattgaagtattgctttttccatattttgatgctcttcatagagtttcagtatggtgtcgttttcttgtccatctgtgagataagcggcatacacttccttcggaacttctaatctgaaaacgttgctttctttaccaatcttaataaacatttctgtgtatttccgtgagccggatagattgttcttaattgattttagctggtttagatcgtggctagaaaggtgaagtcttttaaccaattccgcataacctttttcgttgttgagactatagataacctgtgtgttttctaaaatactagcggaagttgaattattaggaagctgattgatggattgaagaataattccaatagcaccgttttgttttcggattgcttgataataaaattcaacactctctaacacattttcaaactttaattgcttcgcaaattcatcgaaaagaataatacctttttcggccttatttttccaaattgttctttggattgcggattttatcagcttcaacatcacagaaagtatttctttattgtctttgacttcgtccagttcaaatacaatcaggcgtttgtcttcaattttataagtttggtcttcattgatttcgaaaaggaaactatatagaccattgcctacatattctgacattacatgtaaaaaattggtgatgttgaagtaatccggatgtattttaaggctttctaaaaggtctttttggttcgtttctataaagtggcaaaaactttctaaagaatgattttctaaagtgtttttataataatgactcagtatttttttaatggaaacggattgtgctttggtcgcttttaattccgaagctaaaagttcaaatagaaatacggataagtcttcaatacgttctggagttagatcatttacatgactaatataaaaaggattaatgcctaagttttttccactttcataccggagtacggtatatttttctggatacaattttgcgaatttggtataggaacctcccaaatcgataataactaagcgaactccactctcaaaatattgacgtagtatattattggctaaaaaggattttccttctcctgttggtgcaaaaatggcgaagtttctcgccttaattcgttttttacgctcatcccatacatcttttagaacgggaatgttattttctcgtgtattaaaaatgatacctgttgtatcagatttgtaattactgttgttgatgaataagcaaagtgcatgttttaaatctgcaacataaacatcattatttgaaaaattagaggagaagcaacagtagctatttaatatataatttttacgttcttctcctcttggataataaggggtaacatctagttctttaaattcagtctttattttagaggttgttttttctaggtttttaagatctttagaccaataaataatattgagatgtccacgtacaatacgtgcattatcatccgaattaatttgatcaagaatgtgctgaattttgccaagaagtactttgttttgtgatccgaaattagaacttttattaagttcctctatttttttatcaagcagcttgcgccatttgtgtttgttgtctaaatagatcatttggtttacaatgtggttttcatttagcgtaagccctaggccatcaataaacccttgatgaaagacaaaatcatctgtagtgaatttctcattggttttgctactttgtacactttcgccaaagcacagttcgctattgatggcaagggcatcaaaataattttcgccaatattgacgtttttcttatcaagtacgatatcagtgtcataacctttattaaagccattaaaatagtcggtggtaagctgttgtatttcctctttttttaatggaagaaaggttgtttttctacaattgttaataaaagagatagcatctgttacagagttggcaaagctttttacgttgtcatctagttcttgtgcaattccttttgttacctttctgaaaggattcacatatttaggattgtttaatgttttgtttttggttaagatgaaaaataaataacaattgtggtctatatattcacgtcctttaaaatgtgcatgtgtcgctttttctaagaaagtggtgttcggtagtttttctgaagtatatgtttttttgaaataaatgtcttgtttgtgaactatcgttcctacaggtagcgattttaaagactgaaaccaagcgccatgaatatcttcaaaatctttttcggataatgagtaaatttctggaagattccctttaaagcataagacaacattaccattgttggcaaaaatgatattgtcttgaatatctgcaattggatggtgtgtagaaagattaatcttgttcataattgaaacctgaatttcttttgttggagatgatttttgggaagactttagagatctgaaataattgaggatgatgaactattcgaattaatgcgacatataatgaagcattgaaaattaaaagaccaataattatccagaagctaaaagaaaagataatgaccataagtgaggcaagtatggccatcatcattaaagcaaaaagagaaataggcaaaccaaaaatttccgcacttttacgaatatttttataagtggctaactttttcatgtttagaccactattccaattaaatacgtaaaaattcctacgactgctcctgcaatgagtacaaagactaaaacacgtgtaattccttttttcagatctgcattttcaccgaaaaagtgaccagcgttaaataggaaaccaactaagaaaataactcccagaattatagggaaaatagttcttatggtattggatacatcatcgacggattcttcaataccaccaatttgtgcagaaagcgaagtcgagagcaacaataaaagagttgctaaataaagtgattttttcattttaaaatattttaaattataaggttgtttttgatattttaaatttacacatatttgtttttaaataactgataatcaattgtttattttaaaaatataatttatagttagttgagttgatttgttattatttgacatcaaattctatgaattttgaaaaataaattatttataagtgaaaaaatgaaatgaaaaaagggcttaaatacgtcagttttatctttttgttactaaaaatgtgtgtcatttttggtcaggaaaatgtgaaacaaaaaagaatattcattgatgttggacatggtggaaatgattccggagctatcgggttaaatgacatgaaagaaaaggatgttgtactaaatgttgctttggagatttttagacaaaataagcaattggacaaaccattggatatttatttaagtcgatttacagatacatttatttctttatcggatagaaccaaattaggcaaaacattaaaaccagatgtttttatttcgatgcattgcaaccattctaataacccaaatgcgagaggggttgaagtttatgtggggaaaaatttatcagagtattcaaaacaaagtacttggttgggatttcaattacaagctgtatttaaaaaacaattgggttttgaaagtaggggagtgaagtttgctgattttcaagtactacgagaatctatcgattattatcctgctgtattattagaattggggtttctaagtaatttggatgaatgtaactattttgcaaataagcaaaaaatcgcattgattgctcaagcgattttgtttacaataaaaaaaataaaatgatgaaagatctattcttagaagtaactaaaagtttaaaagaaattattgtacaatttatttcggaaataattttatggtgtaaaggtttccatgtttgaattaagttcttttatctgcagctcctttatcaaatgcaatcaaattgaatagttcacgcattctactacgaactcgatttccgtaacgttcttcgagttcttcggcatttaagttggtggttgcatgtgttttaattttatgtttggtttgaaggtaaagctcatagcgagataataagacttctcccattacatttaaatctttgccataaaatcttcctgctggttcaatacctaaatcatcaaaacagaaaaatttagagttgccataagattggatagttttaaaacctaaatgattaaaactaaaagttacatttctacacggaatcatctcgtaaggaagttgtagcggaactaggtgtctcagtagtttcattaaagtcgttttaccacagccaataggaccagaaagaagaattcctttgtcagtatcaattccgtgttttttacaattttctttgtctttgatgtaatagtagcatagtttacgaatgatttccttgtcttcatgatagattctgaaatgccgaccaaagagtaatctaccttttgcatttaagtatatcaaaactttatcaaaatcgtatataacgtttttaccgtcaaaatctccaagcgaatattctacgcttccttcgattattttagaggggttgtccataatttttgtttttactagttcttaagttgtccttgaattgggatacttgttttttattttttatgccgaaaactttggttctattcatccaattaatagctaacgcacgccaatctcgaatttcatttccatcactagttttccaatttcgagattcgtaatattcgaagaatttttttccttcatcaggattaaaaaaagattctttaaaaaaaataataacggtctgcctgccctttggttttatattgtttatttgttttagactgtttatatttgataccgatgcttgtccttctttgggattgtgatagttgattactggttcataggtgggactgttttgttcctcaacaggtttgcctctaggacagtgctgttctgctagttgttctaatatgggattgtactgttctgaatgtgtttcaatgttagtcttaataataaccatcttaattttacttcctttataaggatttttggaagggaaataaaagagatagtcccaagaatttaagtctcttagacatctgtggtatgtagattttgacccaatcttagaagcaaccattaaatcccttcgatttatatagaaatcatctgcaaaacgacaactgttccattctagaaatagcgccatatacagactgatgtgtgtagggtttaggcgatcatcaaaaaagaatttcccgaaggctgcatttagtaatttgatataattcatatcttaagaatttatgatgtgatgcacacggttggccgtcataacactttgaatttcttctgcctcatagaagataattcctcctattttggtataaggtaaagttccattaatgcggagattctgaagtgtaccaggacttatttgtagtaaatccatgatttcagatgattttaagtatttttttagttttcctttagattgttttactaaaaggtttttaatatcatctagtaattccagtttgaactctagaagatcgtctgtggtaataatacttgtaggcataataatacggttttagagaaaggaactgccgtcaattaatttggctgttcctaacttggtttaattttacatctacaaatttgtgcccttttattgggttttctaccccatgaagaccgtagtatcgttaaaatttaacatttaaaaaaagtataggtatggagtctattttagaggtgtttattgggttttcataactataggtatataaaataagataaaaacgagagtggaaatgagatgtccgtaggtaaaccgtattacgttctttttataggtagaaattacctgatataattgaagttattcttcacttttattcatttcagatattattccggttgatagttcatcaagaaataatgtcctactgttttttcggtttttgatatcctgataggttttgtagatatctttaggtgtaatatcaaatacttgttgaagatgttctgatactttaataatactcatattgttttttctccccaagccttttgagtaaagcgcataaagtaattctacataatttgtgttattaaatggccaatgtattttattttcaataacagcatgttttccatttaggttatttttaatgatatattttttcttatcgagataggtaactaatgaattgtatgctttatgtttacctaaaagcatgtctcttggtgtacaaaaatcagggtcttggaaataaaaaattgaagtagtgatatgacatttatctaggtattctctggtgtaatattctttgtcaaaatgagttgctcctgaatccacataacgaccaaaatcaagattaaaacgaaaaaattgattaattttactgatttttttctttataaattttagttgatcactcttatctgcttttgggaattggacttcaaaggaaagaatctcagagaaatatattaattgaattaatggggtttgcttggtcttcttgaagaattgtatttcttcttgtgttgttttgaatttttgagttagaattttctttttataaaaactcaataaattacggcaaatttttatagaacaattagctctttctaagatgtctaaattttgaatttttatttcattcaaatcctttatcagtttactagtagttgataatgaattcataaataattttttttatgcttggaattgataaaaagaaaaagtttaggaggaagttgttttacttttctttacagtcttataaacaggactctaaaattaatgttattataaaggtagactaacttttgtagccgtatatctttacggaatattccgtatttttatacgggtttcatcttttactataataaagactatgagtataaatcattatttctgtttatttaaaaaacgttttaagaattcacttctattttttacacccgtttttttgaaaatattggaagcatgtttagatactgtattttctgcgataaacaactctttagcaatgtttttataatttaattcacttaggatagataacgaaatttcaatttcccttctcgttaaatcttcatatattatttttcgttttacaaaatcatcccgttgttttttctttagagcaaagatctcaaacattctggtattgtttttaagaaaatataaatatcgatctatttctataatggttatcgcataaaacgctatattcattgaggtaaatgttatccattggtaatctccaataattgtaaaaataggaagtagggcaatacatgcaagacttatcatagaaagtttatttcttcttaatataaaagcatttgagtttgaaagtttagaaatgcttcggtaaaaaatcaatagaaagacaaaagcaaaaagtgaaattgggattgcaaaaagatatcttgaaatgttcaaagaaccactaaagaaataaggaaacataaacaacagaataaaaccaatgcttgtagttaatattacttttcttaatgttaagccatattttaagacagcaatgtcgtactctttgtaaaggtaatgaatgatataaaggcataggaaaattgctatactataagtaatgatgtattgaataattatgggacctggaaaattatctatggggagaaatccacctgagaagttataagcaataaacgaaaaaccaagataaacaaaacgttttaaattgctttgtgatttctttagggatgtgtaaagtgcacataaaacgatgactatatctattaataggtagaagaatgttgtccaatgtattgatgttccaaacatttgtttctttattcgttgcgctcaaatttgtttgtgtctctgtttttataaacatttttccaatgaaaaacttggccattcatagcgatataagtatcaggttttaagtgttgtaatgagctgattgcataccctaaattaaaaggggcatctgtattattatgagatcctaaaactaatgagccaaccaaaacaatagttttgtttaagttgagtttacctatgtatttagcagtatcttccatagtaaaagtaccatgggtaattaagatcttagattcattagaatctttaatcatttgtactagtaattttctgtcttttgaatctattactctactatcttttttaaaaagactttcaattttgtattcaaaactaacatttgcatttttaaggaattggcagatgttaacattaacttcagagtgatcttggttgttgttatctaccccttcaatagttcctcctgttgtaagtatttgaatcataggttttaatggtttattttgactctataaatataaggtttattcatgacaataaataaaaacagataaaagcaggttttaagaggttgagctttctattggttaatgagttgttctttttattaccttgttaccaattgattcggttttacttctgaacttctttgtttaaaataataattaaccatttaagaaatactcaagtttgaaaatataatattgaatttaataggaagtttatatcgaaaattaaaggctatttttcttttttttaacaatgatattattacaaatacagactatttcgaatacttattacagtaattaaaagtggttaaattaatttgtattgttggaaagaatttaaaaaaaaaaaacaatttgttgtacctaaatcaaaaaagttaagatatatagcgttactttccttattacatttgtattgaggacggtattggaactcgagacatcatgggtatgattttagcaataaaaccatttttatacttttatatttcattttaattaaatcgtgtatagaaacttgtactctgatttatagtgattttttgttaaaataaaagaataattctaatacaaaaaagaaagcgacaaccgaagttgccgctttaaatgttttcacaacggaataatccttattgtgaattgatttcaaattgttctacaaatataacttaaaaaaaataaaacattatacgggtttccgtaatacgttctaatttttttattataaatttaaagttgtaataaaaaaaaggttatgaaaaaaatattaggattagaccttggaacaaactccataggttgggctttaacttcacaagattttgaaaataaaaaaggagaaataaatggattgggaagtagaattattcctatgtctcaagatattttaggaaagtttgattcaggtcaatctcattctcaaacagccaatagaacaagttatagaggtgttagaaggctttatcaaagaaatttattacgaagagaaaggttgcacagagttttaaatattttaaactttttaccaaaacattataaagaatctattgattttgaaaggcatttaggtcaatttaaaaataatacagaagttaaacttaattatcgtaaaaataaagatgggaaacatgaatttatatttatggattcttttaacgaaatggttgctgagtttaaagtagctcgtaaagaaactaaaatccctttagattggactatctattatcttcgtaaaaaagcattaactaaaaagattacaaaagaagagttagcgtgggtgcttttaaactttaatcaaaaaagagggtattatcaattacgtggtgaggaagaagatgaaagtgaaacaagtaaaaaagagttttactctttaagagtaaaagaggttgtagctactgaagataaaaatgctagaggaacttggtatcatgtaattttagaaaataattgggtttataaaagacaaagtaaagagccattaaataattgggtaggtaaaactaaggagtttattgtaactactcagttagaaaaaaatgggacagataaattagataaagaaggtaacatacgaagaagttttagtgcagtcgattccgaaaaagattggattgctattaaaaagaaaacagagcaagatatagagaaaagtagtaaaacagtaggacaatatatttacgaaacacttttaaataatccatcacaaaaaataagaggaaaactagttaaaactattgaaagaaagttttataaagaagagttagaagaaatattaaaaaaacaaatagggtttcactctgaattaaaagatagtgaattatacaaagcttgtgtaaatgaattatacccaagaaatgaagggcatcaaaataatataaaagataatgggtttaattacctctttattgatgatataatttttttccaaagacctttaaaaagtaaaaaatcaacaatatctgattgtccttatgaagaaagagtctttataaaagatggaattaggaatatacaaaagataaaatgtattgctaaatcaaatcctttatttcaagagtttaggttgtggcagtttttaaaaaatttaaaaattcatcaaaaggaaaatatagataatggtaagtttgatgaagatattacagatcttatttttacaagtgataatgattgggttttattatatgattttttaaatgataaaaaagaagttgaacagaaacatattcttgattttttggttgagaataaaaagatagtaaaaagtgataagaaaaattatcgatggaattatgtagaagataaaaagtatcctgcaaatgaaactagagcttcttttttatcaagattaaagaaagtaaagactgaaaatgattttttatccaaagaaaaagaagccgctttgtggcacattatttattctgtaaaagataaaaaagaatatgaaacagctatcagaaattttgcaataaaaaatgatttagatgaagactcttttgtagatgcctttataaaatatcctccttttaaaaatgattacggatcgtattcagaaaaagcaattaaaaagatattacctttaatgagaatggggaaatattgggatgaaactaaagttgcagatgatgtaaaaaatagaatattacaaatacaggaaaggttagaaagcataaattatgataatgaagtttttaaaggagacaaaaaagaccgattaaaaacgattgtagatgatgaaattcctaagcagtttgtaaaaagctttataaattataaagacaaaaatcctttaacaggcttaaatacatatcaggcttgttacgcaatttatgagcgtcattctgaatcaggcataattaaaccatggaaatctccaaacgatatcgatagctatctaaatgaatttaaacaacatagtttaagaaacccaatagtagaacaagttgttacagaaactttacgggttgtaagagatatttggaaacactatggaaaaggtgaaattaatttttttaatgaaattcatgttgaattaggcagagaaatgaaaaactctagcgataagcgtaaagcaatgtcgtctagaaatattgaaaatgagaatacaaatgaaagaataaaatcgttattagaagagcttaaaaatgattcagaagatgatgtaagaccatattctccaagtcatcaagaaattttaaaaatttacgaagaaggtgtatatcaaaatccagaagtttcttttcttcaggttaaagaagatgatatagataaaattagaaaaagtagttctccaacaaaatctgaaattaataagtataagatatggttagaacaagggtatatttctccttatacaggtaaaataattcctttaagcaaattgttttctattgattatcaaatagaacatatcattccacaatctcgttattttgataactcaatgacaaataaaataatttgtgagagtgaagtaaatcaattaaaagacaataaaactgcctatgagtttttaaaagtagagggaggcagaattgtaactttaagtaatggaaatatagtaaagttatttaatattgataaatatgaaaaacattgtaagcaatattttaaaaaaaatagagcaaaactaaataacttattgtcagaagatattcctgaaggatttataaacagacaattaaatgatagtaggtatataagtaagataattaaaacgcttttaagtaatattgttagagaagacggagaaaaagaagctacaacaaaacgtcttgtgccagttacaggctcaattacctctaggttaaaacaagattggggtttaaatgataaatggaatgaaattgttgctcctagatttatgagattaaatgaattgacaaactctaaagattttggggaatgggattcaaaaataaatgcttttagaacaaaagttcctgatgaaatttcaagaggttttagtaaaaaaagaatagaccatagacaccatgctttagatgctttaataattgcttgttgtacaaaaaaacatactaattatttaggttcgttaaattctgaaagagaaaattacggtttaaaagagagtttgttaataaagaataaacaaggtgattttacgaaacattttcaattaccttgggtaaatttctctacagaagctaaggaaaccctagaaaagacaattatcagttttaagcaaaatttaagaataataaataaaacgaataataaaacttggcaatgggaaccacaaagcgatggaacttttaaaaaaatattaaaaaaacaaaaagattccacaaactctactaataaaacaaattgggctattagaaaaccaatgcataaagaaacagtatctggtgctgttaaaataaaaaagataaaaaagggatttagtaatattactaattatttagataagtcaaatttaattgtagataaatcaattaaaagaaaagttaagagtttattgactctttttgacaatgatttaaagaaagttagaaaatatctgaaggaaacacctcttttaattgaaggaaaagaaattactaaagcaaaagtatttgaatggtctgaaaattcaactgccactagagttgctttaaatgaaaagtttactagaaagcaacttgaatctattacagatgggggtatcataactattttagaaagacatttacagaattatattggggatgaccaaaaagagcgatttgatttagcttttaattctgatggtgttgatgcattaaacaaaaatataaaaatattaaataatggtaaaaatcattatcccatttataaagtacgtttgtatgaagaaggtagtaaatttagtattggagaaagtggtgctaaagcggctaagtttgtagaagctgccaagggaacaaacttattctttgcaatttattatgatgaagaaaagaaaaaaagagtatttgaaaccattcctttaaatgaagttatagctcatcaaaaacaaactgcatcacttccaaaagataaacgattaccaatacagccaagtaatataaaaggggactttttatttactctttctcctaatgatttggtctatgttccaacagatgaagaattagaaaataaatctttagtcgattttaataacctttctaataaacaagtttctagagtttataagatggttagttctactggtacagaatgtcattttattaataatcatatagctaaattaattaaaacctataattcaaaaaccaaaatgggtgagtttggtagtctaaataaatctgaattgtctattgatgatattaggataaaagaaaggtgtttaaaattaaatttaagtagaattggtaatgtaaaaactctatcatgataaaaagaactatctacattggtagcccatcctatttaaaactgaaacaaaagcaattactagttcaagagccagaaacaaaagaaattaaaggaactgtacctatagaagatattgctttgttaatgttagatcattatcaaataacaatttctaatcaattattgataaagttacaagggaacaatgttgctgtaattagttgtgatgagcatcatctacctttcggtatgatgttaccaatgtatggtcattcagaatattctgagagaattaaacatcaattagcagcatcagaacctttaaaaaaacaactttggaaacaaacagttgagcaaaaaataaaaaatcaaaaagcccttttagatataaataataaggtttcagagcctttagctgaatataaactacatgtgaaaagtggagacacttcaaatagagaaggtattgctgctcaattttattggaaacatttatttgagaatttttctagagagcgttacggagaagaacctaataatttattgaattttgggtacgcagttttaagaagtatcgtagctagagctttagtaagtagcggactattgcctgttttaggggtttttcatagaaataagtacaatccctattgtttagcagatgatattatggagccttatagaccttttgtagataagctagtttacaattatatagctaataacaataattatgagctaaataaagatgctaaagcaactattttaacaattgcaacacaagatgtttttattgatggagttgtaagacctctatttattgcagtttctacaacaacagctagcttgtataaatgttttacaggagagttaagacaaataaagtaccccgaactagattaataaaaatgtcatcaaaaagatataatgcttatagaattatgtgggttttagtattttttgatttaccaacagaaaccaagagagaaagaaaggttgcaggtcaatttcgtaaaaaattaattgacgatgggtttactatgtttcaattttctatttacttaagacattgtcctagtagagaaaatgctaaagtacatactaaaagagtaaaattaagtttaccaaaacatggaaaagtctgtattttagaaattacggataagcaatttggcaatatggaattatttcatggtataaaagaagttgatttacctaatcctagtcagcaattacaattattttagcttttgtcattacgaaagaggaatgattgaagtaatcttttaattgtaagtatactagtagtcgaaatataaaaaatatgtataagtctaaattatttaccataaaaacaactatttttcaatccaaaaaaagaatcccaaagtattgattttactcaatattttgggattgaccttgtgattgctcacgtaaaaatacaatttgaaatcaattcacaaccgatatgcttgtaataatcttccacactaccttgtgattgctcacgtaaaaatacaatttgaaatcaattcacaactgaatctcggttgttttgtaaaagctcgaacttgtgattgctcacgtaaaaatacaatttgaaatcaattcacaactatttttagcgtctggttcttaagattaatcttgtgattgctcacgtaaaaatacaatttgaaatcaattcacaacttttacctaccaatgcatctaactgattttcttgtgattgctcacgtaaaaatacaatttgaaatcaattcacaacagtcctgaatacatagagacaacagacgggcttgtgattgctcacgtaaaaatacaatttgaaatcaattcacaacagctccttcgtagtgaggtgctgcaggagacttgtgattgctcacgtaaaaatacaatttgaaatcaattcacaacacgttaaaccttctgtagcatacccaacttcttgtgattgctcacgtaaaaatacaatttgaaatcaattcacaacaaaggttggcttcttttaatttatctaaaacttgtgattgctcacgtaaaaatacaatttgaaatcaattcacaactatcttgtttagttactccgttgtaatgttcttgtgattgctcacgtaaaaatacaatttgaaatcaattcacaacgaacttcatatatagaatctgctaatacatcttgtgattgctcacgtaaaaatacaatttgaaatcaattcacaacggtttgttttagcataattctttgcataggcttgtgattgctcacgtaaaaatacaatttgaaatcaattcacaactagctaaggttgttcccgttttttcaatatcttgtgattgctcacgtaaaaatacaatttgaaatcaattcacaactaggcgatactacagatgttgccataacttcttgtgattgctcacgtaaaaatacaatttgaaatcaattcacaactccatctagaggaagttaatttaaataaaccttgtgattgctcacgtaaaaatacaatttgaaatcaattcacaacaagggtttacttatggtttctaaaatagaacttgtgattgctcacgtaaaaatacaatttgaaatcaattcacaactacgtttcttattaacagagctagataaaacttgtgattgctcacgtaaaaatacaatttgaaatcaattcacaacagccaacattaggcacaaatgtattattttcttgtgattgctcacgtaaaaatacaatttgaaatcaattcacaacctgtgtgtattgtatgtatcatattttttgcttgtgattgctcacgtaaaaatacaatttgaaatcaattcacaactaaatacaaaaacatatggctagtgatttacttgtgattgctcacgtaaaaatacaatttgaaatcaattcacaacccgttgttgatggtgtttgtactgctatgacttgtgattgctcacgtaaaaatacaatttgaaatcaattcacaacatccaatccgtaaaggcttttgggtacttacttgtgattgctcacgtaaaaatacaatttgaaatcaattcacaacgaggctgcttagactcataaggttctatatcttgtgattgctcacgtaaaaatacaatttgaaatcaattcacaacgcattatgatattagaggatataatgcaagcttgtgattgctcacgtaaaaatacaatttgaaatcaattcacaacctgcatctgtaaacccaaaagacaactctccttgtgattgctcacgtaaaaatacaatttgaaatcaattcacaactagctaaggttgttcccgttttttcaatatcttgtgattgctcacgtaaaaatacaatttgaaatcaattcacaacacttgcaagggttgtttattaattatagatcttgtgattgctcacgtaaatatacaatttgaaatcaattcacaacaagtcaagaagttttttttattgaatttagaaaaaagatggatagagaaataaatagtttttattttttttaataagtatattgacacaaaggcatgctattttgaatacttattataataattaatagcatttaaggtgatttgtattgttttactatgatgattaaaaaatatccaattgttttagctatgttttatcaaaacaaaaaaagccaagatataaatcttgactttccgtactatacttgtagcgagaacgggatttgaacccgtgacctcagggttatgaatcctgcgctctaaccaactgagctacctcgccattggtttgcgggtgcaaatatagacactttttatagattaccaacaactgttttaaattttttttaaatagaattattacctatattgttcacctaacaaaacaatcaatggaaaaagtaaaatttgaattagaaatacctatccacgcatcaccaagcatgctgtatcagtatatttcttcaccatctaacttacaagaatggtttgcagataaagtaaactctagaggtaaaatatttagttttgtatgggaagatacagaagagttagctgaattagtaactaaaaaggctggagaaagaatgcgttggaaatggttagagagcgaagatgatgaaagttttttcgaaattaaaattcaagtagacgctttaactaaagatgtttctttaattgttacagattttgcagatgatgaagatgaagtagaggaatctaaacaactttgggagaatcaaatagtagaattaaaacatacaattggtgcttaaaaactaattcttataaaataaataaaaccagcagtattgctggtttttttatgtttaaaatctattgatttatattatttttgcaattctaaaaataaagcaatgattaattttaacggagagttattatttaaagaaaatataaagttaactacagacaatagagggtttaaatacggagatggtatttttgaaactattaaggtagtaaacagaaaagtaattttttgggaagatcattattttaggctaatggcttctatgagaatgctacgtatgaaaatacctatgaagtttactctagagtttttagaaaaagaaattttaaaaacagtgggtgttttagatgatgcgcctagttatagagttcgtttaaatgtttttagaaaagatggtggtttatatactcctaaaacaaatgaaatagattatttaattgaagcttctacacttaataatcaaataaaagaagtctatactgtagatgtatttaaagatttttataattattctggtttgttgtctactgtaaaaacaaacaatagaatgataaatactttggctagcatttatgcaaatgaaaatgatttagataattgtgttttattaaatgaacgcaaaggagtagtagaagtaactaacggtaatatctttgttgtaaaaggtaatgtggttaaaactccagctttaacagaaggttgtattaaaggtattgttagaagtaaggttatagaaatacttactaaaaataaagattttactatagaagaaactgcgatttcacctttcgaaattcagaaagcagatgaggtttttataacaaatgcaatagtaggtatacaggcaattactaaatacaaaaagaaaacttttactgcagaattaactaataaattgcatgcaaatttaaaagttttacaaatagctggtaattaatttaaattgaagtcatctggtgcgttagcccaaagtttataattacctcctttttgaagtaatttgtttttccaaaggctttcttcgtcattagagaaaatattatcaaaatcattttctgtaacaaaccaagagttatcttttagttctgcagaaagttgatttttatcccaaccagaataacctaagaaaaaacgaatatcagattcttctaaaataccttggtttagtaaatctttaagttgattaaaatctcctccccagaaaacaccatttgcaacttctacacttttgtctaatagttgaggtattctatgcacaaaatacaaattatcttgttctacaggcccaccttggtaaatattaaaagaacagtcaatttctggtaacaaatcatttatactatactctaaaggcttatttaaaataaaacctacagaattattttctgtatgttctgttagcaatacaatagctctattaaatgaattgtcatttaatatagaaggttctgcaataagtaatctgccttttttggggttaagtttagacattcatttttttattaaatataagaatatttttaaataaaaaaaactctcttaaaaaagagagtttttattttatttaaaactgtaattcttagtttacagcatcgcttaatccagctccagctttaaattttgctacatttttagcagcaatttgaatagtttttcctgtttgagggtttctaccgcttcttgcagctctgttagatacagagaaagttccgaaaccaactaaagcaactttatcacctttctttaaagaagaagttacgttacctgtaaaagactctaaagctgctttagctgctactttagaaattcctgcgtcagcagccattgcatcgattaaatctgatttgttcataatgaattgattttaaaaattatttaatattatactttttgcttaatagcttaacaaatatagacggattgtgggcttacgcaaatgtgaggtgcataaaagtgcctttttgttaataaaaaccacctaattgttaataaaccaagtgttgtaaatcaaaaaactctacaaaccgcactaataaaggctttacaacattttagaatctgaagagaaagaatagccgtttagtaaacttttggaatccattttcttcttaccagaaagtttaatttcttctattattatatatcctttattaacagctactttcaactcttttttagttgcaataatttttccaaaagaataattgtgattttcttcttcctttttaattgcatagatttttgcagaaatctcttcatcatcatttttaatagtagaccaagctgctggaaaaggatttaaacctcttattttattataaatgttgtctaaagaatctgtccaatctatttttgtgttttcaggatttaattttggtgcagatttttcttctaaattgggttgttttgttgtgtttatttcacctttacttatataatctactgttttagaaaccaaactagcgcctaaatacattaacttatcatgtaaagtaccaacggtttctgtttcttcaacagtaatttcttcttgtaaaataatttctccagtatcaattttatcatcaataaaaaaagtagtaactcctgtttttgtttcgccattaataatagaccaatgtattggtgcagcacctctgtattctggcaataaagatgcgtgtaaattaaaagtaccaaactctggcatttgccaaactacttttggtaacattctaaaggcaactacaatttgtaagttggcatttaatgcttttaattcttgtaagaaatcttcgttttttaaatttgttggttgtagaatgtttaagttctgagaaattgcatattttttaactgcagattcatttaattttcttcctcttccagcaggtttatctggcgcagtaattacaccagcaattgtatagttgttttctactaaatgttgtaaaatggctacagcaaaatctggagttcccataaaaacgattcgcaaatctctcataattatttttttagttgaaattgattctgattattaattgttaatttattatctgctaataaagcttgcaaatgtattaaaatgtctttttcaaaagtgtttaaaagacggctaatttctttagaagataattgtttttgttcttttaaaagatgtattatttcttgcgaaatattttttgtattcctcttcttatttccaatacaaacatcgcaaataccacaagtgttttttgctttttcatcaaaataagaaagtaattgtatacttctacagactttattattggttataaagtttataaagttaattgctttctctttttttaagaataagaattgttttatttctttagaaaatctgttaatagttttatcgtcttctctaggtaataaaaaggttatagaaacatcgctattaacttggttgtattctacaaggttttgttcttctaaagtttcaaggtttttaataacttgtgtagaggtaattcctgcttttttggcaataaaaaactcgttaatttttatttcgtcttcaaacaaacctccataagttcttaaaagtgcatttataaagttttttaaagaactgttatttttagagaaatttaatattgaataatgtgtgccaataacttttaatgtagattttttgttgaagctattacttaattctattataccgtagttagataatagtttaagaattacatctgtttttaatggtttaaaattatattttttacaaaactctaaaaaattaaaagaaaatacttcttctaaaatctctccgtttgcaattctaaattgttgatataattttttgtgaacttctttaatttctataagagaaggaattgaattttctgtttgttgtttatgcagcagaatgtcgttttcattatataataatacgccaaaagatttcttttcatttctaccagctcttccagtttcttgtacatagttttctatactagaaggtaagttatagtgaataaccaaaccaacgttaggtttgtctattcccataccaaaagcatttgtagcaacaacaattggttttttttctgtcatccaatctttaaaagcagcttgtttttctataggagttaaacctgcatgataaaatgtacttttaaaattattagcatttaagaagtttgcaatttcttctgtttttcttctagaatttacataaataattgcaggaacttttgtttttttaaaaatttgaagcaacctatcaagtttatcttcaactttaaaaacctgatacgccaaattttctctataaaaagactttttataagttgtatgatttgtaagttgtaaattgttagaaatatctgctaaaactttcttgtttgcagttgcagttaaagctataaaagtaactgttggtaatatttcttttaagattttaatatttctgtaagaaggtctaaaatcatggccccattcagaaatacaatgtgcttcatctatggcaactaaatttacatttagttcttttaatttttgttgaattaaactagactgtaatctttctggtgaaatatataagaacttaactttaccaaatttaatatggtcgaataaggttacaatttcatctggactgctgccagaaggaattgtaagtgctttaatatctcttttttttagattttctacttgatcttgcattaaagcaattaaaggagaaattacaatacaaacgccttcttttactaatgcaggaacttgaaaacatatagattttcctccaccagttggcaataacgcaatggtatctgtgttttctaaaacactggtaattatttctttttgcggttctctaaatgaggtaaaaccccaatatttttctaatattttttccggtaaaaatatcattcgctagacagcgaattaataataaagcttgtgcgttcttctacagaaccaaaaggaacgcttattaactcgtaacctaactcagagtaagcttcaattaaaaagccatcaatttttacagattcttcaaaagattcataacgttcattgtctgtggtatgaatttcttcccaaggagaaaaatgaaaaattttagtatatttataagagttacttttttcaacaaaataagaaggatatgttgttttaaaataattcatgtaagcatgcacatctggtattcctctatcgaaaaaaacaattttttcatctaagtctcttgccttattgtattgttcttctctgccttctaaaagcattttactaaacaataaaggctctgttaaaaaaagctgttctatgccttctttttttgctttaagtgtaacttctctagatacttctggcatacaaaagtaacctctttttacaagttcatttataatagttgttttcccagttccagggcctccaataagaacaattttctgctgcattttacaaaaataaatcattccctttataaaactaatttttaatgtaattttgtgcatttctattttaaaataattaactattattatgagtgataaagacgaattttataacaaactaaaagttcagttagacgatacaacagattttcctgcagattatttgtataaatttattgtgcctacaactgaaaatcaggtagaagaggtagaaaatatttttgataacacaggtgctgttataaataccaagaagtctaaaacgggtaaatatattagtgtttctatagttttaaaagtaaaaaactcagatcaaattattgcatattataaaaaagcagaga

SEQ ID NO: 1072 - DNA, 24623 bp, synthetic construct
  source 1..24623: mol_type = other DNA
  misc_feature 1..24623: note = Synthetic
aggatccatatgctgtggtacgtacaattgggtaggggaaatagcgtaaaaggtctttcccaatttccggtggaatttacccataaaatggcccacatttttcgaaacgctcccgaaggtttgggggttggtcgagccattcggtttgcccaagccatggggtatggcgcctctaaagacacggccttagccctttgcaatacctttttgggacagtttttggatgaaaatgaagctttttggagcgaggtaatccttttttttgccaaagaagacaaactaatcgcccgcgaaatgtgccttatgcttgactatttggccgaacacccaacaacacggctaaaaggcactacataccgtaggctgcataagcaaagtagggcctggaaaaagcaacgcaatctcttggcccaaagtggtgcggactggcagggatccggtattagaccgctgcaacacgaaacggagcttgatggtagtcccgtaacctaccagaccctagagctacagcatgttgcggccctttatgaagaaggggatattatgcagcactgtgttgccgaatacgaagcggaatgcaaaagcggtgaaagcgccattttctctttgcaaaggaaaggccaaaatggagaaaccaagcgattggccacggttgaagtagccttgccccaaaaggagctggttcagatccagggtaggtttaacaccgaccctacggccgagaccctagcaatgatcgatcaatggatggttcaatcgcagctacaatggcccgaagacaggacgatggatgcggccttaacccaccctttggaagaagggggcatagagaggccaatggacacaaacggaaccggagaagccttgatcgctataatcaaggtagttttttggatcctttacttccttttcaggatgtcacaaacataaaaacggagatgggtcatgaaaatgatccatctcctaaaaatgaaatcaaatgggaaaaaaattaagtggaaaagacctgataaaattgggctttcctaaaaacaatagtatcaacataaccttaggtcagatcaaccgctatcataaaagaaaaaagaaaaatcaaatactagcggaagccaaggaagttttactgaacccagcccaatacaaagaagatggtgtttggggtaaaattgccgaaagtttacttgatccggtggtggtaaaaaagcaacagctaaacccggttcgggcaccttttcacatttttggtgaaaacgagatcgagccccaagccatataccaattgtacgatgcactgaaactacccgtttcggttgcaggggccttaatgcccgatgcacatagtggctatggcttacccattggaggtgttttggccaccaaaaatgccgtaataccttatggggttggggtagacattgggtgtcggatgtgtttaacggtatatcctatcccaatctcctacctggaaggtaaaaaacagcaatggtccaactttttggccgaacataccaaattcggaatgcgggaaacccatgccataaaacatgaccaccccattttcgaaagggaagaattcaaaaccattcctttggtaaaacggctaaaagacaaagcctataaacagttgggcacctcgggtggtggcaaccatttcgtagaattcggtaaggtgagtattaccgacacccaaaacgaatggggcctagacccgggagactatgtaggtatattatcgcatagtggatctcggggcttaggggcacaaattgccaaacactatacctatttggcaagcaagcaatgtccgctaccccaaaaagtacagcatttggcttggttagatctaaacacccacgatggccaagaatattggttagccatgaatttagccggcgattatgccaaagcctgtcatgacgatatacatgcccgtttgtcaaaactaatcggttctaagccactggttaccatagaaaaccatcacaattttgcttggaaacaagaagtgaacgggcaagaatgtatcgtgcaccgaaaaggggctacccctgctgccaaaggagaattgggtataattccgggttccatgacggccccgggttatatcgttcacggattgggtaatgaacgctcgctaaactcggcctcacacggggccggccgactattgtcgcgtagaaagtgtaaggaaaccttaacccatagtgcctttaaaaaacaactcgaggtgcatggggtaagcttaatcggtggcggtattgacgaggcaccaatggcctataaggatattaccaaagtaatggccaaccaacagaatctagtggaggtcattggcagctttacacccaaattagtccgtatggaccattaaaacagatgccggatgatgttgatagcagcttatccggcatctttatttaagaacaatgaaaacaaaaatcatacaaattaccgcaggccgaggccctgaggaatgttgttgggtagtggcccaagtcgtaaaacattttaatcaaaatctaaaggatgccggtatcactgcacatcttttacatagggtttccggcaatgaaaatggagccttacgatcggttacccttcaattacaggggaatgaattagatacttttttgagtacatggttaggtaccatacaatggataggaaaatcgaactatagaaaattccacaaacgaaagaattggtttattggcattttcgaaatcgaaagtaatccgccaatccgattaaccttggatcaaataaggtatcaagccatacggagttccggtccgggtgggcaacatgccaacaaggtaagttcggcggtgcgtgccacccacctcaaaaccgggcaaagcgttttggtatcggacaccaggtcacaacatcaaaacaaaaaaatagccctggaacgattacaaaacaagctcaacctgtaccaaaacgaaatgttgaaaagccaggctcaaaatcaatgggagaaccatctcgatctagcgcgggggaatccgatccgggtttttaccggaaccgattttaaggccattaaaaagaaaaaaagctataaagcaaaacgacggcaacttaaacatgaattgcgtagatcaaatgatcggtattccgaataacacgcattaaaggggccactaacataataaatgacccacaatttggaaaaaccctgaaaatcaacccatatttgcacctgaaatgaaaaatactagagtacataacaaacctggagcactgtttagtcagtgtgactattgccatttaaaggaattattatggcggaagggacgtaatgtgtctagtgtaaatgggtttatctcttgacttaaaaccatcttgacacaacataaaagcgtccaatgagaattgggcgctttttttattggctccgccaaaagggtttattgccttaaggcatacctcgtgtcctgatttcgatagctaatggaactatcgggatagtaccggggtagtttactgaaaattctaaatatatgagtgaaatataaaaatacatactaaggatagttgataccggaaaccattgtacatcaatcgattgcaaacgggtcgggaatctgcataaagcggaccgccccactatggtctaaattcaacttaaatatctgattttcagtattttatattcgttttttcttgtataattaaaaataggtttcatatttgcaccgtcgaaaacgaacagaagttatccctatgataacttcattcaagtaaagacaaaaacgaaaaccaatccctatgctggcctgcctatcggccacttaggaatattgaaaaattaaaaacgaagcgatgctattattcagtagttattttaaaagccaattgatcgaaagcgggtcaatagctatgcttcggttctttccataaagggctacacctttactaaagatccgaagcaccaaaaccaagtgtttcggatttttttgtttcccctaggggttctccttaaaaaatccaacaaaaccacatgctgggccatttgcctgttggcatgtacaagaagaatgtaatggaaagaacaaattataataggtatgtattcaaggctttggaagcctatccgtatgaattggcagaaaccatggaagccttgaactatgccctttcttacgataccgacaacgtaaaggcgctatgtttcatgggcaaggtttatgcagagcagttaggcgattacgaaatggccaaaagctattttgaacaagctttggaaaacggacttgagatgccctatatctatccggactatatcgctaccctgatattgaacgaagatttgatagaggcccaaaaagtattggaatacgcccgaaaggtaaaaggtagcaataaggcggtattgtacaatttgcagagttggctattcgagcaatggcgccaatacaaaatggcgataaaggccatggagcaggtaaaagtgcacgctacaatgccgattaccaagactatgccgagcgggaaattgtccgtattaagaagaagttgcccaaaaagggcaagaaggggaaaaaccgcccctaattggggcggtattatgggtgtgcaccgaagttggagggtcggggcggactgtaaatccgttgtcttagaccgagtaggttcgaatcttaccactcccaccataacattttacccaggagggtaggcaaatagtggttggttgcgcccgcctgctaagcgggtctatcgaaaggtagtgaaggttcgattcctttaccctccgcatattaaaatatcaagctggtcttgttgggtgtttcggtatggcaccattgtatggtttcctgccctagggtatcggatttctatatacaactagacttgaaggtttaggtctttttccaaaaaaaggtcgaggatctatgggtcgtgggtttcctgcccgtccggcaggcggggaatcccactcttgctttggcaaggtagcttagtggttagagcaatagatgtagttgttacgggttcgagtcccgttcccagttctgggatagctcaataggtagagcactacccttttacggtaggatatggacttaaaatccattttcccaagccgaccatcttgtaaacctggtcaccaacgcccccaggggcaaaacatgataagaaaccgtagttccatttcggtggttttcttccaatcgcagaaaacgacagtcttgaaactaccttgaaatattgaacttttgatgtaacggagcatttcgtggcccgtcatccctccttttggaaaactgatccatatgttatcagcgacccttgaggaagcatggctcaacacggatgccaactagacgcaaaaacctgtatttccgtatcggatagatgatatgcaaccacggtttcttttgtatggaaagtaattagattaatgaataaagtgtaacccgttcgtccgtaaaacaaaggacggacacaaattttatgtgatgaaaagagtacggatcaacgccggaaaagtaggattggtctttaaaaatggtgattaccgaaaggtacttacccaagggaaccattgggtaggtcttggcgccatagtccatacctacgatatgaccatatcctttacccctccaatcgccttggatatactattggaggatgaacgattgtttaatatgttgcaccttattgaggtaaaagatggcgaaatctgtttggtctccaccaacggaaaactacgtcatttacttaccgcttctagatatgccttctggaaaggtctattggatttcgatttcgtaaagcttaatctaaatgagctcgaagtaccaaagtccatcgataaggcgctattggcacacgtttctttgcgcccttacatacgtacttttgaggttgccgcctttgaaaaaggggtactcttggtagatgatgtttatgtaaaaacacttgatagtggtacctaccatttttggaaaaacaataccaccattaaagtgctcaaggtagacatgcgtcaactacaattggagatctcgggtcaggaattgttgaccaaagacaaggccgctatccgtatcaacttctatacacagtataaagtaattgatatagaacgggcccttttggacaacaaagactatgaaaaacagttgtacatcgccatgcaattggttttgagggcctatattggcacctataccctagatgagcttttagagcgaaaggaaagcattgcggaagccgttttttcagatatcgaaaccacagcaacccaattgggagttagggtattgaactgtggtatccgagatgtgatcctaactggggaaatgaaagatatcatgaaccaggtgttggtggcccaaaaacgggcccaggccaacattattacccgtagggaagaaaccgcctctacccgaagtttgttgaacaccgccaaactgatggaagagaacgccatgctctataccctaaaggagatggaatacgtagaaaagatcgccgataagatcggtgagatctccgtctccggcaacgggggtttggtaaaacagctaaaagaaattttcgctgtatccaaatagggtataatcctgctagatgggggtcgggacacttacttcttaagaagtgagggtctcggcctttttttttggcgttacatcgattttgaagcaaagaaaagccccggcgtttgccggggctttttgtggtcccacttgggctcgaaccataaatatatttgcctgatttagtgcgtgttacaggcgatagattttaactactcaccgaataatacaccaaaaacaatacagggttgaaaatgaacgtattagatatcaaatatcgtgaaaaaaaaataaacccagcttctcgcctctcttcctaataattaagggtcaaccttcttatagaatctactacaaattgcgacctattaatcaactgaatgtaagcgagcgaaacatagtttcgtgctgcaagcgtcccaaatcttaccaaagactaatactactgcgcgaggcaatacataatacactattggaaccttcggctaaggtaaccccctacctttgaaaatttccttcaagacctcacatgggtctacaccaatggccaaggaaatcaaatacagctcctccgccctcaaatgcgtccttggattggcactcagttgactgatcctggatttactgatcctggtccttctggccacctcggccttgtttatggatctcttggcaagatacaatcctagttcggtcattttgaaagtataatatttgtatacataaatatagtttttaaacacgttcatgttaattatctacaccaatcagctgattttgaatattttttctatacttttgtgtagaatatctacacatatgaataggatcaatcaccatatgggctttccactaccgggttattatagggcccatggtaacgccgtccactgggccacaccatccgaaatacaacaactcacgggactacgaagactcgataggatattcacaaggacagtcacaatgaaaacaggtacccgaacgaccgaattgctccttatcatggatacggacatcagggacattgccgaacgggtaataccacaaatacgggatatcctcaatgataatggtcaggtatcctttaatgtcctttcctcttcctatgtaaaggaacaactaagggagggcaatctataccttttacataattgcctaccagaacaactattctatcgtaatgaaagtaatgatcaccgttgggaatatcccactatagggaaagccatcctttcaaaggaggtcgtcaaaacgttcgagcatgaaatgaacaaaataaccgcttacaaaaaaggcgcggtctttttccagaggaaccagttattggatcaagccgtctttatggcccatcaatccttcgaacagggctaccgcttattggaacatctggtttttgggaagatcaaagtctgccacagcatcgaaaaacaccaagcctacgtccaacggaagatgcctaacctaaaagggaccttcgacatcaaggacaaatgggaatacgcccttttaaggacacttgacagctcatactcggactcccggtattccaaaggccttaggaccaacctaggggaactggatacgatactccaaaaactaagggtgttcatagaagagatcaaaggaaacttcgacagtgccttgacggcatttatgggcaatgaaagggggcagggaaaaagtaacacaaaaaccaacatggatatggagacgaaaaacaaaaacgaggacacagatcggttattggaacaaatccaaaaaatgacccaagatgactttgtacttttaaaacctattggaggtaaggtacgggggtcttatctgaacgaggcctatgtatatggctataagcaattgttcgatatccttcgttccactttgaacgtctgcatcctggcattggacgaacagatagatctaaccttggccataaagagaaaggaattcgacgttcagaaagtccttgaattcgccaagaacctgatcccaatggaagagggggactatctggacaagatgcgggaactcctaccggacacaaaagaatagcttgttaacaaatcggtaccgtatcgatttaaaccaaacgacctatgggacatcccaaaaccaatatcgaaaaagccctaagtaccttagaggatattggaaaactggtatccacaccaattccccaggctactggacatgaaaaccacaacctccagatcccgataacggtcagggacaattccgaactgttgtatcttatttcgtcacttttaaaaacggtggtcgtggccagtagatcgaccgaaggtctttactccccttctttggaaagccacgggacggaagcccctcttacgaccgttctggaattggccatccaattactccccgatcaacaaatggaaagccttgatcaaatcaaaaaactacttttcgatcttgaattgtaacaattcatagtaggcggaatagggcgtaacgaccgtattgttacaatccataggattttaaggatacgcccgacccttcctagacctcctgttttcaagggaaactggacaaaatcacaccaatattgccgccttggcgcattaccgtcttgctattccatttatcgcaacattctaaacaaaaaagacactataaaaaggttccttgcatgaaaattaaaccccttttggttcaaatgacgaaaagagagaaataaagcataggaaatatcctagttggactttttattgtttgagtttcattggtgtttctacaaagaatattaaactcatcttgcgattatcaaaaggctaatatcataaaccaatagtgggggctagataatactgatgattaaaatatccatcattccaatatttgaacggtttattgggcccattcaccatattggcagtattgggtttctttaaaacgattacagccctaggtttggtttttttgaaatatagtcgtccccatttcatgcttaacatctaaatacgccgtaccgaatggaaaataaagtccataccaaacccaaaatggatcttggtaaatatcccttccccaacggtaaaacctgaaatgatgtttgtaagtatctttttagcaaagatattgaggcaaatatgcttacaacagttaggtaataaataaaaaacatgaagaaaaacgatttgtttagaaaaagaaaagcgacccagaagggccgctttaaatgttctcacaacggaataatccttattgtgaattgctttcagtaagggataaagataaaaaaataatagaagacaatcttacagaattccgtagtttttacacgttttagttacgtatttttataggtcataagcctatgggccaaaccattcaattggtgtaaaaaacatttcattgaacaaaccaatacccatttatataacaaagtatcattaccgtagggaaccaaatactagatcatgaaaaaaatattgggattagaccttggcaccaactccattgggtgggcattggttaaaaacaactttgataaaaaagaagggaaaattattgatagcggtgtgcggattatccctatggacaaaggcacaatggacagttttggttctgggcaatccatttcccaaacggccgacagaaccggttaccgaggaacgaggagactctaccaaagaagtaacctgagaagagaacgcctgcaccggatacttaatatattgggctttttacccgaacattatgccgatagtatagattttgaaaagtatttagggcagtttaagaaagggcaagaaataaaacttaattacaaacctaatcctgtcggtaatgacgaatttgtttttcaagattcctttttagaaatggtaaccgagtttaagaaagaacaacctaccctattttaccaaaaagaaaacggagaagaaaccaaaattccttgcgactggactatttattatctacgtaaaaaggcgttaacgcaagaaatagaaaaaaaagaactcgcttggttattacttaattttaatcataaacgagggtactatcaactgcgaggcgaagaggaagaaaacacaagcaaattagaagaattttacgccttaaaaatagttaatattgaagcgaccgaagataaaaattccaaaggaacttggtacaatgtgaacttagaaaacggatttatttatagaagacaaagcaaagaatcccttgaaaactgggttggaaaaaccaaagagtttattgtaacaaccctattagaaaaaaatggagaagtaaaactggataaagagggaaaccctaaaagaagttttagagcggttgattcagagaaagactggattgccattaaaaagaaaacggaaaacgacatctacaactccaacaaaactgttggcagctttatctacgataccttattacaaaacccaactcaaaaaataaacggtaagttagtaaaaaccattgaacggaagttttataaagaggaattgcaacaaattcttgaaacacaaataaaacaccaccctgagttaagagacaaaaacctctacgaaaagtgtgttcaggagctttacccaagaaatgaggcacaccaaaacaacatcttgaacaaagatgaaaatgaaatgtttcgctacttgtttatggacgatattatcttttaccagcgtccgttaaaaagcaaaaaatcaactctttctacgtgtccctttgaaacgagaacctttataaaagacaacgaaaaggtagagcaaggtttaaaagtcatatccaaatcaaatccgtattacatcgagttcaggctttggcagtttatccataacctaaaaatctataaaattgaagatgaaaaagatatcgatgttacccaacaacttttggaaaacgaaaatgacattaccgatctgttcgactttttgaacgataaaaaagaagtagagcaaaagcatgttatcagttattttcctgctttaaaaaagttgaccaaaaaagaaaaagaagcttaccgctggaattatgttgaggacaaaaaatatcctataaacctaacccgaaatcagcttctgaataggctaaacaaagttgaaaaccttgacctttctcaatttttgaacaaagatattgaactacaactttggcatatcatctattctgtaaaggataaaaatgagtttgaaaccgcattgggcacctttgctaaaaagcaccaattagaccaaacaagttttaaagaagcatttaagaagcatccgccctatgcttcggattatggtgcatattccgaaaaagcgattaagaaattattaccactaatgcggaggggtaaatattggtcggaaaatgccattgccgatacaaccaaacaatttgttgccgacatctatgagcgaatcgcacatataaaagccgaaactattgatgatgggaagttaaaccaagccattgccttagttgctgatgatgctattcccaagcagttcatcaaaagtttcttaaaacataaattagataatcctttaacagggctgaatacttatcaagtttgttatgcggtgtatcaacgccactcagaaccctcggttataacccaatggaaaacacccaaagatattaatgcttatttggacagctttaagcagcatagtctcagaaacccaatagtagaacaggttgtgctagaaaccttacgaacggtaagggatatttggaattatcatttaaagcaagaccctagttttaaattcgatgagattcatttggaactaggtcgggatatgaaaaactcagcagataaacgtaaaagaatatccgaccaacaaaaccaaaatgaaaataccaataaccgtatcaaacttttgttggaagaaatgcaaaacgagggtgctcgttctttttcgcccagtcatcaggaaattttaaagatttacgaagaaggtatagctcaaaaccctgaagtttcttacaaggatgtaaaagaagatgaagtagaaaaaattcgtaaaaatgcaaagccatctacaagtgatattaaaaagtataagctgtggctagaacaaggttatatttctccctacactggcaaacctatttcattaagcagattatttacccatgaatatgagatagaacacattataccacaatctcgttattttgatgattctttgagcaataagattgtttgtgaagcagacatcaatagagataaaagcaataaaacggcctatgaatacctaaaagccaaaggagggagtattgttgagggggcaaggcttttaagtcttagtgaatacgaaagtcattgcaataagtattttaagaaaaaccgaactaaactgagaaacctgttgagcgaagaagtacctgaaggctttatcaaccgtcaattaaacgatagccgatacattagtaaattggtaaaggggctgctgagtaatattgtgagagatattgatgaaaaagaattgacttccaaacatttagtcccagtttccggagccattacctctaaactaaaacaagattggggcttacacgaacaatggaacaaaattatccagcctcgatttgagcgattaaatgagttaaccaactctaatgaatatggctatttaggctatcaaaaagataaagacggaaaacctgttggtaaacagttcttcagattggtcgctccacaaggtgttagtaaaaaacgtatagaccaccgccaccataccttagatgccatggttattgcttgttgtacaagaaagcatatccaatacctaaactcattaagtaacgaaaaagaaaagtacaacctccaaccatcgttaatgataaaaaatgaacaaggtgattttaccaaaatctttattaaaccttggcaaaactttaccatagatatacgaagtgctttagaaactactcccataagttttaagaaaaatacccgggtaattactaaaaccaacaataaaacctggcaatgggtaaaagatgaaaatggaaaattaaaaaagaagctagttgcccagaccaaaggtgatagcagggcaattagaaaacctttacacaaagagaccgtttatggcttggttaaaataaagcaaaggaaaaagggacttgccagtttgaaaaattacctcgaacaacctgaattgattatcgaaaaatcggtcagagaaaaagttaaagcactaaacaagttgtttgataaggataaaaagaaaatcctcaagcacttaaaagataaccctattctacagaagggtagcattgtagataagattaaagtttgggaatggacaagcaatgctacggcctcaagagtgaaattgtccgataagtttacccgtaaacaattagaatcgattactgatagtggcattcaaataattttagagaaccacataaaaaactaccttgacgaaaaagataaagagcgatttgatctggcttttaatcccgaaggagttgaacaactaaacaaaaatattgttcaactcaataatggcaaaaaacaccaccccatttattcggttagggtttatgaagagggtagccgatttggggtttcaaaagatgaaagaaataaaaacaaaaccaagaaatatgtagaagcagccaaaagcaccaacctattctttgccatttattggaatgaagaaaaacaagagcgtgtgtatgaaaccatacctttaaatgatgtaatagaatggcaaaaagcacgtgccaaaaacaaaacctttgatgagcctatgattccaataaacgcagaaaaaggccggtttttattctcgctatcccctaacgatttggtgtacgtacccaccgaggcggaacaggaaaatcctaattcggtcgattttaccaacccaaataaagagcagatgggcagggtctataagatggtcagttcaagcggaaatcagtgtttctttatacaacatcaagtttcgggaatgatagaaagtaaaaaagagttttctgcgcttaataaaatggaaaaatcaataaaaaatattatgataaaatccatttgctggaaactaaaagtggatcggttggggcatattgaaagcatggtaaaatgattaaacgcaccctgtttttcggcaaccccgcctacttgagcacccgtaacgagcaattggtggtacgctaccccaatgacgagatgcccgaaaaaaccatacctatagaagatttgggttttgtagtactcgagaatccccaaataacccttacccatggcttgctcatgaagctggtacagaataaaacggccgttattacctgtgaccggcaacatttgccctgtggttatttacagcctcttgtgggccatagcgaacagaccgaacgtatgcgttaccaactcaatgccagtcagccccttaaaaaacaactgtggcagcaaaccgtaatggccaaaatagaaaaccaggcccaacatttactcctaaggcaaaaaaacgccctaaaactaaaacgttgggccaaagtggtaaagagtggcgatgccgaaaaccacgaggccatcgcggctgcttattattttcagcatttgtttaacggtatcgaagatttttcgcgaaaccaaaaaggggtggcacccaaccaactgctcaattatggttatgccatcttacgggcggtctgtgcccgtgccctatgtggtagtggacttttaccttctgtaggtattttccatcgtaacaaatacaatgccttttgtttggccgacgatattatggaaccctaccgtccctttgtagattttttggtatacgatatcgcggccagtggttgtaccctagagcccatgaatacccgactgaaatcggaattgttgcgcttaccggccctagatgtgtacatagatggcaaacaaagcccgcttatggtggctatgagccgtaccaccaatagcgtattcgattgttttttaggaagttcccgcaaaatattatatcccgaaatacgttaaattaatgcgcaataaccaaaaccatgttttcccgtttaaaccagtaccggaccatgtgggtacttgtattttttgacctgccgaccgacaccaaaacccaccgtaaagcggccgcccgttttagaaaagaccttttggacgatggctttgccatgttccaattctccatctatatgcggcattgcccgagtaaggagaatgccttggttcacataaagcggaccaaacgagcgctacccaaacatggtaaggttggcattatgcagatcaccgacaagcaatttggtatgatcgagctgttcataggtcaaaaggagaccctgcccgaaaccccaagccaacaattggaattgttttaggattggaaaaacactggtggccatcagaaaaccttttacggacgcgctttattttttaatcctacggagacgcataaaaaacaggataccaggtttttatggcaggtatcctgtgaatcatccataaaattatagaactgaaagcaattcacaactcctgcttccgtcgtagttcgttgcgtgacctgtgaatcatccataaaattatagaactgaaagcaattcacaactgtttttcggtctcgaccataaatggtacccctgtgaatcatccataaaattatagaactgaaagcaattcacaactagccaattcaaagtctaaagtgtacgagtcctgtgaatcatccataaaattatagaactgaaagcaattcacaactagatggacttcactaagaaacaacgacacctgtgaatcatccataaaattatagaactgaaagcaattcacaactatccttggcccacatggacaaactaatgcctgtgaatcatccataaaattatagaactgaaagcaattcacaacgtagtctcttttttgctgaaattacgcgctcctgtgaatcatccataaaattatagaactgaaagcaattcacaacttgccgggatggcacttgaaaaaataatgccctgtgaatcatccataaaattatagaactgaaagcaattcacaacagtatgcggtagacacggttggttcacaacctgtgaatcatccataaaattatagaactgaaagcaattcacaaccaagggaggttgccgaatgatacaattgacctgtgaatcatccataaaattatagaactgaaagcaattcacaacggttcagccgcttggaatacatttaacgacctgtgaatcatccataaaattatagaactgaaagcaattcacaactactgtttaaaattgcctgctgcagaatggcctgtgaatcatccataaaattatagaactgaaagcaattcacaacatcgaaccgaaacgggcataggtcgggtcacctgtgaatcatccataaaattatagaactgaaagctattcacaacgaaaggtactatgaagaaaacccaccacctcctgtgaatcatccataaaattatagaactgaaagcaattcacaactcaaatactctttgtccgccatctggtggacctgtgaatcatccataaaactatagaactgaaagcaattcacaacggtaaaacgctctttttttagcggcacttgcctgtgaatcatccataaaattatagaactgaaagcaattcatcaattattttcaattaagcgattcgtctcgctataaattttcatcgaaaagaaaatcaactaattgattatctgcaagtacatcctcgaaagccaaataaatagaccttcccttccaaaacatgtcatacattcgttaacacacccgaaaagaatgtataataaaaactggtatcctaaaatctagtaaaacattgccttacatactggataatgaaatacttctataaggccaattgaagaaagacttcaaaattacctttcgatggtctaactatgttggtaacctttctaaaataaatatctgaatttcatactttcctatttttaggaagggcatagctgcctacgtgtatctcataatggttgtataacatattaatgcaatgaacagcgaagatgaacaaagtccaagctatactattctagaaaacatagagtttaaaatgacatgcatgacagtattggcataggctcaacattaccttaattcttcatcaaacattggcgataaaatatagtccaaaaaataatcaataaatgattgaatacaattacagttacattttccatttgactcttttttatgaatgaaccaacccttaatgccatatctaaattgactcgtacctagaaataacctgttccatatccttaaacaactttttgtcgagtaccttagcatatatttgagtagttctaatagattggtgtcctagcatcttactcacagattctatggggactccgttggctaaagtcactgttgtagcaaatgtgtgacgagataaatggaaagtaacccgtttgtttatctgacagagggttgaaatttcctttaaatatttatttagcttttgattactatatacaggaagtaagcagacgttttcatgtttagatgtgtatccactgtatttttccaatatccgttctgctagaggtaagagcggtatggtacttttgactttggttttagttcttaaaatcgttatccattttttaccattcaaaccaaatacaatattacacaatgtcaatttttttacatctatataggaaagacctgtaaaacagcaaaaaacaaaaatgtcccttgtccggtttaaacgttctagcttaaactcagttttaattagtacttgtaattctctttcggtaagcacttcacgttccgttttaacccattttgctttccaatgaaaaaaagggtcagtacttatccaattgttggcaaaggcaacccgaactatttttttaaaattggtaacatactttgtaatggtattatgtcctccagcgccattttttctaagaaaaatatcgaatcggttaatgaatgctaaatccacatcttgtacaaaataatcgattttaccaaactctttttgaatgaatcttgataaatggtttcgagttcgaatatgacgcctatatgtaccataggtaaaatcttttcctaacaactcccgaacattagaattgtgctcatcataaatattcaataccgtttttgaatcagcacctttattgacaagacagctttttatagtagaagctgtgtagggttgtcctttgatcacgaaatcaccctgaaattgacgtactctgacctttagttcgtctatataatcattgatttctttagatactagtcctttttcttttatttttccagaaattggacaccaagtttttggatttacttttcttttcagacttagttcagctctttttccatctacggtaattcttagaaaaagagtagcttttccatttttatccaaatcgctaatccttgggtagaacagtaaagaaaatgaattgtttgctttcattatggctttttaagggttataatttatttaaacgcctcattttaacagctgtattacagctatttaacattgccaggcaaacacttttgtggacatgaaatcactcaccgatttactcaccaaagtggttgattttaaatggtattatatgaaatcacataaaacaaaaaagcctgaaaacaattcattttcaggcttttaaaggaatgttgaaatttctcagtggtcccacttgggctcgaaccaaggaccccctgattatgagcagattcaataatcaaaaaaacaaaacaaaacaagacacaataaattgaatatcaattgtttagtgaattttgattttaaatgaattgatatgaaatcaaagaaatgtttgcaaattgtttgcaaattttttctctaacttagggaatatgaacacactgataaccctaatgttagacaaaagaaggatgaaaaaagatgggaaatatcccattatttttcgacttacccataatagaaaaaccacctctatgtccaccggattttctattcttgaaatatactgggaggagcgaagaagtgaagtaaaatccagttataaagaagtagaatccgtaaggttacttaatcatttactgctgaaagaaaaagcaagggtgagtaatatcataaacaaactctatgaaaaaggggagctgcaatacctatcccttcaacaagtcaaacagtttattacccgaaggaaaaattacgactcgtttttagaatacggtaaatatctggtgggtgagttaaaagcagtaaatcgatttggcacagctcgttcttatgatggtacggtaaaaattcttaaaacctttgtaaaaggtaaagacctgaaatttaatgaggttaactatgattttctactaaagtttgagaagttccatttaagaaaagaaggaaataacctcaatggtttggctgcatacatgcgtaccattagagccatattcaacaagggcatcaaagagggatttattgaaaaagaggcctatccattttataactacaaaatcaaaaccacccctactaaaaagagagctttagatattacttttcttaagcggattatggaattggatatcactgcagaacataagttgttccatactcgaaactactttttgatttcttatatgctctatggtattccatttatggatatggcatatttaaaactagaaaacataaaaaatggccgcattgtatatcagagaaagaaaacctcaaaaagttatgatataaaaatctctgaacagttgtatcaaatcctattgttctatcttaaagggaagtccaaacgagattacatcttccctatcattctaagggaaaccccagtccaaaagtatgaggatgtcattaggttaaggaagaaatataactatgagcttaaagatttggctgttttatgcggcatagaccaatctttaacatcatatgtatcacgacatagttttgcaaccaatgccatgttaaacgacatacccatacaagccatttctgccatgctagggcattcaaaactcaataccacacaaatctacttaaaaaccctaccaaatgagattttggataaatacaatgaaaggttaagcctttccttgtaatactttaaacttggcagactcaaccacctttgttatttctcacagttaattatttacctgtcctaatatttaaaacaacgcacacccatttgcacactaaaacaattaaaaaaatgaagatatgaattaagccctcttaatctcataaatttcagagcaatgttcttttactagatatggagatggaattcgaaattctctttaaaatggcatgtatgacccctcaagagccagtttattaccgtaccatcaataaaacaactaacttctttgcgtaaaattccgaaaagtctgtttcaataacgtatcagtgattaaattcgaatcaggataaagaataggaacatggacttcacaattttagagatagcagcgatatttatactatttatatctcttttgttggccacgtttttgcttactgtcaaaacttctaacaaaaaagcgaatacacttttaggtgtctattttatagtttttgcaattcacattagtgttttcttttattcaaaatttgtaaccttacccccagtcttagaaatgctccgtgaccatatagcgttctttacgagcccactattgtttttatatgttgtttcctcgatatactcagatttcaaactaaaacctatacatcttctacactttgcaccatttctaatacaagtattaatcttttctccaaggttttatttttcagattccagtactaaaaactatttgctgaaaaatttaaatgatacccccgaaggacaattatcaatagtgtttggtttgtctatttctcttttttatttggcaggtacattattggaattacgaaagtaccgaaaggtattgctggaaaatttttcaaacaaatccaattttaactataaatggctttttcaactatttatcttactgagcactatatttagtttttcattttttaaacaggtttacaaattattcggaacggatgttgaaattctaaatgcttcaagattaatacttagtctggttttaatcggttttctgacttggatagttttgaaaggaatgtataatccacaattgtttagaaatatcaattcaaatcatttgataataagcaattcttcttccaaaaaaatagtggatgtatacatacaagaaaatctgcaaaaattactggcattcatgcaagatgaagaaccttttctggactcctcattaacactacagaaattggctaaaaaattagaaatgcctaagcgtgatatttcagaattgattaaccttaatatgaatcaacactttttcgattttgtcaatcaatatagaattcacaaagcacagaagatattggccaattcaaaagaagataatttgacgattcaacaaattatgtatgacgtaggattcaattctaaatcttccttctacacaacctttaaaaagaaaacgggtatgacaccttctgaatacagaaaaagaaaacgtcaaagtttatagacagttcaaaaaaaggttcgactttgtgtattcaaacctttcttttcaattacatgttttcatttgtcatggaattaaatctatttcaatatgaaagctttatcaacactactctccctatttttaatcagttcaatttgttattctcaaaagaaaaacgaaaataaagtaatagttaacagtcgcaattctgtcgaaatttatagtaatgttttaagcgcagagattaaacaaatcatagataaaaacgccgaaaaagcattaaaagatcctttaattaattcgttatccattggactatatgtaaataatgtatcatataattttaattatggggaattaacaaaaggaaaaggagatacaccaacacctaacaccatatatgaaatcgcctcgataacaaaaaccttcgtaggcaccttagcagcaaaagccgttttagaaggaaaactaaatttagaggatgacataagaaaatacctgcctggactatatccaaatttagaacacaacggaaacccgataagaataaagcacttgttaacgcacactagtgggatgccaagtggaattttgggagcgaatgaaactttaataaatctcgacgagattaagtttaacgaagcatatacaagtcttgaaaacaagcaaaccaaaactaagtttctatatgaattgtcaaaacttaaaatcaccgataagccgggtgcaaattttaattattcaaactcgggtacaaatttgatgggttatattttggaattggtttatatgaaaccctttcaagaattaatactagatgaaattgtttcaaaagcaaaaatgaatgagacctattttcatgtacccatcgaaaaagaaaataaccttgcaaatggatacctgctaaacaaacctatgccaaaatcaaaccttgcaattaccctttggggtgccgagggtgctttaaaaaccacaacagccgatatgctgaaatatatccattatcagttcaaaaacagtaaaataatcaaggaatcgcacaaaaaaatatttgaaattgacactgattattggataggatactactggtggataataagcaaccaaaatcatgatttgcactatagacatgatggtggaatttccagagcaaaaagcgtacttgcgatcttccctgaaaagaagataggaatttcaattatcaccaatcaatcttctaaaacaataaatgaaaaacttagccaattgacatataatatttataatgaacttaaaaccaattaaatagtttttagacttcatttttagaatagaaaaccttgaagaggaatagacttttgcatgtccttttcgaaaaccaactaagcctagacaagattacttatccataccgtataaatttgtctttcttttttggttgatttttccacattgtaacaatatttttgagtgtttaaggggtgtttcaggggtattgttacaatttctggttttgggcccaaagccttcaacctctggaatcccccatattcaggggcttgggtgagaaaaatggaaacgtaacggtgcgccagcacgttaccctcttgctattcctttttttccacacatgttcaaagtcccatacgacccactattgtaaaaccacttacagacgattcaaccaaaacgcataaacaactcttgcgccaaaagtgattattccaatatcaactttactgtggaattgcccccaaaacccctggcaaagtcatccaaaaaaaatgttggaacggtcataagatcttaaggtgccgtcgtagtgtttcatttacaaaaacttagctctataatgaccattttttattacggattttggttttagagcatggtaattaaggcccgatgtcctacctttatagttataaatacatgcgggaaaggtagtgccttaaaagcactttaatagggaatctggtgtaagtccggaactgtcgcgcaactgtaagtaatgtcaaggaatacgtcactgttttccactgttcgttccaatatcgaatgggaaggaagacgtatcccatattacaagtcaggagacctgccttttttgtctgaccgagctttcgcggaataaagcaatggtttagtatgcatatggaaaaacccatttggaaaaccaagtggtcgttttcatatgtatatgttatcccctcgctttcgattccccaattgttcttcaagatatccctcatgttcattgaccttattacggtatatggagatgcatttaattcttaaccaataaacaattgtcaaatgagaagatttaaaacgggggtgacggcccttttacttgccttgaactttttaagttgtgaagatccaatggaattgaaaggtccggaatccgtacctgccgaaaaagatttaggtaatcagattagtttcgaaacggtggacagggaggaagccattgggtccatcgtttcgttcaagaaccgaaccgattccaaagatgccccgaggtttgatgttgatacatctacga

SEQ ID NO: 1073 - DNA, 24617 bp, synthetic construct
  variation 16361..16700: note = n is a, c, g, or t
  variation 16053..16137: note = n is a, c, g, or t
  source 1..24617: mol_type = other DNA
  misc_feature 1..24617: note = Synthetic
aactatcaaaagaagctacaaaacatttaaccccaaagcaaaaaagagatttagaaaaagaatacgaaacgcctcccagtacagaatatttagataatttcttttttataatgggaaaaatggatcatatagaagtagattattaataaaatgtcctcacgaatttcaagttttaaaccgattatggataccacctcaaaaattttaattttagggtctattccaggtaaaaaatcattagaggaaaaccaatactatgcacatcctcaaaataagttttggaatatcatttcagatttattgtccgaaccttataacaccgattatcaacaacggattgtatggcttaaaaaacaccatattgccctttgggacatcatcgaaagttgcgaaagaaaaggtagcctagatgccacaattaaaaatgaatctgttcaaaatatcagtacactacttgaagattaccctaacattaaagcggtattttgtaatggtaaaaaagcctttaatacgactacaaaaattttgggtaaaaactatatattaccaatattctatttaccttctaccagtccattgcacacgatgccctacgaagaaaaactcagccaatggcgagaaattttaaagtacctttaaatagcttttataaagtcttcatattcgtaatagaccgtttcaaaagcctgcattttctcaacaaaaaattcaaatatttgttgccaagtggctttattgtaaatacttacatcatctaatctcacccataccctactgatgactttttgattctctagcgtgtaaaattcatcaaaataaacttcgcctaaagcctcttccaaaatactttccaacgactgcattttttcaaaatacgcattacgaaatagttcgtctttcatttcaatatccaaactcacttctgcaaattttcgctctgctcggaatttaaaagccatatccttcactttggtattatagagcaaccattttctaggaaaagactttccaaatgcaatccaaaattccttctttagttgtgccgcttcgtgtttactaaacatggatgattattttaacctttattaaaagcgacaaagataaggtattccaattattttaaatgattcatatacaccagcgtgtcgttcggtaataattgaggatgaaaaattttaatataatcccgaagcacccaatccgctctcactaccccactttcaaaataatcattggcagcacctcttgtccgtttggcaaatccatagagctgtccattgttaaatactttcattttagcatacgcaggattgaccattaacaattccttttttgtggtatggttggaaagattaacccaaaattgagcagattccgctttagcataaacttcttcaaaacttaaaggttcggctttattagagtttaaatcattgaaaacataccgacttcctgcatccttataatattgcgcgacgaaagtagaattaccgggtataaaccattggttgccatacatttcatttgataaaacataaggctgttccgactgatgttctgccttttgttttaagtcttggtaatgcgtttcaatctcctgataaatcgcattggctttttcctcaacaccgaatagtcgaccaaaaaacttaatatacgctgacttttctaatggtgtaggctcagtatattcattaagaaaaattactgcaataccattttttttgaggatatcgtaagtattttgaaaattgggaatatggttggtgataatggcatctggctttagggctaggatttgttctatgtcgtacttttggtcattgcctaccacttttattgagcctttatctaataattgatgaattctcttggaataaatatactctggactcgtgatgcctacaatctgttgttccaaatctaaactcgccatatagcctaccatagtcgcattcagcaagatgactttttttaatggcaacttagatttcggaatttgaaaagataaatttcctgaatttactttaagataactctgagcatcttcataacttagattttgagagattttaatggactctgcaatatccaaagtcggcgattttttacaagaaaccagtcctaaaactattagtcctaaaaaaaaattagatttcattatttataatattaaaaatttttatatatttgcaatctcaaaacggacgcgtagctcaattggatagagcgtcagattacggctctgaaggttgagggttcgactccttccgcgttcactttaaaacctctctttttagggaggttttttatttttttagcattttattaattacacacaaaacaattaatgccataatccaataaatatcattccctaatggaccacgacttaataaaataactatcggatagacgaaataaatcaccccaagaacaaaaataattttgattataatatctaaaaatctcataaattttaatacttcacagcctgatctagctctattgggttgtttttagcccttatcttttggcgttctttttcttccgcaggttttaattgatctttattaataatagtaccatcttctaagcgtagcgattcccttctggtatttccaaattaccatttaaaatagatttaaaaggattatagtaatgctccttttttaattttaataattgttttgagctcacctcaatcgctattttagcctgctgtgccatagtaactctgccataatcatcgtattgattaatactcttaatcagtttaaattgataattatttttagtgtcctttaactcaattattaagcctggcaaaccactaaataagtaaggaccataaggcaacatgatatcattacaagaccaagcttcccatactctacctccaaaattggtatacgcattctgaacttttaatccaccaacctctttcacttcatttccaagttcccatttgaattgtggcgttcttgttgtgcgatatacattgatatcgccaatatattgatatacattatattctggagtctttaagtcccgaataacaaagtctgtaagcttaaaaccatcaaatccaaactgatttttatttaccaccaaagaatcattttgggcataaatttcattaaaataccaaagtttttcagaatctatatccaacatataatgttctgttgtaacttcagtagaagtagaatctggtttaaaagtaacttcataaacaaaacgatgatgttgcgaaaatagcattccacttaaaaacatcaaccataccacaaaaaaattagatgatttgaacataattttttatttgaggtaaaattaaacataaatttttaattatcatttttcataaaatatttccataaacatattgtaaccttttatactttttgttcgtataacttagtataaactcttttttcgagcgataatagattatgagacaactaaagattacaaaacaggtaacaaacagagagaccgcctctctggataagtatttacaagaaattggtaaggtagatttaattactgccgatgaggaagtagaactcgcacagcgtatccgcgctggggataaagttgccctcgaaaaacttatcaaagccaatttgcgtttcgtagtttcagtttctaaacaatatcaaaatcaaggactttctcttcctgaccttattaatgaaggtaacctagggctgatgaaagcggctaaacgatatgatgaaaccagaggatttaaattcatttcttatgccgtgtggtggattagacaatctattctacaagctttggcagaacaatctagaattgtaagattaccactcaacaaaattggttctatcaataagatcaataaagcctatgctcatctagaacaagaaaacgaaagaccaccatccccagaagaattagcagaggttttggatatgagtgaagaggacataaaagagtctatgaaaaacagcggaagacacctttctatggatgccccattggtagaaggtgaagattctaacctttacgatgtattgcgttctggtgagtccccaagtccagataaggaattgatgctagaatctcttcaaattgaaattgaaagagcgcttcaaacccttacccctagagaagcagatttagtaagactttattttgggcttaatggtaaacacccaatgactttagaggaaataggtgaaacatttgacttaacaagagagcgtgtaagacaaattaaagaaaaagcaatcaaaagactaaaacataattctagaagtaaaattctaaaatcttatttaggaaagtaatctcaaaaaaaaaaggttaaagcttggtttatatctactttaaccttttatttttttcatttaataaaaaataacgcatgaaaacaaaactaattgccccctcactactatctgcagactttggtaatcttcaaagagatattgaaatgattaatagaagccaagccgattggtttcatgtggatgtaatggatggccgctttgtcccgaatatctcgtttggatttcctgtgatgaaaacgataaaaacccacgctaaaaaatttgtagatgttcacctgatgattgaacaacccgaaaactatgtagaagcttttattgatggcggtgccgatttggtttctgtacattatgaagcctgtattcatctgcatagaaccatcaaattaattcaagataaaggagtaaaagcgggtgttgtactcaatccctccactccagtatcaattttagaagatatcatcagtgaagtggatttagtgctattaatgagtgtaaacccaggctttggcggacagaaattcattgaaaatacttataaaaagataagacaaaccaaggaattaatcttagaccaaaacgcatcggcattaatccaagtagatggcggggtaaccccacacaacgccaaaaaactttacgatgctggtgccgatgtcctagtggcaggaaatgctgtatttggggctgaaaatccagaacatgctatcgagtcgataaaaaatgcttagattacaaccgataaccaagtataaaagcaccaataattttggtgctttttttgttttatagataaaaatcattagaatttacccgttataaagcgaaaaaattcaatattaatccttatttttgacctatggatttaagagatcaattaaaaaatttattccctgaccacgaagagcaagaatggacagcgcccgaagaggaacaaaaaacacaaaccaatccattgatttgtaaatacgaaaagaaaggaagaaatggaaaacccgttaccattatcgaaggttttgaaggggctaacgatgaactgaaaaaactttcaaaaaagataaaaacgacacttggaattggaggctcagaaaaggacggtttaattattatacaaggggacaatcgggataaaattatggacatcctacaccaattaggctacaaaaccaaaagagttggtggataacaatagagaaacaaataaaaaatataaattatgattaataagttagcagcatcagaattggtgcttaatgaagacggcagtgtataccacttaaatttactaccagaagatattgcagataaaatccttttagtgggtgacccagatcgtgttgcaagagtatctcagttttttgataaaatagaaatcaaaaagaataaaagagagttttatacgcatacaggtattttgagaggcgaaagaattacagtcatgtccacaggtatcggtactgagaatattgatattgtgatgaacgagctagatgccttagtaaatatcgaccttaaaaataaggaaataaagaaagagcataaagccttagaactattccgtatgggtacttgtggcagtgtaaatcctgatattgaggtagaccaaatgttggtgactcaaaatgtagttggtttagatggattattacatttttatcaagattaccaatttgaaaatgaattttctaaacaatttttagagaaattcccttatgaaaaaattaaaccgatgctttatttttcagattgggcagaggatatttctgattattacaaagatgctaagtatcaaggtaatacagcgacattcccaggattttacgcaccacaaggcagacaattacgcttaaaagcagtagatgaccaatttttagaaactttaaatgaattaggagtgtctaattttgaaatggaaacttctgccatctatggactttctaagttattaggacacaaagccctaacggtaaattgtgtgattgccaatagacgccgaggcgaattttctgctgaccaccatgcctcagagaaaaaaatgattcagtgggtgctagatcgattaattaaataaaaatttatggatagagaaattaaggattttaatcaattattatataaatcttgggacaattttttagataatttacctgctattgctatggcgattatcgtatttgttttagggtttattatcattaaatacattagtaaacttgctaccaatattatagaaaaaaaatccgatgacttattagttagtgattttttggttaatattatttcatttgtattgatgctatttttagtggtgatatgcatgagtatattaggctggggaagtattacggataagatattggctggagcagggattggtacttttgttataggttttgctttaaaagatattggtgaaaactttctagccggtattttgatggcatttaaaagaccgttccgtgtaggcgatttagtagaaatagaagggataaagggaaaagtaaaaagaatgtcgcttagagaaacgaatattaaaacattagatgggaaagatgtttttgtacctaatagtatcattcttaaaaatccactccaaaattatacattagataattatttacgaaatgaatttattatagggttagattatgacgataatgtggaagccattttgtcccttattagagagattgtaaatactttcccagaagttcagcagcagcctgcaccgagtgtttttatagacgaactagcagccagcaccgtaaatgtaaaggtaatgtattggatagaaacttatgatatgactgcacctgcaaacgatctgagaagcagaattatgcttaaagtttataaaactattttggataaaggttacaaactaccgtctgatattgtagaagtaaaaatggtcaacaatgactagctagtttagttaaatacaaaaagccgtatcaaatgggtattttgatacggcttttttataaaaagaaataaaagttactttactgcttttttaatatctttagctgcttcttcgatgttatcggtttgagcttctgctgcttttacagtattatttaatactttatctgcattatcagcggcaccatttacatctctaattttttctcctgcattggcttggatactctctagtctagcttgtaattcatcaacttttttctgagcaacatccactaaagtcgtgttaccatcttgcttagccttatctaattctttttgtgcgtcatttaatgcattttgtgcatcaatcacttcttgatttagatctttttgagcatcagctacattttcaccttctaccgtaataacatctgttgctaccgcttctttttcagtttttttatcgcatgataccgctaataaacctagaactccaagagttaaaaataattttttcataatgtttgttttaaaaattaatgatattgtactggcaaatatatcacttttttagttgattataattcaaaattttacgcatcaatattagcgtatactgcatttttctcaataaattctcttcttggtggtacttcatctcccataagcattgagaacactcgatcggcttcgcccgcattatctattgtgacttgttttaagattctattttcaggatttaaagtggtttcccaaagctgttctggattcatctcacccagacctttataacgctggatttctacccctttaccatctgcgctcatttccaacattttttcttcgcgttctttttcgttccaagcatagatttttttatttccttttttcaattgataaagtggtggtgaagcgataaagatatagccttgttctattaactctttcatatatcggaagaagaacgtcaatattagagtagaaatatgcgagccatcaatatcggcatctgtcatgatcacaattttatgatatctcaacttgttaaggttaagtgccttgctgtcctcttcggtacctacgcttacgcctagcgccgtatagatatttttaatctcttcattatcatatactttatgcaccatagacttctccacattcaaaattttacctcttaatggcagaatggcttggaaatgtctatctctaccttgtttagcggtaccccctgcggaatctccctctactaggaatatttcagaaatttcaggatctttagaagaacaatcagaaagcttacccggtaatccagcacctcccattggggatttacgctgtaccatttctctagcttttttagcggcttgtctggctttagctgcaaggactactttctgaacaatttgtttagcttcattagggttttcttccaaaaagttggtcaacatttctccgactattttatcaacagcaccagaaacatcagagttgccgagtttagtttttgtttgaccttcaaactgaggttccattaccttcacagaaatgactgccgtaagcccttcacggaagtcgtctcccgttacttctactttttccttttgtggaagtcctagttcatcggcatattttttaagggttctagttagtgctctacggaatcctgtgaggtgtgttccgccctcatgtgtgttgatattattaacataagagtgtaaattttcggaaaacgaagtattgtatcgcatcgccacttctacggggatatcgtcgcgctcgccttccataaagatcacttgctccattatggcttctctattgccgtcaataaactctacaaattcttttagtccaccttcggaatggaaagtttcactttcaaaattgccttgctcatcttttactctttcatcaatgatggtaatcgtaattcctttgttgaggtaagccaactcacgaagtctagcagaaagcgtattaaaattataaactaactcattaaaaatagtatcatcaggctgaaaaaacacttctgtaccacgctcatctgtctttccaatttgctctacatcaccaagtgctcttcctttagaatatttttgctgatatatgataccatctctatagaccgttgcaatagtgctattagacaaggcattaacacaggatacccctacaccgtgcaatccaccagacactttataagagtctttgtcgaacttaccaccagcaccaattttagtcattacaacctccaaggctgatttttgttccttagcgtggaagtctactggaattcccctcccattatcgcgaacggtaatggaattgccttcgtgaatagtcactgtaatggtatcacaatagccagccagtgcttcatcaatagagttatccaccacctcataaaccaaatggtgaagacctcttacgcctacatctcctatgtacatggatggtcttaacctcacatgttcaatcccttctagcgattggatactatctgctgtatattgcttattgctcataatgtattgcttaattttaaagattacaaatatacggaattttatagaaaataaggaaataattagaatttaagttttaatatagcattttaatataaattaaaaaaagcgaccctcacaggccgctttgaatgttttcacaacggaataatccttattgtgaattgctttctggcacaaatctacaaattatttttgagtttacaagtttttttcataaatttatagcataattattttattatgaaaaaaatactcgggttagatataggaaccaatagtattggttgggcattgacagaacaagactttgacaacaaaaaaggaagaattattgatttaggggtgcggattatccccatgagtcaggatattcttagtaaatttgatagtggagtttctatttcacaaacggcagaaagaacaaggtatagaggtattcgtcgtttgcgagaacgacatttattaagaagagagcgtttgcatcgggtattgaacattatgaattttctacctaagcactacgctcaaaatattgattttgaaaatcgtaaaggacaatttattgataataaagaagtaaaactgaattataaaccagaggaaaatggacaattcacctttgtttttcaagattcttttcaagagatgttgcaattatttaaggataatggatatagcgaaaatattccttacgattggactctgtactatcttagaaaaaaagccttgcaacataagattagtaaagaagaacttgcttggctcttattaaattttaaccaaaaaagaggatattatgagttgcgtgaagaagaggaaaaggagaaagaggaaaaagatgtagaaaccatcgaagaattctacgctctaaaagttgtatcggtagaagaagacaaaaatagcagtgcgaattggtatttagtacatttagaaaatggatttatttacagaaggaaaagtacagaacccttagatgattgggtaggaatgaccaaagaatttatcgttactacaaccttagataaagatggtacgcctaaaaaggataaagaaggagatatcaaaagaagtttccgtatggtagattctgaaaaagattggattgctatcaaaaagaaaaccgaacatgacatcaataattcgggaaaacaggtaggaacttatatttttgatacactcttaaaaaatcctactcaaaaaatcaatgggaaattggtaaaaaccattgagcgtaaatactacaaagaggagttaaaagccattttaaaaaagcaaaaggaatttcatacagagttgaatgacaaagatttgtattatgcttgtattgaagaactttatcctcataatgaagcacatcgaagtaatattagcgataaagattttacttacctttttgtagatgatattatcttctatcaaagacctttaaaaagtaaaaaatcaaccatctcggattgctcttatgaagttaaaaaatatatcaaagatggagaaaaattagaaaaacccttaaagtgtatcgcaaaatctcatccattgtatcaagagtttcgattgtggcaatttattcaaaatcttaggatctataaaaagcaaggtattaatgagaaaggagaggttcaaatcaatcaggatattacacaacaattactacctgatgaggaagcctatacaaatttgtttgattttctaaatgaattgaaggaagttgaacaatatcaattactaaaatattttagtgatttaaaaaaacttcctaaaatctcaaagtctgaaccagcatatacttggaattatgtagaggataaaaaatatccgtgtaatacttcgcattctgcctttgtttcgagattaaaaaaagtaaaagggatagatgtagaaacttttttaacaaaggaagtggagcaacatctatggcacattatatactctgtaaaagacaaaaaggaatttgaaaaagccctaggaacattcgcggaaaaatatgctatcgatacagagagttttgttgagaactttaaaaaatttccacctttcctaaatgattatggtgcctattctgaaaaagcattgaagaaactagttccactaatgcgcatggggaaatattggtctgaaaacgatatttcagataccaccaaagaaaatatttctgacattatggagcgtttggaggatatcaattttgaaaaagaaaaatttgaaagtgtaaccgatgatttggtttctaaacaattgttaaaaagttttgcttcgtttaaggataagaatccattaaagggattaaacacctatcaggcttgttatgcagtctacaaaaggcattccgaagcggcagaaatcactcagtggaaaagcccaaaagatatagaacattatttgaatcatatttttaagcaacatcaattaagaaatccgattgtagagcaaattgctaccgaaaccttacgattggttcatgatatctgggaatactacggagatggtgcggataatttcttttcagaaatacatgtagaactaggtagagagatgaaaaatccggcggataagaggaaagaaatgtcggataagaacacagaaagagagaaaaccaatcagcgaattaaggcaattttagaagaattagccaatgatgattctatggaagtaaaaccacgaccttattctccaagtcatcaggaaatattgaaaatttatgaagaaggtgtttttgaaaatcaagaggcaagtgatgaaataaaaaatattcgcaaatctacttcgcctaccaaatctcagattttaaaatacaaactttggttagagcaaggttatgtatcgccatacactttgcagatgatacctctgaccaaattattctcaagccaatatcaaatcgagcatatcataccacaatctcgctattttgatgattcgatgaataataaaatcatttgtgagagtgtaatcaatgaagaaaaaggcaatgcaacggcttatgaatttattaaagcccgaggaggagaaaaatttgatttaggtcagaacaaaatcgtaaccttagccaaatttgatgattatgaagcacattgctcaaaatatttcagaaaaaaccgtctcaaactcaaaaatttgctggcagatgagattccttctggatttattgagcgacaactcaacgacagccgatatatcagtaaatacatcaaaggcttattgagcaatattgtacgagaagacggagaaaatcaagttacggctaatagattggtgcacgtaaatggtactattacagctaaacttcgccacgattggggacttaatgacaaatggaatgaaattgttcaaccacgatttgagcgaatgaatgaaattaccaatagccaagattttggtttttgggataaaagtatcaacgccttcagaatacaagtccctgatgaaatttctaaaggattcagcacaaagagaattgaccacagacatcacgctttggatgccttagtagtggcttgtaccacaaaagatcataccaattatatcacttcattgaataccgaacgaaaaaacttttcattggtaaaaaaattgagagaagttgaagaagtctataaaaatgatcccattaccaaagaaagaaagttggtaaaagtggctaaggcatacaaaaagccatgggatggttttactttggaagcaaaaaacaaattagaagaaattgttgttagtttcaagcaaaacctaagagtgatcaaccgaaccaataataaatttcaaaaatgggtagagcaacccaatggtcagtataagaaagaatggatagagcagaaaggaaaaaactttgctattagaaaacctatgcacaaagagacggtttctggaaaggtttatgtaaagcaagaaaaaaagggtatagtggctttaaccaacaccctaaacgattgggagttgattaaagatgatgttattaaagagcaagtgaaaaaactcatcaaacaattcaaaggggatataagtttggttaaaaagcatttaaaagaacatcctataaaaaaagaaggcaaaaaagttgagaaaataaaagtttttgaatttgtagaagccacagcatcgcgtagcgaactcaccgataaattcactcaaaaacaactggattctgtaacagactcgggaattcgtaaaatcttacaaaatcatgtcaataaatatgtagataaaaaaggaaacttagacttttctaaggctttcagccctgagggaatagaggcgatgaatgccaatattcaagaattaaacggaggaaaagcacatcagcctatttataaggtacgaatttatgaagtgggcaataaattttcggtcggcgaagtaggtaataaaaaagataaatatgtagaatcggctaaaggaacgaacttgttttttgctatttattgggatgaagaaaagaaaaaacgaaattatgaaaccgtgccactaaacgaggtaatagaacatcaaaaacaaatggtgcacctaccaaaaaatgaaaggacagaacttcctataaaaccagaaattggtaggtttttgtttagtctatcacctaatgatttagtatttgttcctacacaagaagaaatggacaatccaaattctgtgaactttaatagccttacaaaagagcaatctagcagaatatataagatggtgagttctacgggtaatcaatgtttttttgttctttcaaatgttgcaaatacaatatataataaaaaagagttttcagcattaaacaaaatggaaaaatctattgatgatataatggttaaagaaatatgttggaagttagaaattgatcgtttaggaaatattaaaagagttattcaaaattaatcaaccatgctctatcgctctatctatatcggaaatccagcctatctgaaactcaaagatcagcagatgaaaattatctgtcctgaatccaaaaatgagaaaggcagtattcctattgaagatattggattgattatgcttgatcattttcagattacactttcccatcaattgattcagcgattgatgggaaatagtgtggttgtaatcagttgtgatgcgcatcacttaccccacggaatgatgctacctttgtacggacattccgaacattcgcaacgcgtaaaatatcaattagaagctagtgaacccttaaagaaaaatctttggaaacaagtagtagaggctaaaatcggtaatcaagccgaaattctaaaacaattagatacctattacgaaccaatgttggaataccaaaggcaagtaaaaagtggcgataccaccaatatggaaggcattgcagctcagcattattggaaatatttaatttctccagactttctaagagaacgcttcggggagtcgcccaatcaattctttaattttggatataccgtcttgcggagcatcattgccagagctattgtagaaacaggcttattgccagtaataggcatttttcatcggaataaatacaacccatattgtctggcagatgatatgatggagccctatcgcccctttgtagatggattagttataaaatggctaaaccaaaatcctgaagcagaagagcttaacaaagaattcaaagcctatatgttacaaattgccacaatggatgtccgtattgaaaacaatacgagaccgctgattgtagccgtaaaaaccacaattgcctcactatacaaatgctatacaggagaaaaacgacaactttcaatgcctgaatttaatgaatttcgaccgatttaacgcctatcgagtcatgtgggtaatggtattatatgatcttccaaccgaaaccaaagccatgcgaaaagcagctcaactatttcgtaagcgattggaagacgatggctttagcctatttcagttctctatttatgtacgccactgcccaagccgagaaaatgcagaagtacacatcaaacgagtaaaatccatattgcccaaatacggaaaagtggcgattatgcatattaccgataaacaatttggcgatattgagatttttttttcacaaaaacgagaagatccaccccctacttaccaacaattggagttattttagaataaaaaaataagaaatcttatatccgataaaccaaaaaaagaataaaaatcaccatcctataaaatcgaaaaatccactgaaaaacagtggattaaattttgaggttgcgaactatcgcaaagatagtaaaaatttgaaagcaattcacaacgatttcgtctaagataaattgaagttctttgttgcgaactatcgcaannnnnnnnnnnnnnnnnnnnnnnnnnnnnnnnnnnnnnnnnnnnnnnnnnnnnnnnnnnnnnnnnnnnnnnnnnnnnnnnnnnnngttgcgaactatcgcaaagatagtaaaaatttgaaagcaattcacaacattaaaggcgtaaaaaattacttattttttgttgcgaactatcgcaaagatagtaaaaatttgaaagcaattcacaaccttactgcgtatgtgttagcgactgattgagttgcgaactatcgcaaagatagtaaaaatttgaaagcaattcacaacatatgtttctgtgcttatannnnnnnnnnnnnnnnnnnnnnnnnnnnnnnnnnnnnnnnnnnnnnnnnnnnnnnnnnnnnnnnnnnnnnnnnnnnnnnnnnnnnnnnnnnnnnnnnnnnnnnnnnnnnnnnnnnnnnnnnnnnnnnnnnnnnnnnnnnnnnnnnnnnnnnnnnnnnnnnnnnnnnnnnnnnnnnnnnnnnnnnnnnnnnnnnnnnnnnnnnnnnnnnnnnnnnnnnnnnnnnnnnnnnnnnnnnnnnnnnnnnnnnnnnnnnnnnnnnnnnnnnnnnnnnnnnnnnnnnnnnnnnnnnnnnnnnnnnnnnnnnnnnnnnnnnnnnnnnnnnnnnnnnnnnnnnnnnnnngttgcgaactatcgcaaagatagtaaaaatttgaaagcaattcacaacacctttgtactataattaagataacatcttgttgcgaactatcgcaaagatagtaaattttgaaagcaattcacaacatcttttccatatacttctaatccctgtgtgttgcgaactatcgcaaagatagtaaattttgaaagcaattcacaacatgaagtgttggatgaagagcataccaccagttgcgaactatcgcaaagatagtaaattttaaactacgaagtaatcacgaatttcataatttacaataactaaaaaacaatacagcgtatataaacactttaagttaatgtgatgttaatcataaaaaaaaagaccgcttaaataagcagtctttaaatgataaataggtaatcgttaaattaaaacttccaaccagcggttaaaaagaagttattctgtttatttttaaccgttgctatactagctttatcgctgtatagcgaaatatctttactaaaataatccccccttccataatagctattatagtcagctgaaatcatctgataagcagcatctacaaagaatgatttgaaatcataccctaatcctaaacctaatgtttgtttcttgcctaaataatcattatccttaaaggcactagaagaaaagccatagcctcctcttaatctaaaagcatcgtagcgatattctgcccctattctaaaatctgaaatatttttataattctgtttaaagaaatcattcagttctgtttcagcatcgccttgtactttataattaggcttggataaacctaaagtataatcaatattgatggcaaagcttttattagggacaaaggcaccacttagtgtcatcttggcaggtgtagtcaaggttctatcttcagtatagttttctgaaacaaaaccattactatccagccattggctatcaggaattactacgccatttttagtaaataattgacccgtaaatacgcgatccattttccaccaagttggcgattcaatagaagcacctactctaaactgagggctaactttagcaataatccccgccgctatggaaataccattagcattttcagaaaatggagtaaaccttctgttaaaatcataatttgcattattgtctacatctaatgaaaatctttgggtatcatattgttctaaattagcacttgaaaaactgacacttccaccgacatagattttattattgtagtttcctccaataccaatattcatttttgaagtattgcctattctatcgtaagcgtgtgcaacattcataaaattgccaataacgggattattataagcatcataaagatttcttgtaatcatgctaccgctactcggggattggatatagttttccagttcttgacttacataattaacccctatgtttacgaacttccattggtcattacctgtgaatgttgctactccaccagtctgtcctaaattggttttgttggtcgcttgctccaaagactttcctgctatactagaagtattagaatttttaaccatattcatagtcgcagaaatttctcccgtaatgaaaacgcccaatgctgcgggattagtattcatagcagaaacatcaccccctaaagctcccatagagcctgccatagcactatatttagcacttccaaattgaggtccattggaataaacctcagcggtatttcttatggtcgatacatcctgagcatgaaaataaaccgccacaggaattaaacataaacttaatatattctttttcataattttttaatcttatttatatgattatctaaacccacctgatctaaatccgccactagagcgtgaagaatacgaactactattagatgaacttccagagcggaagccactatctcttgaagagctatgccaactagagtttgattgtgattggtaagtattatcacttcttacagagttgctattcatcggtgcatttctaaaccttccagaagactggtagttagggctttgatacgactgattagagcgatttgttctataatcgttggcttgcccattagatctgataccacttctaaatggtgtagaataacttgatccagagccttggcttctataattagtagccccgcttcttctatattcatagcgtgggactacaacatagccaccatacggatacccataaccgtaaccgtaataaggattccagccgtagccaccatagtagccataatagcctccccaatatggatcataccaaccgctatgtgggtaataataaggatttcgccatctattgtaaccatagccataaggatagtagccccaactcatattaaagtaagaattccatccaaatccatagcccataccaaatcctatattccaaccattactatagaaataaggatcatagccaaaaccattataaaaactagaattccaaccattataatatcggtcggtaccagcataagttccccaatccgaatcatttggttggttagaatcccactgttggtatctttttttctgcgcttgttctagttgtttggacttttccaacatcgtgtcataattgtaataattatccacacgattaccttcgttcattgctacactttctggtattacatctttatttgggtcgtagtatacaccatcagtttcagtgtattcgcccatctgtgctccacaagaggctagcaaaaaacctactgaagtcagcataatggctttgtaagcccaacctttgtgcaagaaatttaatctaatttttttcataattatgtataggttttatttatatttgtacttttattaaagtattttaatccaaaatcgtaccaaatatataaaaattttatttagtacctttactagataactaaatttcaataaaaatagtatacaatatggcaaaattaacatcaagaagcgaagattatagcaaatggtataacgaactggttgtaaaagcagaccttgcagaaaactcaggcgtaagaggatgcatggtgataaaaccttacggctatgctatttgggaaaaaatgagagacgaattagacaaaaaattcaaagaaacaggtcatgaaaatgcctacttcccaatcttcgttcctaaatctttatttgaagctgaagaaaaaaatgcagaaggttttgccaaagaatgtgccgtagtaacacattacagacttaaaacagacccagataatcctcagaaattaatggtagacccagaggctaagctggaagaagaacttatcgtaagacctacttcggaagccattatctggaatacttataaaaactggatccagtcttatagagatttaccaatccttattaaccaatgggcaaatgtggtaagatgggaaatgagaacgcgcctattcctaagaacggcagaattcctatggcaagaaggacataccgcacacacgactaaagaagaagccgtagaagaaaccgaaaaaatgctagaaatctatgccaattttgcagaaaactttatggcagtccctgtcataagaggagtaaaatctccaagcgaacgctttgcaggtgcagaagaaacttattgtatagaagctttaatgcaagatggtaaagcattgcaagcgggaacttctcactttttaggacaaaattttgcagaagcttttgatgtgaaattcactaataaagaaggtaaaatagagtacgcatgggcaacctcttggggcgtatctacccgtttgatgggtgctttaatcatgtcacattctgatgaccatggtttggtgttgccacctactttggcccctattcaagtggtgattgtaccaatattcaaaggggaagaacaattgaaacagattgatgaagtagctctagaccttcaaaacaaactaagagcattgggcatttctgtaaaatacgacaatagagacacccataagccaggttggaaatttgcagaatacgaactaaaaggggtacctgtaagaatcgctatgggggctagagatttagaaaataaaaccgtagaaatagcccgtagagacaacctgactaaagaaactcaaaatatagaaggtgtagaacattatattaaaaatcttttagacgaaatccaacaagccatttatcaaaaagcattggattttagagccaatcatattacaaaagtagattcttacgaagaatttaaagaagttttagaaactaaaggaggatttattctagcccattgggatggtaccgaagaagaagaggaacaaatcaaagaggaaaccaaagcaaccattcgttgtatcccactagaaggcgaaaaagaagaaggtgtttctatgatttctggtaaaccgtcaaaacaacgcgtgctatttgcaaaagcttattaattaacaaaaaacaatttaaaaaaatgaatattatcgaccttataaaaggacaatttggacatggtgtcattgcacaattggcaagccaacttggcgaaaatgaaacgcatacttctaaagcggtaaatgcttttattcctacggttttagcgggtatggtagctcaatcggataaatcacttttacttaaagaagtaacaaatttagcagacaccaatgttttaaccaaacttagtcaaaattcccctgaatccaacgaaatactatctggtattctttcgatggtttatggtgacaaaattgatagtttaatgtctggcgtggcttcttttgctgatattaaaagttcgtcctctgcggcattattaggctttacgactttaacctcattagccactgttggtcgctatgctaaagaccaaaccctagacgctcaagggcttaaacaccttttagacaaagaaaaaaccaatgtatctaacttactacctgctggattttctttagctgccgtaggtctaggacatgcagagcaatttttgcacaacgcgaaagacaaagtttcggattttgctcacgacatgggcgacaaaatttctgatacagcacatgatgctaaggaaaatttagaagacttcacagaaaatgctaaagaaaaattcaatgaggtttctgaagatgttaaagaaactgtgagcgagaaatatgaagaagccaaagattatgtctctgaaaaagcagaagccgtaaaagacaaattccatcaagcagaggaaaagactaaagaaaaattaaatgacgaccaagagcccgtatccatttggaaatggctcattccattggtgttattactcttgatgggatggttcgcatggaaattgatgaataaaaaagaacccaaagtagaagatgtagatttagcctacccaacagacacgataaaaacagttgactctataaatcaaacgacaacggatactcttaccataaaatagtctattccgtttagtctataatgataaaatgtctaccttttatagagtagacattttttatttgtgtatgttttataatttttatatttttgttagtcgaaactaacttcaaaattatgtttaaaaaataccgacatcaagattggaaaaaagagagtgtaaacctttccttatcagaatctttttctagtattcatattccaaaagatgctagtttttggaaaaaattgttagcctttgcaggtcctggccttatggttgccgtaggttatatggacccaggaaactgggctacggggattgctggtggtgcacaatttgggtatacactactttctgttattcttatttctaatttatttgctatgctgttacagcacttagcattaaaactgggcattgtagcagaacgcgatttggcacaagcttgtagagatagctattctaaacctgtgggatttttactttggatttttactgaaattgctattgctgcaacagatttagcagaagttattgggtcggctattgcgcttaatttgctttttgggattcctctcacttgggggattgccattacggtattagatgttttcgtcatcttattattacaagccaaaggatttagatggctagaagccgtagtaggtggtttgattgctgttattttctgttgcttcttatacgaaattgtggtgagtagaccagatatttttccaattttaagtggtttagttccgcaaaaagaggtggtaactaatccaggtatgctttatattgctatcggtattcttggtgctacggtgatgccacacaacctctatctgcacagcagtatcgtacaaactagaaactacaacagaaccaccgaaggtaaaaaagaggcgattaaattttctacaatcgatagtaatatttctttaattctagcattattcattaatggggcgatattaattgttgccgctgcgactttccataatacccaataccaagatgtagcagatatcaacgatgcttacgaattactttcaccgctattgggaagtagtattgctagttttgtatttgctattgccctattagcctctgggcaaaattctacgcttacaggaacgcttgcaggacaaattgtaatggaaggatttttaaatatcaaattaaaaccatggttaagaagattaatcaccagacttttagcggtagtacctgctatgattgtcgcgattatttatagggaaaaaggaacagcagaattgctaatttttagtcaagtgattttatctttacaattgagttttgccgtagtgccattggtattatttactaataacaaaacaaaaatgggcgagtttgctaacaaagggcttttaaaatattccgcaatgattattgctttaatcattgtagtactcaatatttacttagtgtatagcgaaataaaaggctaattaatatcaacccaaaaggcactccataagataatcgtccatcacgaagttttgaccgatatcaaaaacaccttcatcataaattttaaacccctgcttttcatagaattgaatggcggggttttgcttattgacatttaaaatcacacgatgattacccgaagctaccacttgatgtttcaaaaaatccatcacttccttacctataccctttcctttaaattccttcaatagataaaggcggtgcaacttggtagtcgaagattctatatctgtttcatagcctataaagcctacattatcattaagatagtttatcccataataatggtattttggatggataaaatgttctttcaatgtttcggtgctatacattgtatccagcatatattggatttgctctaaagacaaaatctcggcataattgctacgccaagattttgatgctaattcctgaattaaaggaatagctttagaatctaactgataaaaagtcgtcatattaaagattaatctgtaccatttctgattttattttttgctgtaagccttccgacgcagcaaccaatggcaaccgtagatagttttggataatacctttctcggctaacaccgttttaattcccgcaggattaccttcggcaaagattaatctcgtgagttctaccaactgattatgaattgcgtaagcttcttttactttgttttgtttagccaattgaatcatttccgaaaaagcttttgggtaagcttgaccaatcacagaaatcacaccgtcgccacccgctaaagttacaggtaaagtaaactcatcatctcctgacattaatgaaaatcccgatggtttttgtcttaaaatatcgaaatattgcaaaatgtttggtgcagcttcttttatcatcattaaatttggaaattcttttgctagccttagtgttgtttgggcttctatattctgccctgttctgcctggtacattataaataatgatgttttttcccgtagaagctaacattttataatgctgataaatgccttcttgattaggctt

SEQ ID NO: 1074 - DNA, 24617 bp, synthetic construct
  misc_feature 1..24617: note = Synthetic
  source 1..24617: mol_type = other DNA
gtaaacctgtccgtccctgatgatgatcatcacgcatgtagcccccatgccgcttagtccgtcgttctgcgaagccctgcgcagtatggcctggttggcggcaatgatagagctgttgatagcctcttcggctgtggcgaatgtgttgtcggtcaggatgtcctgtatcacggccacggcgagctgcgatgccacgtcgccggccttctgtccgcccatgccgtcgcatactacaacgactcttccgtttggagagtcgaaggtggtcatgctgtcttcattaacgctgcgcaccctgcccgtgtcggtgcagttggctattatatagttttccatgattttatcctatttgtggtattgctatgaaaatgaacacggtgctgcccaagcgtattatgtcgtagttcttcagttcgccttcgtcagaaagctccttgttgacgaaggttccgttgctcgactgctcgtcgcggtatttgaacttgttgtccacgtttctgtaaaggagcgacatgtggcggcccgacatctgcttgtcttccggcacgcagatgtcgcatgagcggtcgcgtccgataaagttcttgccctcataaatgttgtatgacttgcccagcggatcgcggttgtaggttaccagaaatcctaccagcttgcgtccctgtgccgtgggcacgcctttgggctgtctgattatggtgccgttcacgggtctttgtgccgactgctgctgtccggggaagcgtgtctcgccggcagcgtccattccgcccatcacaggcgaacccattgccccctgctgcggcattcctgcaggaggggcaacgcgtgttctgtatgctgagtcaggagcctggtcgaacggaggcattccgaaatcttgttttgagttaaactgtgtgctgttgccgtctttagggcacaacggacattcgtcaccatagatgttagagtcgtatatatgtccgtttggacaagttttcttaggcatattcttaattgtttttattgtttgactatctgtgttatttctctatttatccaagaaactcctcattctccatcatggagtcgagcgattcgctgttctcgtcggcctcggcatcagcattgttttcggccaggtcgctgtcgtattcaatgttgtcaggctcgccgtatgtttcggcttgtgccattgcaggatcgtccacttcgggagtgtatgtgctgtcgtcagtataagtatcgttctcggctatatattcttcaggctgttcgtcggcagcatatatgtcgttttcggctatgtcttcgttgaatccgtcgtctatacggttttcaaggttgggcaagccttccacttcagctgaatatctgtcgttttctgccagatactggttagagttatatccgtctaccagtccgttagggttgtagtcaggattgttctctgcgaagtcgccgtggtatgcctcgccggtcttctcgtcttcaaagttgttgtatataggctcctggttctgtgctatatagttttcatttgcttgatgctgttcatcgtatccgtttatctcctgtggggtgaatcgctcgttggttacctgagccgtttcgtgtcccatgtgtatgttgtccgactcgctgagctgcatgaactcgtcctggtcgaagcggttgtttccgttagagtctacggcgagcaggtcagccacgccgtcgccgtcgccgtcggctattgcgaatttatggccgttgatggtgccttcctcgatagagcctatctttgtgtcgcctacatagaagtttgtggtttcgtcccatgttacgttcggctcttctgccgcctgtgcctcctcatgatacacttctgccgccggtttctccactatcaccacgtgttctgtcgttgtgtgcgtagcggtgtgagtctcctgggtttcttgtgtttcagcttccttatattcacttcctgcctcggctccgcctattatgtcttcagttgtaagcgtctcgtctgccgtctgtccttcaggctgtcctgccgcataggctgctccgccggccactgccgctcctcctaagaaggctgctccgccaacagctattctctttgctgcattgctcttctggatggctttatcctcataatcctcaacgttcattcctgggttagttccgttagtattcataatcttacagtttaatggttattttttttcgttttctgttctcagaggcttcagcccttagccggccttgcctttatattagtatagatttgtttaggatgactttcttacggttaactcaaattttttttcaggcgggcgtcgttcattataggagatatagactgaaagcctgcgcatatatttatttttatgtatgcctatttggttatttttatcacgtaggtttcagggctgtcgtcgcatacgagggcatagaagccgggtgagagataggtgaacgatatgctgctaatgccgcccgacatgtcggttgtcgacgggtcaatgcagttggtctttcttgtcttggtggtgtagccctggctctttgtgccgtttttcagttccacgttgtcgagggctatcagatgccagctgccctgaaacttggcgccggcagccttgaaggtggtaacgatgccttcgggaaagggatacaccttcttgtccacataggccgtgacgccgtcttcggtcattgtccttgcccttgatatggcaaactcgtttacgtagactctgccgggcttgtatgtctcgccgtcttcacctgtgtatgctgtcctgtattccgttacgtcggctgccagtatcttctctttcgagccgtcctcgtgcagcagcgttacatattggtcgtcggtcttggcgccataatgctgaactgtcattatgccgtcctttgatgttccgtccttcatcactatcgtgttgacaaatcctgcctgaccgaagagcggctgcgagagcgagcgtgccaccttgcgtatctcgcgtatgttgcccatgcccagctctatcgttgccgaactggtctttacagccagcgtctgtcctatcttctgcgacactatggttccgcggtaagtctttcctgccgccgtctccacctcgtcgtcaacgcccgtggcctcttcagcctcaggagccttgcgcctgatttcctgtatgtcgttccattttatgctgaatgtcgtcggcacggcctgcaggtaagtgtcggtctgcgcgttgcccttttcgggcttcaccacgtcggtgtaggtgtagttttcggttgttatgctgtgcatcatcagatagcgcccgtcggcgtttccctgcagagccttcgtctccatggcccagcgcttccattcgcgcggaagtttttcgtatcttacatatttgtctttcttcgactttatttcgccgtcgctgaccaccagcagtgcttctgttgcctccatggtgatgtccttgccaggtctctgaaccacgatgttgcccgtaatctttgagccgtttttcattatcagggtggtttcctgctgtgcgtatgcaggaattatgatggtcaacaggagaacaactgctgatgcagtcttgtatatagttgtccgcattattgttaaaaacgtttttattattctgtgttttatctgctttctgccggcagctgttgctgtcattcttaatgccggtcgatatttatgtcagccatccggcctttggcttattgcccatgctgccagatgtgtttattgtcagtttattacaggcatgttgtccgtgcgtgcattcacgttggccgatgccttggtctgccctgcgtttcctttagcctttacggctttgcctgcgctctgctttctgctgctgcgcctgcggatgcttgcatcgttgtcgcctgcagcggctttggtgcctatgggtatcgacatctccgtgggggcaaccttgttggtggagtctttgttccattcgcccttgccttgctctacatattctttaggtgcaacaggggcggcttcgggtgccggcgtctgtccggcagacatgagccatactgcagcaatgatgacaacaaccagcagtgaggctgccgcaataattgtcttgcgcattgttacgtaagggtcctttaccaggttccagtcgaagttccagcggtctccgagccttatcttgtcgtttcttgttacgggtatggatgttcctttcagcattctcctttcgttgatgaaggtgccgttgctgcttgtgtcgcttatggtcatcttgccaagcaggttgaacgagatgaccatgtggtgtctgctcacgttgtccctttcgtcgggtatgacaatgtcgcagtcgttgccgcgtcctactgttattttcttcatgcgttagtcaatcttttttatttcttcttctttatctgccttatctgctctgacagagcgtcctttatgcgccgcatgtagctgtactggtatgttgagtctttcttcatgtctacaactattgctgtaaggttgtcgtggctttcgccgttctgtatgcctatggcgttgactctttctgtcagatagcgcagggcttcgtcgggacgctttgaggcgttgaacatctttatgatctcaggttcgggctcacagttccatatgccgtcggagcagagtatgaatctgtcgccggccctgtagggtatcttctccacctggacagcagcctgcggccttatgcccagggcctttgttattatgttggagaagctcgacaggcgtgcctgctcttcggtcatcagatttttcgcaaccatctcgaacacctttgagtggtcgaaggttctgaatatcttttttccgcctctcagctggtagatgcggctgtcgcctatgtgtgtcagatatgccgcctcgggcgttatggccacaaccgtagtcgtcgtgcccatgccgcgcagcggcgggtcgttgagcgcgcgcctgtagatggctgcgttggcgttggcaacggcgctgcttacggcctctggtccaatcttctctgccggcacttcggccagggtctgcactatctccgtggccgctatgcgcgatgccgtctgtccgccgttcatgccacccatgccgtcgcatacggtcaggatgacagccctgccgctgaccatgccgccgtaagagtcttggttttcttcgcgtccgcctatgccggagcgtccgtatgcctcgcatgtgtctgttgaggctatgagttttatttcttcaaggccgattgtagatgtaggatggttatcgttcattgtcaagcgatatatgtttctgtatgatggtttacgggcgtgtggccggcgtgtcagaacatgcccgatatgacggtgcgtgacgagtcgtcgctgctgcccgatggtgagtagaagttgtcctgtatgtcagcctcggggcgggcgtctgctgccgttgcggcgcttgcagccgccatgcctgtctcctcaaagccttcgtcctcaaagagaccggccgcctccacgttgaatgtctttacgagcagcttgtagtgtctgcctatgcttatgacgtcgttctcgtttacggtcagagtgttatatctggcgtcggtgccgttcacttcggttccgttggccgagttgtagtctgttatggtcatgttgaagcgcacggggttgccctccttgcgtatgtagagtatggcgtgctcgggcgacacggtcttctcccttaggcacacgtcgcatccggctgcctgccctatggcgttgcgtccgagatagagcgggaacatctcgccaagcagtccgtgggatatggagaagagacagcccactatcacgcggttctgcatggttatctgccgggtgtctctgtcggccacggctgcgcctgacgcgctttgtgcctggaagccctgtccctgcgcgccggctatgcacgtgcggttgtcgtcgttgcctgaacgtgtgtagaggctgctgaacgctgcctcgtcatactcgctgcttccggggttgtcgtagtcgacgcccggtactattgtcttgttctgtgacataatctatcgttgttcagtgtttacaccatttgaaacctcatcagggtttcgcccatctttatcatgtcgcccgtcttcaggctgtaagccttgcccttgggtatggcatgcccgttgacgtatacggggttttctgtcttcacggatgttatctggtagacaatctgccctgcgggcgttttcacggtacgcatgcctgcatgtatgcggctcatggctatgtcgggtgttatctttatctgtgcggtgctgtcagagctcttgcgtcccaggttgtagtagttgccgtggggcaggctaatagtgccgaagctcatgccctggaagctcacctgcagtatgcccttgctcttctgctgcagctcgggtatgagccttgtcttcaggccaccgttgaggccctctaccaccaccgtcttgtctccctgtccgttgatgaccgacgtgggcagtccctggggctcgcctcctgccgtaacgggggcgcctgatgccggcgctgccatggtcttctcagagtgctgctcctgcagtatcacgctgaacggcactttgtatgagcatttgggacagcagaatgtttcgggcggacggcgctgaagttcgaatcgccggccgcagtatggacattttattatcattgttgctatagttgtttttattttacgtaaacgaccaccatgctgtcgtcgaatttaccccacatctgcggatgctgctggccttcagtgtcgctgattactctcgggttgacatagttgaacagctcgcgcgccgtaaccttcctgtcgccgttcctgtcggcggcgcccctgaaggcctcgagtatgcggctgatgaagaatgagttggtcatgtcgggactttcccacgaaacctcgttggcgcggctcgacgtgtagagcatcacgcttgtcttctgcgtgctgcgccgcggcgtcctgccgccgttgctgttcttcagcgttagtcctcccgaatagcatgccatggccagaatcaccttgcggcgggccttggccgacttcatgatgttctgtatctcgttgtatgtgatgaggctcgaggcgtccttggtctcgtaggtggtaagtccgccctgcacgccgtggccgctgtagacgaagattatctcgtcgttgggcgtagacttggcaaactccgacttgagcactctcagtatgtggtcgcgcgtggcgttggagttgagcagcatgaacacgctgctgccattgtatttgtagaagaagcgcgacacggcacgggcgtcgccaaccgagcagggcaggggcggggccacctgcggatacttgtattcgcctatgccgaccgacaccacgtaggtcttctgcggaaatgccgctgctgccagcaggagcatcagcgacagcgatatcagcttaatcatgcttgtgtgtttcataatatgacgtctttttaaggttgttattttcccttgaacttgcacttgcagctgctgttggggcatttgccttcggccaggatgttctcatagagctttgtgccgaagtggtagccgcacttggggcagcagtatttcttcctgaaaaagcgctcgttctggtccttgcgctgtatgaggctgcggttcttcacgtcaactatgatccacgagaagcctatggctatgatgctgcctgccaccttgatggcggcgctggcggtggtgtcgcctgcaaagtccttgggcagaagcatcgtcagcagtatggcaaagatacttcccagcgacagcgacgccattctcatcatcattatgttcgacgtcttggcctcgagcgacatcttgttgcggttgtaggtctcgtagatgttgcgcagctcgcttatgtccacggcgtcgtcggtcttgggcggctgctgcgccataagctcctttatgcggaaggtgtgtcttgccccgaggcgcacaagcgtgttgaggctcaccggaacctcgcccgtaagccgcttgaagctgccgctggccgacattatccatgtgccgttggtcgagttgttgtctctaagggtcattttgccggtggcctcgtcaagatgaaacaaggcatgctcgcggcttatgcttggttcggtcagtttaaatggctgattaccaaatttaccgattaagatatccatatctgtttaaaatatatttgctgtagatataatttgtttctttactgttctgtgactttttgtaaaaatgccttcgggacgtatgccgtcactatcgtgccgaagccattgatggttacccccacgcgggtttgcctttttacgcggcatacaaagccgctgaatccggtgaacttaccgcttattatcttcaccttgtcccccttggatatgtcgctctcagtgtcggagatgaacatcttgttctcgtcttcagtttcataccatttgaggaaagactccatctggtcgtcaggaactatgagcggctttattccgcttttgcctatcggacagccgttttcgtctttgttggggatataatagtgatgaagaaaactgagcccggggcttcccacgtattttcttatcattctctcggtggtgtgtacaaacagaaagttgggtatcaacgattctgttatcagcttgcgcttgccgcctattatgcgcattttgttggttacgggcaggaacacttctatgttttccgcctcaagtatgtctttggcttttctctcctgtccgtatgcagccctcatcaggaaccacacagcctcctggtcgggcttgtcgggcgggtcggcactttgtctccggacactactgggggacacccctttagctgatttacacgttctgggggacacatcggaggcaaatccggtgtttgaggtttgcccgcctcgccgggtgttctcattagacaacgagcacattttgtcttagcgtattgcggttaagcgctaaatacataattaaaagacacacccgtcaggaaatgtttgctcaattctcagataacaaagcttatgcctgtaaatatctttaagttagtaacaagttgcaggtaaatgtctttaatatgcaaaataagtaaattgtataccttatccggtgttagcctgatgggccttgcacttgaggccccgaccacattctgtcaccagcaggaccttatgcccgccgttatcagtgaactgtgttcagcttcaccggaggtaacagatatattagttcgtcgacaaaattaaataaaaatataaatataaacaaaagataacgcaaaataatgaaaatttttttaaccaaaattggttattagtattcggtctgtattttttatattgagctgattttggttagatttttcataggtgctttttaattcatagtttaaatgaggcgtggagatggcggtaaaaacttatgacaaaaatatttttcaatctggaaaataaaaagtaaacgtatgttaatgaaacggcagtaagaacgtcacttcattaacatacgtttgcagacaagctggaaaatgccactaaaatcagccatttctgggcctgaaaccataagtttgagcctcaaaaatggcaccttttcattcgtaaacgggccactttttatgcgtaagtgggccggttatgttttttaacacttccgctttttactcttattcgctgcaactccctgtcagtcagtgtcttaacaaaacgctccgttttttgcccttttctgccccaaaccgcggtatggcgaagagcatgcgtgttctgagagcgtcaaacggtcgtgaaaacatgaagaatgtttacaaattagttgcgttatattcatcatatttaatctgaaaaactgctatagtttattatttcataaataatataattgttcataacgtggctcggcaaagctaaattaaaaactttgttgttttttatttgtcattgctctcgcttttcactatctttgtacattaacttaacttgcaactgatttaattgaagatgaaacatatattaggactagacctcggcaccaacagtataggctgggctttggtgaaaagtgaacaagattgtgacgatgttgagagaataaacggtattgaggctgccggaagcagaataataccgatggacgcagctgttcttggtgattttgccaagggcaacactaaatcgcagactgccgacaggacggcggcaagaggaataagacgcatgggtgaacggcataagctgcgccgcgaacgccttaacagggtgctcgacgtaatgggatttctgccagaacattattctgctgcacttacgcgctacggcaaattcaaggacggagaggaatgtaagattgcatggagaaaggacgagagcggtcaatggacatttgtatttgaagattcgttcagcgagatgcttgccgactttgtagctcatcagcccgaatggctggccggaggacgtaaggtgccttacgactggactatatattatctgcgtaagaaggctctgtcgaagcctcttacgaaacaggagctggcctggctgctgctcaatttcaaccagaaacgcggctattatcagctgagaggagaggatgaacagaccgatgataaaggcaagctcgtggaatattatgcgctgaaagtggtcggcgttgaggacacgggcgataagaaaggtaaggacacgtggtttagcatcatgcttgagaatggtatggtttatcgtcgtccggctgccgaggctcccgactggataggcaagaccaaggagtttatagttaccaccgaccttgaaaaagacggaacgccgaagaaagacaaggagggaaacataaagcgttcgttcagaatgcctaaagaagacgactggactctgataaaaaagaaaactgaaaacgacatagacaggtcgggcaagaccgtaggcgaatatatctacgatgcgctgctggccgatccaactcagaagataaggggcaagctcgtaagaaccgtggagcgcaagtattataaagaagagctgaaaaagattatcgactcgcagaagcgctttatccccgaacttaacgacaatgagctttacggcaggtgcataagcgaactgtatcagagcaatgacgcctacaggcagtctatatcgtcgtgcgacttcacgtatctttttgtagacaacatcatcttttatcagcgtccgctgaagaacaaaaagtctttaatagacaactgtccttatgaggaacattcttataccgacagtaaaaccggcgaggtgaagacggctcccgtgaaatgtgtcgcaaagtcgaatccgctgtttcaggagttccgcctatggcagtttgtgcagaacatcaggatatttgaacggcagaagaagataggcgacagcgtgaagaccgacgttgacgttaccggcgagtttataaagagcgctgacgatgtggtgagcctgttcgactttctcaacgaccgaaaggacataacgcagagcgttttgttgggaacatatttcaaaataaagaagcccaagggcaaggacagcgattatccttaccgttggaactatgttgaggacaagacatatccgtgcaacgaaacgcgcgcgctgattctgaaaggacttaaagatgccggcatagacgaaggtttcttggataaggacaaagaatatagcctgtggcacatcctttattcggttgaggacaagcaggaaataacaaaggccatggaaaagtttgccgcgaaaaacagtctcggcggcaagtttgccgaagtgttcagctcgttgcctccgtttaataaaaattacggctcttattcagaaaaggctataaagaagctgctggcacttatgcgcacaggcaaatactggagtgccgacgccattgacaaacacacgcttgaacgtatagacaagataatcaacggcgaatatgacgagagcataaggacaagggtgagagagaaggcgataaacctgacggatgtatcacatttcagaggcttgcccctttggctggcatgctatattgtctacgaccgccacagcgagtcgaaggatataacacgctggaactgtccggccgacatagaccaatatcttgaccactttaagcaacactcattgcgcaaccctattgttgagcaggtggttaccgagactctgcgcaccgtgcgcgacatctggcggcagtatggcaagatagacgagatacacattgagatgggccgcgacatgaagaatccggccgacgtcagggctaagatgtctaagcgcatgatagacaacgagaacgcaaacctgcgcataaaggctatgcttgctgagtttgccgatcctgatttcggcatagccggcgtgcgtccttattcgccgtcgcagcaggagatgttgaggatatatgaggaaggcgcgttggaaagtgtcgatgaagtgcccgatgagataaacgaaataataagcaagttcaaccagacagacattaagaagcgtcccactcacggcgagataatcaagtataagctgtggctcgagcagaagtatcagtcgccttacacagggcgcaccatatcgctttcgcgtctgtttaccgacgattatcagatagagcacgtaattccgcagtcgcgttatttcgacgactcaatgtccaacaaggttatatgcgaggcagaagtaaaccagctgaaagaccgcatgctgggctacgagttcatcaaggcacaccacggcgagaaagttctgctcagttcgggcgagacggtcaccatacttacggcggaggaatatgaaagactggtgcagcttaacttcagaaagaatcctgttaagatgaagaaactgctcatggacgacattcccgacaagtttatagagcgccagctcaacgacagccgctacatcagcaagaagataaagtcgttgctctctaacatggtgcgcgatgaaggcgagcaggaggatatatcgaagaacgtgatagcatgtaacggagcgataaccgacaggctgaaacgcgactggggcgtgaacgatgtgtggaaccatatcatactgccgcgctttgaaaggctcaacgctgttacaggctccgaccggtttaccacgacaagcaccaacggccacaccatacccgacatgccgctgaacctgcaaaagggatttaacaagaagcgcattgaccaccgtcaccacgccatggacgccatagtgatagcatgcaccacgcgcagccacgtcaatctgctcaacaacgaggctgccatgtctaagaacaacgccgtgcgctatcagctgtcgcgcaagctgcgcagatatgaagacaccatggtgacacgaaacggcgagatgcgcaccattagcgttgcccgcgagttccttaagccgtggcctacgttcaatgccgacgttgagaaggctttgcgtggcatagtggtcagctttaagcagaatctcagggttataaacaagacggtgaacaaatatcagaaatttgtctacaacgaagagaaacatataaaagaaaagaaggcggtaagacaggaggagcgcaacggcaggcatctccttgccatacgcaagccgatgcataaagacacggtgtatggcgaggtgaatctgaggcgcataaaggaagtgtcgctcaaggacgcagtggcaaatcctaaagccgttgttgacaaagacctgaagaaaaaactcatggcaatgatagagcttggctacgacctgaagcgcatcaagcagtattttgacgacaacaaggacgcatggcaggatgtaaatctgaagaagataaaggtttactatttcaccaaagacaccggcgaccgctattttgccacacgctttggcaacgaccttgttacgctgttcagcaagataaccaaggctgatgacgccaaaaaacagatagagcggataaccgacacgggcatacagaaaattctgaagcgccatcttgatgccaacggcggcgactgccaaaaagcattctcggccgacggcatagacgagatgaaccgcaacataacacagcttaacggcggcaggccgcataagcctgtatataaggtgaggatatatgaaaaggcagataagtttgccataggcaccaaaggcaacaaggcagccaagtttgttgaggctgccaagggcaccaatcttttctttgccgtctatctgaaagaatatgaagacagcactacaggcgaaacgataaagaagcgggtgttcgacactattcctctgaagaccgttatagacagactgaagaacgggcagactcctgcccctgaagaaaaagacggagccaagctgctgtttgtgctttcgcctaacgaccttgtttatttgccaacggaggatgaagtaaagaacggaacgataaataggcctttggacaagaggagaatttataagatggttagctgtacaggaacggagtgttattatattccctttatagtagcttcgccaatagttgataaggtcgaatttttctctttgaataaaataggaagagctattaccggcgagatgataaaagaaatatgtattcctattaaagttgaccgtttaggaaatataaccgaggtaaacaacgaaaagatatgattaagcgcacactatgtttcaccagtccggcatatctatctctccaagacgcgcagctcgtaataaagctgcctgaggtggagaagagcgacctgccggacagcatgaagagagacagcacaagaaccataccggtggaagacatcggtgtggttgtgctcgacaaccggcaaataacgcttacgcacggactgctcgaggtgctgctcgaaaacaactgtgccgttgtaacctgcgactcgcgcggcatgcccgtagggcttatgcttccgctttgcggcaacacgctgcagagcgagcgcttcagtcggcagatagaggcatcgctgccgctgaaaaagcagctgtggcagcagactgtcaaggccaagattgacaaccaggcggcagtgctcgacaatatttcggggatagaaacaggatgcatgaagcggtggtcggccgatgtgcgaagcggcgaccccgacaatcttgaggggcgtgcagcggcttattactggaaacagatattcagggatgtttcagggctatcgggcttcacccgtggccgcgacggcatgccgcctaacaatcttctcaactatggctatgccatactgagagccgttatagcccgctcgctcgtgtctgccggcttgctgcccacgctcggcatacatcatcataaccgttacaacgcctattgtctggcagacgacatcatggagccttaccgcccctatgttgacagacttgtgtatgacatggcggcaggacacgacactgaagaatattctgaactgacgaagccgctaaagatgaagctgctctccatacctacgcttgacgttgtgattggcggccggcgcagtccgctgatgattgccgccacgcagacggcagcatcgctttgcaaatgtttcagcggcgaactgcgccgcattgcttatcccgaactctaataagagtatggcggctgggcattgacgaaatatgtttctaataatctatactatggaccgattcagcgaataccgggttatgtggatacttgtatttttcgaccttcctaccgacaccaagaaagacaaaaaggcttatgcgctttttcgtaagaacttgcgccgcgacgggttcaccatgtttcagttttctatctatgtacgccattgcgccagcatggagaatgccgcagttcacataaagcgtgtaaagtcgttccttcctgaatttggcaatgtgggcatcctctgcataaccgacaagcagtttggcaatatagagatattttatgggcacaaacctgtagagccgaatgctccggggcagcagcttgagttgttctgagacggatgctttttataacctcttacaaataaaaaatcccgtcgtaaggcgggattctcgttttatgcaaacatcattttttgttttctgattttctttgtatttgtctatgcatcagatatttacgcatatcgtgatgtttgttactatgcaaagataagaattttaaagcaaatcacaacaagggtagtcttgatttgtctatgcgtaaagatgtttgttactatgcaaagataagaattttaaagcaaatcacaacctcccgaagtcttatttaccgtacctttccgatgtttgttactatgcaaagataagaattttaaagcaaatcacaacagtcgttgcagcgtcaaatgtctaacgaccgatgtttgttactatgcaaagataagaattttaaagcaaatcacaacaagttcagggtaacaatacttggcctcctgatgtttgttactatgcaaagataagaattttaaagcaaatcacaaccctgctgcaacacctttctttccgtttcccgatgtttgttactatgcaaagataagaattttaaagcaaatcacaacgcatgaactatatagatgttgttcttgattgatgtttgttactatgcaaagataagaattttaaagcaaatcacaactatctttaatttgctttattgtcaaatcagatgtttgttactatgcaaagataagaattttaaagcaaatcacaacaactatggatgataaattgaaacaagaagtgatgtttgttactatgcaaagataagaattttaaagcaaatcacaactaactcttgacataatccctgaagctccgagatgtttgttactatgcaaagataagaattttaaagcaaatcacaacccgatttggcttcttcttcggctttttgcagatgtttgttactatgcaaagataagaattttaaagcaaatcacaaccgtaggcttctttttcttgattggctttagatgtttgttactatgcaaagataagaattttaaagcaaatcacaacacaatagagaaaattctgaaactgagtaagatgtttgttactatgcaaagataagaattttaaagcaaatcacaaccaggtcgtaatattcctttatactgccgtcgatgtttgttactatgcaaagataagaattttaaagcaaatcacaacattacttcattatatattatactattatgtgatgtttgttactatgcaaagataagaattttaaagcaaatcacaactatagacacccaccgcatttttatcgtactgatgtttgttactatgcaaagataagaattttaaagcaaatcacaaccggaatgcatctccttacttctgaacaggtgatgtttgttactatgcaaagataagaattttaaagcaaatcacaactctacaagcatattagatattaagtccttagatgtttgttactatgcaaagataagaattttaaagcaaatcacaactagtttcgatatgttctataagttcggaatgatgtttgttactatgcaaagataagaattttaaggtaaattatcgatttaatgattaatattgtttgcaataaaaatatccgcagcacctcaatggaagagggctgcggatagtaattcttcagatgtccatgcggccgctgttggcgtggcggcccgccgtatgtgtctgtatgggctacattaagtccatgtcctgataagtgtcgctgtcaggtgtagggaatattgtaagtgagatgccggaaaaagtcatacgccctgtgatgtcagagataaagctcacattcttttcttgttgagcatactttcttcagcattatgtttgctgcagagaggagcagtctgttcacctttcttgcgccgtgaggacatacggcggcgcagcgcatgcatgatatgcaggccttcttgtccacctttgcagggttgtccgtgctgatagcgcctgtcgggcatttggaggcgcacaggccgcagcttgtgcattgggctgtggggcgcggcacgaagcctacgcttccggccttcttgtatggtctgttgccgggtattgcaggcgtggcagagtcgttgctgttcagcttggctgctatctgttcggcatatttgttaagtgcggtataatcgtcctggtcggggcggttggcggcatatcggcggacaatagagtgttcggctatggctgccacggcagctacgacgctgaatcctgccttaatggcgcagtcttgcagttcggccaaagtgtcctcataggcacggttgccgtatacacatactattacggcccttgcgccgttgccgctgatctgcgttatgcgttcagctgccggtgcaggcacgcgtccgccatacgacggcacggctatcacggccacgtcgtcgccgttgagagcaacgcccttaaagtcggccttgcggtcggtaaggtcaatgtttactatgtcgctgccgagctttgcggcaataaatccagccaccttttcggttccgcccgtcgggctgaagcatattttatatattttcattattctttgtctgatgtttgttttgttgcaaatataataattttaaggcaaagtcagatgaaaaaacttttctgtttttatttgccgttgctctcgcctttggctatctttagataagatagtatgcggctcggcagtgccaaatgaaaaaaactttgttgttttttatttgtcgttgctctcgcctttggctatctttgtagcagaaatggtttagattatgaaatacacaacagataaacgatattcggagcagggcatggaagggagatgtgccgtgtcgtctcgcaataagattatttgtcttttgctctttgtcgtaggactgctcattctcggcggaggcgtctacggctttgtgtcgctgtcgaaggcttcaggcgctttgggccatgccaccggcgtgatagacaagctcagctataagagagaataccggcaccggaagaggcgtacgcactgggagatgcgcataagctacgagacagagcgctacggcaagacgtatatatcggagaagtgctatctgccattctgtagtgaaggcgacagcattgaggtgctgtataatccggataacccctacgacgtgcgtattccgggcaatgagcgctgcatatggtttacgctgctgggcgtaggactgttatgtatgtcgggcgtgtggctgatgctcaggccgcagcggcaaaaagagcggcatgcttagcgccatataataaaataaatgttctttatatattgcattatgtccgttttgctatgccatataatgactgagcaaaacggacataatcatgatttttgttttgataggggatgatgtcttgttctattttttgcctttcagcatcttcagcgcagccgttagtgccgagtcggtcttgcccagtgcgtcgctttcggtatattctatgcagacgtcaggctgtatgccggtgttgataatatcggaaccgtcgggattggtgaagcggcattctgctatcagcgacgagtagccgtgcccccagttgcagaatttaggactgcttatcacgcccgctgtcggcgtgcctacaatcttgccgagcgacaggttcttcattgttgcggcaaagtcttcggctgccgatgccgtaaatccgtcaacaagaattataacgggggcggttattctcaacgagtcgggcgtgttgttcttcatcacgaaccagccttcctgaacgggctgcatggccacgccgttatagtagtcggccagttggctgacatttttgccgtacatctcgtaggccgtgttagccactcttgtcataatctttaagccgtcgaatatgttagtgtttctgtcggcgatatgtcttattatgttgtgccacgactcgtctgttcctcctcggtttccgcgtatgtcgaatatcacgcctttggcagacaagaaatcagagaggttattctcaaaagcgctttttattgtgccgggcaacgtgaacgtgctcatcttcatatacatgatgttgcctggcagcttctttatgctgcattttgccgtgtcgcgcctgatgctccagtcgtcagtgtcgtcgtagttccttatgcttgtcatgagctttgtgtttatggtcttgcccttaggagtcgttatctcaatatgatattccgcgccttccttgcctgtaaggaatatgtcgagagcctttctctttctccattccatgttgggagccgaaacatacggatagacatgcttttgcagatattcgtcgagcgtcaggccgtccaccttcttaatctcgctgccaacaggcaacagcggttttagctgccttgtagtgttggttatcagcagtttgtctccagcccatgtaagtatcagcggcaccctgtagcgtatgatgttgctgtcgttaaatcgtgtgtgtccctcgttgaagtgagccatgaactgtgtcattaagtccgaaaactcctgttcgctttcggcattcaagaccttagtaagatagcatctgtaaagactgtcaggattagtctccttgaatttctcaggaaatgcaaagttgttgcttatttctttccatatagaagaaagtatatatattctttcgctcagagtagtgtccgccttggccgtgtatggcacgatgcacattaaggccaaagccgcaataattattctcctgatcatgttacgatgtttttgctgaatgtatagagttaagttgactatgcaaatcttcagtatgaattatgctgactaatatgtgaaacttgtagccttaaagcatccccgttttaatcgccacaagagtaatcataattggctgacgccgaactttgtttttcaattctcaattggcaaatgccccttcacgcctcgatgttgtatttctgaatcttgttatacagcgtcttgcggtctattgctagcagctgggccgtctttgtcttgttgccgcccgtggcgcgcagggcgtctattatgcgctgtcgttcggtctgctcgtcgtgcagggctgtgggctcctgtctcatggggcgcgtcatggccttcgacagctcctcggtgccgatgtgtgagccgcgtgtaagcagggtggcacgcttcaccacgttgttaagctcgcgcaggttgcccggccagctgtatcgcgcaagcatctccgacgccttgtcgtcgaatcccgccacgttgcgtcccagctcctcgttggcctgactgacaaagaggtcggcaaacagaaacaggtcggcgccgcggtctttaagttcgggcatgtatatggtgaactcgttgatgcggtgataaaggtcttcgcggaattttccgtcggcaacgagctgcgccaggttgccgttggtggcgcacaccagtcggatgtccacgcttatctccttgggcgagcctaacgggcgcaccttgcgctcctgaagggcacgcagcagctgcacctgcacgtcgtaggtcaggttgcccacctcgtcgaggaacagcgttccgccgttggcctcctcaaaggctccgcgcttgtcggtcgtggcgcctgtgaaagctcccttggtgtatccgaagaactcagacgctgccacgtccttgggtatggctccgcagtcgagcgcaaagaagggcttgtcggcgcggctgctctggctgtgaatgcggcgcgccacatactccttgcccgtgccgctggctccgagaatgagcaccgacatgggcgttggcgcaacgaggtttacgtagtcgtagagctggcgcgaggcttcgctcgtgccttctatgtatttcttggctgccgtgtgcgtcttatgttctgccgccgcggtgtttttgtcggctgctgatgttgttgctgtcgtcggtgtagcgcctgctgtggcggctgcatcggcgttgtggctgtcgagcgcgtcgtttatcttttgcagcaggatgtcgggctgtacgggtttggctatatagtcgcacgctcccgacttcatggccagcacggcgttctgcacctcggcatagctcgtcatcacgatgaagggcgtctgcatgttcttcttgcgcagccagttgagcagaaacagaccgtcgtggtcgggcagacggaggtcagacagtatgaggtcgaagccagtgctgtcggtcacggcccgtgccgcggcgcttacggagcttgctctctcaaccgtgaaaccctttttgcgcagccatgtctgcatcatggttgcgtatgtaaggtcgtcttcaactataaggatacttgccatgtaggtcagaatgttgttatgataacaactgcgtgtcgtcgtgcaaaattagcttttttattatacatggcgcaataaaccgttgttttttattgctttttaaaactttgagattaatgtctgcggctttcagatatattgatttttgattattcgactgctatttgtgctttgcgttgcgtgcctcgccgcaaaaaatgttatattagcggaacataatcagcaagtgattgaaaatcagaaaaatattaatatcatgaaaatcaagattacattactgtttgttgtcattgccgtgcttcagccgctgaggcttttcgcggcagataaaggcaatgcaggcaagccccgcgtgatcgtgcttacggacattgagaacgaacccgacgacgcaatgtcgatggtgcgcttcctgacatactctaaccagtgggacgttgagggacttgttgccacaacgtcggtgcatcagaagaaggagacggcagcatggcgcatacgcgagattgtgacggcatacggcaaggtgagagacaacctgctgaagcacgagaagggctatccctcggccgactatctgctgtcggtgataaaggagggacgccccgactacggcatgcacgccgtgggcaagggcatggactctgaaggctccgaactgataatcaaggccgtagaccgcagcgacagccgtccggtgtgggtgcttgtgtggggcggccccaactgtctggcgcaggcactgtggaaggttaaggccacgcgcagcgagagcgagcttaaggcttttgtgtcgaagctccgcgtgtatgccatttcagaccaggacgacagcggcgtgtggataagaaagacgttcaaggacctgttctatatcgtcagtccgggcttccatcgccttggcggataccattacgccacatggagcggcatcagcggcgacaagtttcacggccgctttgccggagccgacttcagcatagttgacaatccgtggctcgacgagcacatacgcagcaagggcgagctgggcaagcagtatccctacatgaagtttctgatggagggcgactcgcccacgtttatgtatctcattgacaacggactgggctgtgccgagcatcccgactggggcagctggggcggacgctacgagctgtatcagccgcgcacggagcgttggtttattgagcctgagacaagaccgatatggaccgacgcgcaagacgaggtgatgggctgcgacggctcatggcacacaagcaacaaggccacgatatggcgctggcgcgaggcttatcagaacgactttgcagcacgcatggactggaccgtgaaggactacgacgaggccaatcatccgcctgtgcctgcactggcatgtccggcagagatgacagccgccacgggcgacaccataagactgagcgccctgggcacatctgacccagacggcgacagcctttcgtacagctggttctactatctcgagccgggaaccttcaacgtggctacggcgcgcacgggcagtccgctaaagatagtgggccacgacagccgcgacgcttacttcatagtgcccaagggcggccgtctcggcacgatgcacatcatactggccgttaccgacagcggcacgccgcgccttacgcgctacgcccgtgtggttgttacagtgaaataaaaaaacattaaatacaacttaatattatatgcagaaattatcaatattgttatgctccttgttgcttgcggcttcggcatgggcaggcagcaaggctgatccgggcaagcaggccatagtgctcgaggagtttgtgttcatgaagtcgcccacgcgcgactgtcacgcatcgtctataatggaactgtctgacggcactctgctatgcacatggttcggcggcacacgcgagcgcgccaaggacgtaaagatatggctggcgcgcaagcccaagggcggcacgtggcaggagcctgtggccatagccgacggcgaaggcggcacggtgttcaatccggtgctggtgcagctcaagggagacgacatacagatatattatctctgccccacgatagacgagggccgcgtgataacctcttctgacaacggcctcacgtggagccgccccgtggccctgcccaagggcttcgtaggtcctgtggtcaacaagcccgtgtatctcgacgacggcaccatcgtggcaggagccagcctgcaggacgcgcccggcaagcgcatacacgtggagcgcagcaccgacaacggccgcacatggaccaagacgccggcgctgagcgatcctgccggaacaaaatataagctcattcagcccaccttcctcgtgcactcgcagaagcgcctgcagctgctggcacgcccca

SEQ ID NO: 1075 - DNA, 24614 bp, synthetic construct
  misc_feature 1..24614: note = Synthetic
  source 1..24614: mol_type = other DNA
aaaggaaaaaagattaggaacgattcatcgcttctagcaacttcttgtcgaggagcggatagacgcggttcagttccacgagatccttgacggcttcaagatttgcgtagaattgctcaatatggtcgaaatcgaccgtgtgaaatgggggatttgtatagaggaatccacagcgaaccagattttcaaaagccctatgggtgagtttgagcattgggaataggcgcttgtaaaccgtcaaaaaatctttggccgaaacgaacattccgttttgcttttcgtaaccctttgttttggccgccgaaacgaaggcggtaaggatcgtctggtcgtttgccgaaagcagggactggggaagctttttcccggccatgcgtgtcaaaagggtgcggtaaagaagcgccgggagattcttccggtaaaaatgaatttgtacgtgttcgcccggaagcaattctgcaatgcctaaaccacaaagtccgcggagcagttcaaacgtatcgttgtaagcaagtccgttgacgatgcgcagatcgttgatcagcggttcaagatcgaaagtgtctgatttgacgtggcgaatgtaccttgcgcaaagaaaaatcagcgaaggcaatgcgtgaatcttgtcgagctttgctttgttcttttcgagccgttggactcgctgattcaaaaggattaaaagctccgggaaccagatcggaagattttgggctgcggcctggaaatctttgggggagatctcttctacttccacgttttcgatggcgcggagcgtgtaaggatgggcatctccgttcagaagggaatcgattccgatgacggatttgggcccgaccgttccttcgttgcggaccttggatccttctttcttctggatcatcagctcgcccttgcgaatcatgaagagcttgccgtctttttcgccttccttaaaaagaatgtcgcgcgcgtgaagctttttcatagaagcccccgaatgttacgttccccatgaatcgcgcacaggtagcggtcgagagactcggtttccaaaaagagtttgcccggttgatccttgacttcggaaaatataccgagttcgacaaaacggatcacgatgatgatgtccgcttggggaatcgctgcctgaagatattttaaccattcatcgcgcgaacgtgtaaaaagggaatcttcaaggcctagaaattcgagacaggaacgttctctcgttgagagcccgaatgcaggataggtttccccgtgacgctccgcgtttaaatagtcgacaaggatatggaaaagcttgggctttaccaggtgcatttgggcgttgggctttccggctgtatccggttttaaggtcacaaaacggcgacggataagctccttgagcgcattcgccgtttcttcctttccggagcgggtctgccacatgtattccttgatgatttgggctgtgtcgagaggcttgttttcggcacggagtgccagaaacttggcgaagctttcgagcgtgctgtggtaaatcggctgagtcaccgattgctttaagcgggtggattccttggaaagggaattgatagccgcaagcatccatgcaggcgttttctttaagacttcttcaaggcccttttgatcgatctggattaaaaccgaatcgtgccctgcgcggatatgataagcgaaaggcgttccatccatcacggatgtaacgcctaccaaagatccttgcggaatggacttcagaatctgcttgtcatcgaaggcttcaagttcaccttcttcgacgtagaacattttcgaagttttttcgccttttttaaaaacaagcgaacccgcttgaacggaaatacgctcaaacgggaaattagggttgcttgttaccggattgcccgaagtcaacgggaaccgccggttaaattaaccttcgcgcttttcgatacgagcggccttgccctggaggttgcgcatgtagaagatgcgagccttgcggaccttaccggcacggttcacttcgaaggaagcgatacgcgggctgtggagcgggaagatacgttcgatggaaacgccatcggtggtcttgcgaacagtaacagttgcgccaaggcccgtgttcttcttctgctgaatgacaacacccttgaacggctggatacgttccttggtgccttcgagaaccttcacgttcaccgtgatggtgtcgccagtgcgaatttccggaagatccgttttcttgttttcgttctgaattgcttcgatgttaagggacatattctgtgacctctgttattgtgtgccaaatttagtatctatttgcaatttttcgtagatgtcagggcgtctttctttagttctttttaaagattctgcccttctccactcggaaattcgcttatgatgccccgaaaggagcacctcagggacggattttccttcaaaaacctccggtctggtatagacgggccagccaagaggtccctgagcaaaagagtctgtttctccggattccttgtgaccgagagctcccggtaggagtctgaccactgcatcggtcaaaagcatggctggaagttctccaccgctcacgacaaagtcgccgatagaaatttccatatccacgtaatcttcacggatgcgttcgtcgatgcccttgtaatggccgcagacaagaaccagatggctttcttttgaaaggtccgatacgatcttgtgggtcagagggacaccgtccgccgtgagataaatgaccttgcctccgtcttccttgacgtgcgtacttttgatggcacgggccaagggttctggtcggagcaccatgcccggttcgccgccatagggcgaatcgtccacctgtccgtaatcgtttaccgcgaagtcacggagaaagatggtgttgaacgaaaaaagctcgttcttttgggctctgccgacaatggaatgttctaacggtgcgaacatttcggggaagatggtgatgcattcgattttcatcatccgaccctcatgtcaaaaagcttggcgagaaacgcttccgaaattcggacggtgcgcttttcgctatcgatttcaccgacgcattccttgatccacggggcgaggatctcgcttcctttgtatgtaaagcggaaagcgtttacactaggaagctgctccaccgaaaggacgctcccgataaccgatccggagtctccgatcacggagaatccttcgaggtccgagaagtagtatttgccttcgggtgcgggaatccgttcttccatgggaacgctgatatctgcattcaccaagcgctgtaccgcttccgaagaatcgaagcctttgaacttgagaatccagatgtcgtttgcaacgcgggcgctttcgacttcgagcggaatgttcgttttgtcgacgagcgcatagaccgttgtgaactttttacaacggttcaaatcgtgcgtttgaggtgcacacttgatttcgcccttgaaaccgtgggttctcatcaaatggccgacgacgacctgatcatttgcgtttgcgttttccatgtcttcaaaagaaaaccccgtgcattttgggcggcacagggttttgcatgactaagctttgaattaagcctgagcgtctgctgccggagcttcagccggggcttcctttgcagccttttcagcttcgagacgagccttagccttaggaccgagctttgccttcttttccttggcagcacgcggagtagcgttcttgccttcgatagaacggccagccttgagttcgtggaagagatccatgatgccgaccttcttgagaagggaagcaacggtgtcagacggctgagcgccagtctggagccacttgagaaccttttcctgttcgaaagtgatcaccggctgcttgtggttcggatcgtagaagccgacctgttcgatgaagctatcgttacgagccttacggttgtcgatgacgactgcacgatagacggagttgtgacgcttgccaaaacgggcgagacggataactgtagacattaaaagtacctcttgttgagttcgagaccaaatatagaaagaaattctaaaaatccgtcatttaataacaaattaacttaaaaaagtttaaaattggcgattttacgcgaattttcaagattttttgcggtccttccagacttcggtatggaaaagttggccctgcgaaacgccgtatttctcttcggcgccgatgagctttgaagcagtcgcaagcgaaagcttgccacggatcgcttgtgcgtaaagacgggtcttgtcggcgacttcggccgcgttttcttcgagcatttccaagcggaacctgtaaactccgcattttttgaaggtcgggacaaggttcagcgcggattgcggacgttccagatagagcgtgttgcggcattccgcgtcgggaacgagcgaatgcaaggctcccttgtggtcgagaatgtcgatgtgatgcttggaacagatctgcttgcagtaggggaacctttcggcttcggtcaggttggccgcgtaaaggcagtgctccatataaaaggcaggcaaatgttcaaatacggagacttcaaagtgtgaacctccgaagttttcgagcagcttttccgttccttgggcgttcaaatcgagcgacggatgcagcgaagaaagtccctgcgaaaggaaccattctgcggaaagaacgttcgaaacgttcaagctgtaatcgccttcgagcggaattccggaatcttgcaaataaacgagggcgcctggatttcgcaccagaataaagtccggcttgagatcgacgagtttctttaagttcttggtttcgccctctttcaaaacgcggatcgtggcgacgcccacctgaaaaccgagttcgcgcacgcgttccatcggcttcttgtaatcgacgccccagtcgaggtccagaatcacgcggtcaatgtccaagccttggagtttttccagctgcttcgggctgcggacaagcagggtaatctgttccggattctgttctgaattttgaaatgcggatcgggcgtgcgcgattaaagccttgccttgttcggcggaagcctttgacgggtggctgtcgaaacgggcattgtcaagagcttcgacggctgccttccgcagattgcgcacttctttgtcgacgacaaaagcgtcttttggaatgtccaagagaatgtctttggcaaagtaagcggatccggtcagggcggaaagctctttttgaatgcgctccgaattgtcgcgaggcgttttggcacgttccagattcttttcggactttgctacgaccttgtggccgtctagatcttgaatttctaaggcgagaggttcgccgaagtctgcgaacaggcgcatctttatggggaacttgagctcgttttcgcgttcggcgaatgtcttgtgcaaacgcttttccattgccggggaatcgttgcggaaggcgctcatgcccggatgtacgcgtcgaaaatcaaagatgttcccgaattcgagaatggttctgttcccttggaacttgtaactaaaaagacggctcccggcagaattttcttctcccggatcttcaaaaaggatgccgtcgcccgcttcgagcggatgatgcccttcaataaggacgctcttgcggtctaccttgagaacttgtccaaggaacatcccgtggtgattcgaaaaggaaccgttcacgagtaattgctgattgactccgcggagccagcctgcgtgcaagcctcttgaaaaaaggacttccaaaggttcgtggttcttttcgctgacgtaacccttatcgagcttttcgcggaaggcgatggtcgttgccgccacgtattccggactcttcaagcggccttcgattttaaacgatttgactccgatcttttttaattcatcgagttcatcgattgcggaaaggtcgcgcgggctgaacaggtagcgcttgccgtgcaaatcaaaaggctttccgtccacgagcattttgtacggaaggcggcagctttgggcgcactgtccgcggtttgcagaacgcccgccgatgttttcgctggttaagcactgcccgctgaacgaaacgcaaagggctccgtgcacaaaaacttcgagttcgagcggagtacggctcgccacgttctgaatatcttcaagcgacatttcgcgggcgagaacggctcttgtacagccaagacgttccgccatttggacgccttcggcggaagcgatcgtcatttgcgtcgaagcgtgaatttcgacctcgggcgcgaccgatttaaaaagccgcatcagtcccacgtcctgaataatcatcgcatccggttcaagggccgcgatgttttcgatgaattccggaagggaatcaatttcctcctcaaaaaccagaatgttcattgcaaggaatgtccgcacgttgcggattctcgcataacggatcatttcgcggacgtcgtcaaaggaaaaatccagagatcttccgcgggcgttccagtgaggaactccaaaatagacggcgtttgcgccgttttctacagcggcgaagaacatttccttgttgcccacggggagcattaattcaaaattttgggaggcatccatcggtcaataatttagaaaatgttccaaatattgccattcatcggaaaatagtggtttttgattttaaggaattttagattaatctaatcaaattcgtctacaaggtgtgtttgtctatgtggtcttgtggtttggctaaggttttccccatttgcgcgattttcgcgtccgttgtgcttgcgaatacggattcttcggccgtggaagcgtctgctcccgatacttcgtttcgagtcaaaacggaacattccctgatgttcattgggatggtcttgccgcaccgttcgctccgaaattcggaatcgttgcatgattggccgttttttgcctttgcgtctccgctcgggtggaattcgagcctgaaaatggaaaaggatgtaggaggccttgtaacagtaaaagggatgaccggattgggattgactctgttcggtgtagggctccgtgccgatgcgacggtcgcccttttgcgcctgcttgaactcggcgtggagggaagcgtcggttctgcggtgaattttggatcctgggcgacctttatgggggtatatgacccggataaacaggagttttctccggatctatttttaacggaattttcgtatggagtcaagtatcatgccggaatgacgctcccgctcatgcttgtgctcccgaaatcggaatggacgagagttttactccgcccgactgcagaactcacgtattctgcctatacgggtgcagaagatggggaagtctggaaagcgggaaacgggaactatgtgaacggcttccattaccgttggggtggaaccttgatgtatatgcttccgtttaagcatgttccgatggcaatgtttgcggcaaatgtcagcggatttttacacgaatcggattttgatgcggtatacaagccttatgatcccacgttcaaaaccataacgttgaccccgatgttatcgatcaaattcgacgataagtggggcggcatgctcatggggaatttttctagggaccgcaagtatcggcattaccactttgaaagcggaacggaactttctcaggaacgcgttggctcggaatggggcttgaattcggttattttgacggtgaaccgcaaattttaatcgaaataagcgtgtaactataaatttgggtttggaaaacggcgtaaaaatctagtttatacgcaattcatattagattcgaggtttttatgcgcaaagccctttttgcaatttctgccttttcggttgccgctttccttgccggctgtggaggttcttcgacgtccgcggcggatgagtctgtttccagttcgagcgaagcgctcggaacgatttcgagtagttcggaaaatggtctttcgagttccggcgaagaaatcctgtcaagcgcatcggtagaaatttcgagcgcatcggtagaatcttcggcatcggcttcgacaccgcttgcggtgactcctgacgaagacggcttttatgacattgcggatatttacaaagcggcgccggcgacaagcaagctcgttttcgtgattcgccatgcagaacgtgaagacagcctgggacagctttccaatttgacggaagtcggcgtagaacaggcgaaggctttgggggcaaagcttgtgagcgaagaaagctttttctacggctctacggactttgtgcgtactcgggccactgcgcagtacattgcggaaggccgtggcgaagtcgcaactgtcgataccctcgatgaaattctggaaggcaactactttattgcggtatcctcggattctttcgatacatatacaagcgcccatggcggaagctggacattcgtttcgaggtgggcgtataacgataccgttgcgaacccgacggtgaacgccaatttgaaacaggcttatgcgacctatttctacgatctttttgaacgcaaggaccagttcgtttcggaaaatattgtagcgaacattccgaactggagccgtgtcagcgtgctcgtgacgcatgacgttctggtggcaccgctgatcattgcggtttcgaaccgtacgatcgatttgcagttctttgcttcgcgccgttgggcaaattacctttcgggaattgccgttgtggtggatgaagctggcggcgtgctgacttacccggtgcgcggaaccgatgtcggttatatgtatccgtagaatgttatattgatgggcatgaaaacgattgcccatttttttagccgctttatggcgttaatcgttcttgccgtggcggcgcttgctctttttgttccgtcgagcggtttttggatttcgctcaaggcggtcaattatcttttgatggtggtgatgttcggaatggggctcaccatgaagcttgacgattttaaggttgtctttacgcaaccgaaagatgtcttgatcggctgccttgcgcagtttacggtaatgccgcttttggccttttctttggggaaaatctttggactcgaagcgggacttttggccggtgtgattcttgtggggacatgcccgggtggaacttcgagcaatgtcatcacctacatgagcaagggaaacgtggccctttcggtgggaatgaccagcgtgaatacgctactttcgccgattgtgacgcctgcgattacatatctgttgctccgcacttcggtaaaggtcgatatgctggccatgtgcctttccattttgcaggtggtgatcttgccgattgcgcttggctttgtggtgaacaagtttgccaaaaagttcgtggcgaaggtaatcgatatattgccggttatttcggtgattgcgatatgcctgattgtttcgactgtggtttcgcacaatgcggaaaaaattttaacgacaggagcgattgtttttgtcgtcgtcattttgcacaaccttttaggctatgcctgtggctttggccttggtaaagttttgaaaatggatatgccgaagacgaaggccctgacggtggaaatcggcatgcaaaattctggacttgcaacatcgcttgcaaatacagcgttcccgagccttgccatggcgacggttcctggcgcaatcttttctgtttggcataatatttcgggcgcgattctcgctaacattttgcggaacagggaataggcaacgacggtgttgcggtggggaaaaataaaagagagcgacgctcgcgcgccgctctaaatgttttcacaacggaataatccttattgtgaattgctttcagatttgtatccacaatatagatcagttttttgtaaaagtcaataggcttgtgtaaaatcttgtgacataaattgtcatttcgcaaatgtatttttattagtatttgccttgtagaatatttggtaaatatgcgtaaaaatgcctaaattaatgaaattttcgcgttttgggcggtaaaagatatatctttctaattggaaatattaagcataggagtgcttagatgaagaagattttggggctcgatttagggacgaattcgattggttgggctgtggtgaatgcggatgaagtaacacgtgatgacggatcacgttacttaaaacctaacggtatctcagctgctggcagtagaataatcccaatgtccgcagatattcttggcgattttgagaagggtaactcaatttcacaaactgcagaacgaactcggatgcgaatggctcgtcgcttgcacgaaagagctcttttaagacgagaaagacttctgcgtgttttaatccttttggattttctgccgaagcattttgctgataaaattgatcgctatggtaaattcactgacgatagtgagcccaagttagcatggtgcaaaaatacagaaggcaaatacgaattcattttccaggatgcattcaatgaaatgctagccgaatttaaagacaagcgaccagaaattgtcgaagaaggaaagaaaatcccctatgactggaccatctactatcttcgtaaaaaggctcttgagaaagctctttcaaaagaagaactctcttggttgttgctccagttcaaccaaaaacgcggttattatcaattaagaggcgaagaagaggaaattcctcaggataagaaaattgaatatttagcgcaaaaaattgttaaagtagaagcaacagatcagaagaaaggcgatgacgtttggtacaatgtttatctagaaaatgggatgatctatcgacgtaccagtaaagccccccttgattgggaagggaaaatcaaggaattcattgtaacgaccgatttagaaaaggatgggacgcctaagaaagataaagaaggaaatattaaacgatcctttagagctccacaagaagatgattggactcttcttaaaaagaaaaccgaagccgatattgaaaaaagtaggaaaacagtcggttgctacatttacgattcgttgctaaataaccccaagcaaaagattattgggaaattagtcagaacagtcgaaagaaaattttataaagatgaattgacacagatacttaagaaacaggttgagttcattcccgaacttcgcgatgataatctgtacaaacagtgtattgaagaactttaccccatcaacgaggcccatagaaatactattgcaaagaccgattttgcaaatcttttcatcaatgatattttattctatcagcgcccgttaaaaagtaaaaaatcccaaattgacaactgtccttacgaagagcgcattttcattgattcaaaaacaggcgaaaagaaaaaagttcccgtaaaatgcattgcaaaatcaaatccgttattccaggaatttagactttggcaattcattcaaaatttgagaatttaccagcgagaaaaagaaatcgatggtaaacttttaacagatattgacattacaagtgaatgcttgaaatctgaagaagattatgtaagtctatttgattggctaaacgatagggaatccatcgaacaggaagagttgttaaagcatctctttaataccaaaaaatctaaaaataaagaaaatccataccgatggaattatgtagaaggtaaagtttacccctgcaacgaaactcgtgctacaattttgaaaggactttcaaaatgcggtattaacgaatcggttctttctcctgagatggaaatggctttatggcatattctttattccgttgaagacaaaaaggaaatcgaaacggctctgactcattttgcacaaaagcaaggctggaatgatgattttgcaaaagtattttccaaagtaaaacccttcaaaaaagattatggagcatattcagaaaaagcaataaagaaattgctgtctctcatgcgcatgggtaaatattggaatcaagacaatattgaaaaaaatactctagacaggattgacaaaatcatcaatggcgaatttgatgagaaaatctccaatagagttcgcgataacgcgattaatttaaaagacgtaagtgattttagaggtttgccggtttggcttgcatgttatatcgtgtatggcagacattccgaagccaaagattgtaccaaatggaattctcccgaggatattgattcttatctcaaggaatttaagcaacattccttacgaaacccaatcgtagaacaggttgtcacagaaactctgagaaccgttcgagatatttggaaacaggaaggacaaattgacgagattcatctagagcttggacgtgacttaaaaaatcctgccgacaaacgcaagaagatgtccgaaaatatcctgaagaacgaaaacacgaatttgcgcatcaaagccatgctgatggaattcaagaatcctggcatgggcattgaaaacgttcgtccgtattcgccgaatcagcaggatattttacgcatttacgaagaaaatgctcttgacaacctgactaaggatgacaaggacttcgactttatttcaaaaatttctaaacaggctcaaccatctaaatcagatattgttcgatacaaatgttggcttgaacaaaagtatcgttccccgtacacgggtaaaacaatttcgctatccaaactgtttacttcggcatacgaaatagaacatattattcctcagtcgcgttattttgacgattctttcagcaacaaggtcatttgcgaagcagaagttaataagcttaaggatcgtcaattgggatatgagttcattgcagaacatcatggagagaaagttcaactaagccaaggtgaagttgtcgaaatattctccgtagatgcatatgaaaaattcgtcaaagataattacgcgaacaatcgcgtgaagatgaaaaaactattgatggaaaacatccccgacgaattcatagaacgtcagttaaacgatagccgctatatcagcaaagttgttaaaagggtattgtccaatattgttcgtgaaaagattgacgaagagaactacgagccagaagcaacttccaagaatcttatctcgtgcaacggcgcaattacagaccgtttgaagaaagattggggcatgaacgatgtttggaatagcattattctgccaagatttattcgaatgaaccaaattacaggaaaagattgcttcacgacaacaaatgcagaaggtcatcttattccacagatgcctttagagcttcagaaggggttcaataagaaaagaattgaccaccggcatcatgcaatggatgctatagtcgtcgcatgtactacacgagatcacgtaaacctactgaataacgaagccgcacattcaaaatataacgccaataggtatcagttacaacgcaaactccgtcattttgaaaaggcgatgattgacggcaaggaacgtgaagtagccaaagaattcctaaagccctgggattcatttactacagattctaagaaaatccttgaaaacatcatcgttagtttcaagcaaaatcagcgtgtgattaataaaacgacaaacgccttccaacattttgatgaaaacggaaagaagacttttgtgaaacaaggaaagggcgatagctgggcaatccgtaaaccaatgcacaaggacaccgtttttggggaagtcaatcttaagaaaataaaagaggtttcttttgatgtagcactaaaagacccaactcggatagctgataaagtctttaaaagtaaaattctagcgttgaaaaatgatgggaaaaacgcaaaagatattaaacaggagataggtctttctaaaattaaggtctattattttacaaaagagaccaatgatcgctatttcgcgacaagaaagcctttagacacatcttttgacagcaataaaattcagatcgtaaccgataccggcatacaacggattctcgctgatcatttgaaaacaaaagatacaaaagacaaaaatggtaatataattgaacatcctgaaatcgccttttctccagatggcatcgatgaaatgaacaaaaacatcgttgaacttaataatggtaaatttcatcaaccaattctaaaggtgcgtgtttgcgaaaaggcggataaattcgctgttggacaaatcggcaataaaaaagccaaatttgttgaggcggccaagggaacgaacttgttcttcgccatttttgaaaaggacgggaaacgctcgtatttgacaattcctctaaatgtaatgattgattgtcaaaaaaaatatggcaatcagtggaaatcgaatattgaatcttatttaaaagaaaaagaacttgcagagaaggacgttcagctcctgtttattctttcaccgaatgatttggtatatctgccgacagaacagaatttagaaaaaaaagatcaaagtatgaataaagagagaatctataaatttgttgattgtagcggttcaattgcaaattttgttcctagtgatattgcccaagcaattttttccatgactaaggatgaccaaaatgaaaattttaagggatatcgatatggtattcaaaatgaaattggtgttgggagtcgtccatcaaaaagccagaatgcaataactggtgagatgattaaggaaatatgtattccgataaaagtggacagacttggtaatattaaatcggtaggaatgatgcaaaaatattgagaaaaatttcaaaagaggggagcatgattaaacgcacactgtattttgggaaccaggcttatctaagcctaaaggacaatcagcttgtcatcaagaagaacggagacgaaatcgtcactgcggctattgaagacatcgcctacatagtccttgattcgcctcaaattacagtgacaaacgctttactcggagctctgctagagaataattgtgcaataattaactgtgacaaaacgcatttaccctcaggcttactacttcccctttcaggaaacaccctgcaaagcgaaaggttccaagcacagatagaagcatcacttccattaaaaaagcaactatggcagcaaacagttcaacagaaaattttgaaccaggcgaaagtattacaacaaacttgccataatcctgcaaagcaaatgttaacatgggcgaatgaagtgcgtagcggcgatgtagaaaatagggaagccgttgctgcagcatattattggaaggagctttttccagatattgaagattttactagagatcgatacggtaagcctcctaataacatgtttaattacggttatgcaattcttcgaggtgttgttgctcgatctcttgtggcgagtggtttgttgccaactttagggattcatcacaaaaatcggtataatgcatattgtttggcggatgatatcatggaaccatatcgtccgattgtagataaattaattattcaaaaaataaatgacttaggagaatatcctcaggatctaacgaaagaaatcaaaacgtctttacttgtcatccctgttctggatacttggattgatggaaaacgaagcccattgatgaatgcggtgactttgacgacgacttctctttatcggtgctatgccggggaaagcagaaagcttctctatccggaggtgcaggatggatcgatttagtgagtatcgcattatgtgggtgctggtcttttttgatttgccgacggagacaaagctagagcgtcaacggcatagcgaattccgaaaaaatcttttaaaggacggcttctcccgattccagttgtcaatttatattcggcattgtgcttctgtggaaaatgccaatgtgcatatcgcccgagtaaagtcttttatgccgccaaaggggaccgtaagtttgctttgcattacggataaacagtttgggaaaatccaagttttttatgggaaaaagactagacctttgccgccagaaccatcacaattagaattattttagaaataaaaaagtgctttgaatataaaaaatcgacctgggtttaggtcgatttttttatttgtcagattcaacggctaagtcgttgaatctgctttagttatgcaatgtcagttgtaaatgctattgcaaaactaaaaaatctgaaagcaattcacaacgtggtttatgcggttttgagtatggattaagttgtaaatgctattgcaaaactaaaaaatctgaaagcaattcacaactttgttaagctctttacaccctttcggtgtgttgtaaatgctattgcaaaactaaaaaatctgaaagcaattcacaacagagagtgcacggagaggttcgcttcggctgttgtaaatgctattgcaaaactaaaaaatctgaaagcaattcacaacctcatagcttctccaggtgcttgcggacgtgttgtaaatgctattgcaaaactaaaaaatctgaaagcaattcacaacggtgttctaattacccctgctttcagtttagttgtaaatgctattgcaaaactaaaaaatctgaaagcaattcacaacatgttaatgttgattgttgtcatagttgttgttgtaaatgctattgcaaaactaaaaaatctgaaagcaattcacaactatggtacattagaatagcggttagttcggttgtaaatgctattgcaaaactaaaaaatctgaaagcaattcacaacgagccggaaacgatgaacgcctcggtctcgttgtaaatgctattgcaaaactaaaaaatctgaaagcaattcacaacatgtccgaattgccgacgagagcgatctccgttgtaaatgctattgcaaaactaaaaaatctgaaagcaattcacaactccgtatcccaatcttcgctagcagttcaagttgtaaatgctattgcaaaactaaaaaatctgaaagcaattcacaacgaagagcttagactttcgcttgagttccaagttgtaaatgctattgcaaaactaaaaaatctgaaagcaattcacaacagaattttagttatgaaaatgcaataggttgttgtaaatgctattgcaaaactaaaaaatctgaaagcaattcacaacccaatattttacatatattcttgatatattgttgtaaatgctattgcaaaactaaaaaatctgaaagcaattcacaacgcctgtctgtgttcgtcttctcgtgccgaagttgtaaatgctattgcaaaactaaaaaatctgaaagcaattcacaacggggttcaaacctgctagcaggttatatacggttgtaaatgctattgcaaaactaaaaaatctgaaagcaattcacaactacaataataatcttgcggagcgatataagttgtaaatgctattgcaaaactaaaaaatctgaaagcaattcacaactactttccgcaaaattcttcgattgtgtaagttgtaaatgctattgcaaaactaaaaaatctgaaagcaattcacaacccgcaaggtagtcggaactgccgttgaaagttgtaaatgctattgcaaaactaaaaaatctgaaagcaattcacaacgtaaccccgccgggtccgaaccgcgagatcgttgtaaatgctattgcaaaactaaaaaatctgaaagcaattcacaacgtaggtcaagagcgagcacgacaccacccggttgtaaatgctattgcaaaactaaaaaatctgaaagcaattcacaacatgaaagcgccgatggcgcgcaccgtggcagttgtaaatgctattgcaaaacaaaaaaatctgaaagcaattcacaaccaacgtccaaaattaaattcattagtccgggttgtaaatgctattgcaaaactaaaaaatctgaaagcaattcacaacctcgcaggacaggtcttccgatggatgaaatcgaaaagctctaattgcgagaaagccttacattgccatcatcatagcgcctgcggtgataatggcgatgttcgcaagtaacaggtcccatacggcaatcaattttttgaacataaagaatctcctttgtttgcaatgacaagttagattctttaagtgacaaaaattgtcgataatgcggatggaaatatttctaggccaataaaaaagtccctctttcgagggacttttgataaaggttttggttacatgaaaaggaagatggcgcctgctgcaagaattgcgatgtttgcgagcaacagatcccactcggctaagatttttttcaacatagtaacgctccttacccctcatttttaatctatacatctctttgtgcaaaaatcgctaaaaaatgctttatattacttacaaaagagttgcaaaattttgggataattcagggattgctacaaatcgcctcactttttggattgaatttgttttatattcgtcgttgaaaaataaaggatttttatgcacaagattctcattgccgtctgggctgccatttttttgattgcctgttccgatccagaagcggaaaaagtgatttcgcaaaagcaaaaagaagcggccggtatcgaaatgcaaattgaaaaaacgaaatcaacgttggatagcctcaaggcaagcgatgcggctcttcgcgaagaattagattctttagatatggcccgttgatgaaagctttgcttggcagtatcggtgctgtggcgctccttgttgtggcggcggcgtttgccagtgttctttggcttgaacgcatggcgctcgtttcggactatcggctgtatatctatgaaggcttgggcgttcttgcgtatttagccttgcgggtcttgctggctctattcggtaggaattttgattttttggaaaccttctgccacgagctgaaccatactgtttttgccgttctttcgtttcataaagtcgaatccttttttgcacatgcggatgacggtgggcaggtgactttttacgggggaacgaaccctgtgatttcccttgcgccttattcgtttccgctttttgcgtttgtgaccgccctttttacgcagatcctgattcccgaagctaaaatggtggcgcagggtcttgtgggtttctttttggcttttcatttggtcagcgtttttaaggaagctcgaccgatacagacggatttaaaagaatatggttatattttttcctatgcagcgattctttgcgcgaacttgttctttgttccaggaattgcaaagtttgcggtcggcggttttcctgcggcgataggctggtgtaagtctggctttggaatcgtgttaaattggtgcattcatcttgggaacgttgtatgagtcagttgttgctgaaatcggtgtggttggaaaatgaacgtcgggatatccggattgcggacggtgtttttaaaacgatcgctcctgcaggaactttgactgcggatgttccggatgtttatgaattggactgccgccatatggcgattgttccggctttttacaatacgcatacgcatgcggcgatgacttttgttcggggcctcgctgacgatgtgccgttaaaggtttggctcgaacagcatatttggccacgggaagcgaagctttcggatgaagatgtttatgtggcttccaagttcgcaattttagagatgatccgttcgggaacggtgtttttttcggatatgtactggcatcgaaagcagacgatccgggcggttgaagaaatgggcatccgagcttcgatcggagttacttttgccgatgtgttaaagcccgatgcgacagagaatttgcagttcctggccgaaaatgtttcgaagtatcaggaccggattcgtctgtcggtggcaccgcatgcgatttacacgaatacggctcggagcttgaagatgtgcgcggaatgttccgaaaaatatcggatcccgttgcacgtgcatttggcggaaaccgctggcgaagagaaggggagcgtcgattccacagaaggaaagtctccggtggaatatttagatgcgttgggatgcctttcggaacggactgtggcggctcacgtggtgcacgtttccgaaaaggatttggacattttggctaaacgcggagtgaccgttgcgcataatccttgctcgaacatgaagctttctagcggagtgttccgtgcgaaaccttttatcgatcgcggaatccggctttcgctcggaacggatggcgcgtcttcgaacaataatttggatatgcgcgaagagatgaagttcgcgtcccttcttgccaagatgacttctggagattcgacgatcctttcggcgaaggaaactttgaaaatggcgacgcagaacggcgccgaagcctttgggttccatgcgggtaaaattgaagaaggctggcttgctgacgctttgctgctcaatttgaaggctccgtgctttgccgtgggcgacgtgatttcgaactgggtctatgcggcaaattcctcggtgatcgatacggtcatttgcaacggaaacattttgatgcaacaccgcgtgattccttttgcggacgatatcgaaagggaattccggaatcgattcggggatccccgttggaacgtttaaacgatgtggaactttatcaagtataatttgatcggtgtggtgaacactttcattacgctcgtggtcgtttgggtcttgtacgagcttttgcattggaacctggaactttcgaactttttaggctttgtggcgggcggcgtgaattcttatgtcatgaaccgtcgtttgaattttaaaagcaacaacaagaaaagaacggaagtcgtgcggtttgccgttgtgttcctttgcgcatacgcggtgaacctgttcgttttggaatcgctcaaggaaagccttccgtcggcaggggagtttttaagcgctggctatttggcgaacattcttgcgaatgtcgcctatgtagtcgtgagctttgccctgtatcgttactttgtttttcgaaaaaggaattaggaattaaagggcgaagatgcggtttacgcgcaagagcccttcgacgagcctgtcgatttcccacttttgcgtgtaggcgccaaagcttgcgcggatcgtcgccggaacgttaaaacgtttcattaccggttgagcgcagtgatgcccgctgcgaacggcgatgccgtcttcgtctaaaagcgtcgctgcatcgtgcgggtgggcggaatccagggtgaagctgagcagggaaccgcggtgcttgggagcgcctaaaatatgcaatcccggaacttcgcgaagtttttcttccgcatatttcaaaatttcttgttcgtgctggtatatcgcttcaattccgacctggtttaaccagtcgatggcggctccaaggccaatgacttcggcgataggaggcgttcctgcctcgaaacggtctggcggaagggcgaaggttgttttttcgaacgtgacttggtcgatcatttcgccgccgccttcaagaggcggcatgctttctaaaatttcatatttgccgtaaagaacgccgatgcccgttggcccgtacatcttatggccggaaaaggctaagaagtcgcagtccaggtcctgaacatcgattttgacatgaggagcgctttgggctgcgtcgacgagaaccttgatcgacgggtcaatctgacggatggtccggatgatttccttgaccggattttccgttccgatggtgttgctgatgtgcgcaaaggcgacgatttttgttttgcccggaatgacaagctcggggatcttttcaaggatcaagtctccattgtcggcaacggggattaccttgattttggctccgcgttcttcggcaatgagctgccacgatacgatgtttgcgtgatgttccagggcgctgatgacgatttcgtcgccggcttttaggaatttccgcccgtagctccaagcggctaggttgatgcttgccgttgtgccgcgggtgaacacgatttcgctttcgcgtttggcgttaatgaactgggcggcttttttccgagcggattcgtaggcgtccgtcgtttgggcggccatcgagtagactccgcgtttgatcgaactgtaatgtttgcgatagaaattgtccatcgcgttgatgacgaattcgggcttttgggtcgtcgcagtgctgtcgaggaacgcgaaaggcttcggatccttatcgtggagtgcgagaaccgggaattgattgcggattttttctacatcgtagttcattgccgtagaaaataaaaaaataacaagtgaaataatagggatttttttaatttttcgcacatgaattttctagaagcaaagattcttgccgatggcgttgtcaagcccggcaacgttttgaaagttgacagtttcttgaatcatcaaatcgatattcgactgatgaaaaaaatcggcgaagaaatcaaacgccgtttttcggatgttaaattcaataaggttttgacgatcgaatcgagcggaatcgcgattgcctctgccgtcgcctatgtgaacgaaattccggtggtctttgcaaaaaaaggtcagacggtgaacagtaccgatgacaagtatgtggcaaaggcttattcctttacgcataaaaagtataacgaaatctttgtttcgaagccttatttaaagcctacggataagattttgatcgtggacgatttcttggcggatggcgaagcgagtgccgccttgatcgatcttgtcaagcaggctcacgctgaactggtgggcgtgggaattgccatcgaaaagggaatgcagccgggcggtgcaaagctccgggcggcaggcgttcggcttgaatccttggccattgtcgaaagtatggatgcggaaagcggctttatccagttccgtgaacaggaatcttaatttctaaaaaaatgacgacgaaatcttctgaaaatctttatacgctagacggcagagttccattgttcaaggcccttccttttgggcttcagcacgtgcttgccatgtttgtgagcaacattacgccaattatcattttggcgaatgtggtgggaatcgaaaaaggcgtaacggcgtccttgattcaaaactgcatgatcattgcgagtatcggtacgctgatccagctgtatccgatctggaaaatcggttctcgtctgccgattgtgatgggcttaagttttacattcctttcggtggcgatttccattggaacgacgcagggaatgggaactttgatgggcgcagtcattgtgggcggtatcgttgaaggtttgctcggactttgtgcgaagtattggctaaagctgattccgcatattgtggcggctacagtggtgacgtcgataggcttttcgctgctcccgatcggggcgaattcctttgccggtggtgttggggcttcgaacttcggcgctgcagaaaactggattgtcggtagtgtgacgcttcttgtgtgccttttgacacaaatctttgccaagggatttttgcgttcgctatcggtgctggtcggtttggtcgtcggctatattcttgcgctctgcatgggaatggtcgatttttcgggcgtgatggattgcagcatcgtctccctgccgacgttccttccttttaagccggaattccatgtggggccgatcctttcgatcattgcgatttacctcgtgtcggcgacggaaaccgtaggcgatacgagtgccttggtgaatggcgcgttgaagcgtcaggttcataaggtcgaaatgggcggagcgattagttgcgatggctttgtcagttctatttcgggactttttggctgcacgccgattacgtcttttagccagaacgtgggacttgcttcgctttcgggcgtggtgaaccgttttgcaatcggaacgagtgccgtggtgatgctccttgggggaattttcccgccgtttggtcacttgctttcgacgattccgcaggcggtgctcgggggctgtaccattatgatgttcggctcgattttgtttgccggcttcgggatgatggccaaaagcggtttctctcagcggaacatgatcatttcgagtctttcgcttagcgtggggcttgggtttacatcggcatctaaaatgttcgaaatttttccgcagatcgtgcagacgatttttgcggagaattgcgttgcggtcgtgttcctgctcgctgtcattttgaacctggtcctgcccaaggataaggccccgacaattcatgcggaaaagaccgcataggccaggtgattgtctggcttaactgaacgtggagtcgttttattcatgcagaaagaatttgatcaagctcttgaaaatctgaagaacatcgaagttgtagacgaacagtctgcggcgcgttataacgaacagttcaaggttcttatcggcgaaacgatgcagatcgtgaacggtaccgattacgatgctcttgtcaaggcaaaaatggaagctgccgaaaagaagtttgccgccaaggtggaattcagcgaagacgcggcggatgcatacaaaaagctccgcgaaattgtccgttttgaaatgttccacgaatcgcttcttgcgggcaaggaatttgaagtctgctgcaccgaaagcaattttgcaatggcgatgaataagatccgtccagaaattgcaaagctcgtgccggaaaaccagaaagaagcggtcgattctatcggctattcgatctattccgattttacaaagttcttggtgtgcagtgcattcgacatggtggcggatgcaaagatttttgaaatgccggaatttcgcccgttacagctgaatgcgctgggcaaggaagtccgcacaaatgt

SEQ ID NO: 1076 - DNA, 24614 bp, synthetic construct
  misc_feature 1..24614: note = Synthetic
  source 1..24614: mol_type = other DNA
aatggatggatttgggacaaattctaacgtaattgtattggctgcaaccaacagagcagatgtattagacaaagcattaatgcgtgctggtagatttgacagacaaatatttgtagacctacccgatattagagagcgtgcagagatatttaaagtacatttagctccacttaaaaaagtagaaggtcttgatttagactttttggccaaacaaaccccaggattctctggtgcagatattgccaatgtgtgtaatgaagctgcgcttattgcagcccgttataacaaaactgcagtagacaaacaagatttcttggatgctgtagacagaattgtaggcgggttagaaaagaaaaataaaattattactccagaggagaaaaaagctattgcaatccatgaggcagggcacgcaacagtgagctggatgttagaacacgccgcaccacttataaaagtaaccatagtgcctagaggacaaagtttaggagctgcatggtacctaccagaggagcgtcaaattgttcgaccggatcaaatgttagatgaaatgtgcgcaacaatgggcggtagagccgcagaaaaggtgacttttaatcgtatttctactggtgccttaagtgatttagaaaaagtaaccaaacaagctcgcgctatggttaccatatatggtttgaatgataaaattggaaacgtaacctattatgattcttctggacaaggagagtataatttttcaaaaccatattctgacgaaactgccaaagttattgatactgaaatttctttactcattgaaggacaatacctaagagctattgctattctagaagagaacaaagacaaattaaaccaactggcagatatcttgattgaaaaagaagttatctttaaagatgacctagaagcaatttttggaaaaagaccatttgacaccactacagaaccaatagtgtcttaatccaaatgctactataaaatatttttaaaatcttaattcaaaacactcttttgaattaagatttttttatctttggacgtttcaaacaatatataaagtaccttgagaatatatgagtctttttagaaaactttttggttctagtagttcggcctcagatgaagagagagagagagaagagcaagaaaccgctacgcttagcaacctatctatagatgaacaatttattcatcattttaaaaaaaatggcggcaaatttttatattgtgaaaaccttacggaattaaaagaacaatttgaaaacattttggaagaaaacgattggtttgaaagcgaagtactttgctacgacccgagtttatttagtcttctaaacgaaaacaagctttcttatggaatggctagaaatcctaaatttctgttttcgggctgtgagaatttaatagccgaagagggttctatactattttcgtccaaacaaattaaacaacacaaaccaaatgaattgcctagcaatatggtgatttatgcaacaacaagtcaaattttggctataaaaagcgatggtcttagtgctataaaaaagaagtacgaacgtgattatcctacaaatataactgcaataaaatattttgaaaaagcaaaagaggaagactttacacaatatggaagttctcccaaaaatctttatttattgttgttagaaaatctttaaaatgaatgaaactttaaagaggtctatatctggatcaatttacgtaattttactaatagcttccatatattattctaaggagagtttttttattctctttggaatatttttaacacttgctatatatgagttttgcaatctgacccaaattagcaaacccctacccttaattgcaggaactttactatatacaaccgtaattttagttagccattacagcaaagaaactagcaccaaaatcaatgcgtatttgggcaccaatatagaaataaacaccaacatccaacagctcaacattacgttattggtggtaactttggtggtttttgtcaaatgtattttgtttctattttttgataaattacacaaaatcagcacctcttcaaaatacctgtacctatttgggtatattctgcttccttttatatttatcaccaaaatttcttttggaataaaggactacaatcctaaaatcataattggtctctttttattaatatggaccaacgatacttttgcatacattgttggaaaatccatcggaaaaaccaaattattagcacatatatctcccaaaaaaacagtcgaaggttttataggtggtattctttttgctattttagcagggtatttaatttctaaatattacataaaagcaaaacctgaatttagccaacaatctattataatttgggcatctatagcggtaattgtaggtgtttttggcaccataggagatttgattgaatcgaaatttaaaagaatagctggcgtaaaagacagcggaaaaataatgccaggccatggaggcgtactagatcgactagatagtgttatatttgtagcaccaattgtatttttattttatcaaatcttaaattatgtttcataaagaaggaaccaagactattttattaggaattatttttacagctagtgtacttttaatttcagacaatttgattgcactattttggcttaaaaaagcgattcaaattgctgcttttttgattttagttatcattttacaattttttagaaatccaaaaagaaccgttgcaataaatgaaaaccaccttctggcacctgtagacggaaaggttgtggttattgaagaggtttatgaacccgaatatttcaaagacaaacgcttacaggtttctatttttatgtctccaattaatgttcacgtaactcgttatgcattaagcggaattgtaaaattcagcaaataccatcccggtaaatttttggtggcttggcatccaaaagcaagcgaagaaaacgaaagaactactgtagtggtccaaaacaatacctttggagcaatattatatagacaaatagctggtgcattggcgcgtagaattgtaaattatgcccaagaaggaatgcaagtggtacaaggtacagatgctggatttataaaatttggttctagagtagatttgtttttaccgttaggaactcctgtaaatgtagtccttaatcaaaaagccattggcggaaaaaccattattgccacaaaagcataatgcgttccgaagatttagatacgcaatttcaagcagcggttactaaagcgctgacaatgacccaagcaactttgccgcaggatgtgcaattgcgtttgtatgcgtattacaaacaagctacctttggaaatttacaaaccaaacaaaccaccacctatcatttaagagatgcttttaaaacaaatgcttggatgcaaataagtcatttatctgcagagcaagccaaagaagaatacattaaaatgattacagatctttcaaaaaaatagcactatccatgaaaaatactgctttattaatagttagctggataacaactttgtttttattttcttgccaagataaaaaattaaccgaagtagtagaagttccgttgcctaccgctcaagaaaaagttgccataggtcatcctgaagatgttaaggctgcacaaggatcgtttcagttagaaaaattagcctacagctatgatgcattggctccaacggtttctgcactgaccctcgaaacacattattctaaacattatctcagctacaccaacaatttaaataaagccatttcgggtactccatacgaaaaccaatctatcgagaatattttggccaaactagatttaaacaatcccgaattacgcaataatgctggtggttactacaaccacacgctctattggaaatctatggcacccgatacaccagatgtagcaacagatactctagcagctgttataaacagggattttggtagttttaaaaattttgaaattgcctttaaaaacgaagctaccaatcaatttggatctgcttggacctttttggtggtagacaaatatggcaaattaaaactaaccagtacccaaaatcaagacaatcctttgatgcggaatgcggcggttccgggtactccaattttggcattagacttgtgggaacatgcctattatttgggctaccaataccgacgtaagagctacattgattctttttttacggtaataaattgggctaaaattaacgaaaactacgaagctgccataagaaaaaaatactagcggtacccttttgcatacggtacaaattgcatttttgtaatggctttaataaaaaacagaaggatgtctaatgggtctctttagtccctagtgtattaaatcccaatgcgagtagtgtgctgttttaaaagcctttaaacttataaataaaacctaatttacatttggattgtttcctttttattaaatttgtcaaaaattaaatccattgaataaatcactattcttgctaggatgtttcttagtgtttttgtgttccagagttgctttggcacaagccccaaaaaaaataattgtagaacatgcggactatgcagatattaatcaagcagaaattccagatgcttttttgctaaccggaaacgttcgggttaaccatgatggtattgtattgacctgtaacaaagcctattattttcagaaagaaaattatatcaaagcctttggaaatgttcagttagtgcaaggagatacgttgtttttgaacagcaaatatgccgaatatagtggcaatgtcaaaaaagcatttgccgcaggagaagcctacatgagctctccagatgccaccctaaataccgatacaatccattttgatcgaaacagccaagaagtatattacactactgtagggaatattaccagcaaagacaacaacttgcgttccaaatccggaaagtattttgtaaaacaaaagaaatttcaatttttgaccgcagtaaccatcaccaatccacagtgcgtaatacaatccaaccatttggattattacagcaattctggacattcgtacctctttggaccttcaaccataacgagtaaaaacaattatatttataccgaaaaaggattttatgataccaaaaaaaacgtggcgcattttattcggaaatcgtacataaaatatgaagataggcgcatacaaggagatagcttgtattatgaccgtaataaagaatttgcctctgccaccagaaacgtaaaaattacagactctatcaatagagggattatcaagggccattatggcgaaatatacaaaaagaaagactctatgtttgttaccaaacgagcaatagccagtaattttgtagacaatgactcggtttatatacacggaaaacgtttgcttataacaggcaaagaaggggaccgaatcatccgggcttttaacaacgtgcgttttttaaaaaaagacatgagtggcaagtgtgactcgatccactctagcgccaagaccgctctaaccaaattaattggaaatcctattatctggaacggtgacaatcaaataactggagaggttatccatcttataggagacaataccacccggaaattagactcccttaaagtgctcaacaacacttttttggtttctagagataccataagtaatggctataatcaaattaaaggacttaatctgtatggcaaattttaccaaggaacattgcatgatgtgactgtagtcaaaaatgccgaagttatttattacatgcgcaatgagaacaaagaactcattggtataaacaaaaatctaagcagcaaaatcgatctggtactagacaataatgccgtagaaacaattacgttttacaaccaagtagatggcagtatatatccagataaagaattgcctgaaaatgcccgaaaattaagaggcttagtctggcgaggagacgaacgtatgtacaccaaagaagctcttttttcggctgaagaaaatgcctataatacccaaatgctaaaccaagcaaagaaagaaaatgcgctaaaaaacgtacctatgaaaacccgaaaggaaaccgtagattatgataagaaaaaacctaaaaaataaatttttttccgtttttaaacccctaacgcacctacttgtcttttaatttataaatctactgccaattgaataccgattttataaaataccaagcacaaacctctccgcatccgttaggtttagaaatatcttatgcaaaaggatcttacatatataccactgatggccaaaaatatttggattttgtagcaggcgtttcggcatgtacccttgggcaccaaccacaacgggtaaaccaagccattaaggcacaattggacaaatattcgcacgtgatggtttatggagaatacgcacaaagtccggcagtagaatattgtaaattattagcctcactcctaccggattcgttaaacaaaacctacttggtcaactccggcaccgaagccattgaaggagctctaaaactagcccgtagagtaaccggccgaagccaattgatttcctgccacaatgcctaccatggcaacactatggggtctttgagcctcatgggctatgaaccacgcaaacaagcttttcgacccttgctgccagatgtagactttattacttttaataacgaagccgatttagaaaaaataaccaccaaaacagctgccatactagtagaaaccatacaaggaggtgctggttttatagaacccaaaaatgactttctcaaaaaagtaagagcccgctgtactgccatgggtgccttgcttattttggacgaaatccaacccggatttggaagaaccggaaaattatttggttttcaaaactacgatattctgcccgatgtggtggttatgggcaaaggaatggcaagcggcatgcccgtaggtgcctttacggcttcggctgcaagaatggatctactgcaagataacccaaaattagggcacatcaccacctttggaggacaccctgtcattgcgtcagcttgtttggccacattgcaagaattaacccaaacagacctaatacaaaagacattagagaaagaaaaactatttagatatcttttggtacaccctttgataaaggaggttagaggaaaagggttaatgttggctataatgactccaagtgaggcagtaaccaatgaggtgattctaaaatgccaagacaaagggcttattttattttggttgctctttgagccttgcgccatccggatcacgccaccactaactatttcggaagaagaaattagagaaggttgtgctatcattaaacaagtactggacaacatggttggctaactagttgcttataaaaccagaaccaaacccctactctagcacgtgcattgttaattaaattgtttacaacaattttaatttttcttcacaccaatagtaatgatacctaaatttagttaggtcaaattcaaaaaaacaaagcatgcaattaagcaacgaagaagacgactataacttatctatatccaaatttgagtctatgttaaaaaccaacaaagtactcttttttgactccgaagaatttgaagaaataattcttcattatctagatatgggcaaagcgactttggccaaaaaagctttaaaactaggtttggaccaacatccaaaatctactggtctaagactggtccaggtagaaatgcttgtgtttgataacaaattagatcttgcagagaaactactgcaggaactttatgccattgagcctaataatgaagaaatatacatccagaaagccaatatttattctaaaagagaccaacacgaaaaagctgtcgaatttttaaaaatagccttacaacacaccgaagattttgcagatgtctacaacttaattggtatggaatacctctttatggacaatctagagcttgccaaagaaaattttattaaatgcctagaagaagatctagaagaccaatctgcactctataatgtggtgtattgctttgagtttttggatcaaaatctagaagccattgcgtacttaaataagtacattaacaaaaatccttacagtgaaattgcttggcaccaaatggggcgtttgtattatgatctaaaagattatgaaaatgccatacgtgcatttgactacgcaacactaatagacgacgagtttttaggggcatttatggaaaaagcaaaagcctatgaacgattaaaaaaatacgatttagcaatagaaagctacaacagaaccattgccttagatgatgcaacatcttacgcgttattgcgaataggcaaatgccatgaacgcttgggcaacaccgccttagccctaaaatactacaatcaaaccgtacacgaagaccctcttttggacaagggatggattgctataacagatttttatttgcgtcaaaaaaactttcaaaaggcattgttttttgtcaataaagcattagcaattgacaatcaaaaccggttgtactggaaacgttatgcaagtattaacaaagagatgaatttctttgaagaagcagaatttggttttagaaaggcagtagaatttggagataccgcattagatacgtggttattctgggtagatattctacaatttctgggcgaatttgatagcgccatccaaacattattacaagcatccgaatattttccggaagaaaacgaaatagaatatcgcctggccggattgtactttatgattcaagacaacaccaaggcaaaatttcatttaagcaacgctttgcgattaaaatttgataattatattctaattgaagatttatttccggtggtgtggtccaaaaaaatagttcaaaattatattgacaaacacaacaataccaatgacactaaataaccgcaaacgctttgggctattaggcaaaaacatcagttattctttctcaaagggctattttagtgctaagtttgaacaagaagcttatgagaattacagctatgaaaattttgacatacccgaaattagcctctttaatactctaattaaagacaatccagaaactttagccggaattaatgttaccattccgtataaagaggcagtgttgccctttttggaccaagtatctaaaaaagccaaaaaaattggcgctgtaaacaccatcaagtttaccaaaaaaggaaaattaaaagggtacaatacggattattatgggtttaaaaaatccttagaaccgatgctggaatcccaccacaaaaaggccttaattctgggtactggtggtgcctccaaaggcgtttgttatgctttgaaagaattaggcattgcgtacactttggtatctcgggtccaaacagaaaattccattggatatgctgccataaactccaaaataatgcagagccataccattataatcaatgccacacctgtgggtaccagcccaaacattgaggcataccctgccctgccctacgctgattttagtagtaaacacattgcctatgatttgatttataatccggccgaaacccaatttttaaaaagagcagctgcagaaggagctcaaaccaaaaatggctatgatatgcttgtttttcaggcagaaaaagcttgggagatttggaataaataaaaatgaaaccccctaatagcaaaaaagctttctgtcttgatttaagatagaaagctttttttatgctcaaaaattatactaaaaatatccttaatattttttaacaccgcagctattctctactattttttataagtttaaaataaaaaatccagtttaagccataaaaaagcgacccttgtgaggccgctttgaatgttttcacaacggaataatccttattgtgaattgcttcaaaattgtagtacaatagtacaacaaaaattttaaaattggtttacggtttcccgtaaaaatattctttttcttatctttatatttaacaattgatataaaaaatgagaaaacaactataaaatgaagaaaatattaggtttggatttggggacaaatagtattggatgggcgttaactacaaatgattttgatactaaaaaaggaactatcgaagggctaggaagccgtattatccccatgagtcaagacattttaggaaaatttgatagcggtgtatctctttcacaaacggcacaacgtacagaatatcgtggaaaaaggaggttggtacaacgttttttactaagacgggaacgactacacagagtgctacatattcttgagttattacctaaacaatattcagaagctattgattttgataaaaagttaggtcaatttaaacccgaaagagaacaaaaaatatctttttataaaaatgaaagtggtaaaaaccaatttatttttacaaaaagtcatcaagaaatgctcactgaatttcaaacttactatccaactataaaaaacatcccttatgattggactatttattatttgagaaaaaaagcactgacagaaaaaatttctaaagaagaactggcttggatcctacttaattttaatcaaaaaagaggttattatcaattgcgtggtgaggaaaaagaagaaaacaaaaataagaaagaagaatttcatacgctattggtaaccgatattattgaaagagataaaggaaaatcaggaacatggtataatgttattttagaaaacggatggatttataaacgtgaaagtaaaatttctttagctgattggattggtaagacgaaaagttttattgtgacaacagaatataatgatgatggaagtgtaaaattgaccaaagacaatgaagaaaaaagaagttttcgatccccaaaagaggatgactgggggcttatcaaaataagaacggaaaaaactattaatcaaagtgataaatctgttggagcatatatttatgatgccttattaaagaatccgaatcaaaaaataaaaggagaattagtacggacaatagaaagaaaatattataaagacgaactcagagaaattctgaaaaagcaactggagtttcattctgatgttttaaatgacaaaattttgtataaaaaatgtattgacgaattatacaaaaataacgactctcataaaaacagtatcaaagaccgcggttttgactacttatttttggacgatattattttttatcaaagaccactaaaaagcaaaacgtccttaataagtgattgtagtttagagtttcggccaataaaaaataaaaatggtgttttggtaaaagataccgatggaaaacaaattgcaaaagcactcaaatgtattgcacgatccaatcctatttttcaagagtttagattgttgcaatttgtcaaaaatctaaaaatttataaaagaggtgttgtagacgatgttgaggttaccaatgattatctaaaatcagaaaacgatgttgaaaaactttttaattggttgaatgataaagccgaaattaatcaaaaacagtttttagtaaatttcaaattaaaagaagacaaacaccgatggaattttgtagaagacaaaggttatccatgtaatgaaaccagaaaccaatttttgaatgctattgcaaaaattgacgtcgataaatcctttttcaacactaaaaacacccaagatttatggcatattttatattcggttactgataaaattgaaattacaaaagcaataaccacttttgccaaaaggcataatttgcccaatgaattcattataaatttttctaaaataaaaccgtataaaaaagaatatggttctttttcagaaaaagctataaagaaattgttgcctttaatgcgttttggtagttattgggatgcaaaaaacatagatattaagactctggatagaatagataaaatccaaacaggcgaatttgatgaaaaaattagaaatagggtgcgtgaaaaagcgatagacttacataaaattgacgattttaaagacttgcctttgtggttggcttcgtatattgtttatgataagcatagcgaagccagcgatgtttctaagtggaaaactcccgcagatattgaaaaatttttaaaacatgaatttaaacaacattctttaagaaacccaattgtggagcaagtaattaccgaaaccttgcgagtggttaaagatatttggctacaatatggagaaggaaaagaaaatttctttaatgaaattcatattgaattagggcgggaaatgaagaacgacaaagctactcgtgaaaaaatatctaaaaaagtttctgaaaacgaaaacacaaatctaagaattaaagccatattgaccgaattgaaaaacgatggagttagcgatatacgtccctattctcctagtcaacaagagattttaaaaatttacgaagaaggagtttataacaatgaaagccgtaaagaaaaactagaggaagttgataaaattagaaaaaatgctaaacctactacttctgaaataatcaaatataaattgtggttagaacagggttatgcatcgccctataccggaaaactaattcctatgagcgagttatttacaaccaaataccaaatagaacatattataccacaatcccgattttttgacgattcgttatccaataaagtgatttgtgaatccgaagttaatgagctaaaaagtaatatgacagccttagaatttatacttactaatgaaaatagaatagtaaccttaacaggtggcgaaaccgttaaaattttcactaaagaagcttacaaccaacatatcattagttattattctaaaaataaaaacaaacaaaaaagattgctaaccgaagaaattccagaacaatttatatccagacaactaaacgataccaaatacattagtaaaatagtaaaaaatttattgagtaaaattgttcgtgaagaagatgagcaagaagtaacgtcaaaacatgttgtttcgctaaacggaagtataacctccagaatgaaacaagattgggggctaaacgatgtttggaatactatagtaagccctcgttttgaacgcttaaatacacttacaaattcaaatgactttggacaatttgaattgaaaaaagatgcttatggtaatgaaggtaaaagagtttttcaaactactgtgccagatgctattgcaaaaggttttaccaaaaaaagaattgaccacaggcatcatgcattggatgctctggttattgcttgtgtgaatagaactcatattaattatttgaacaatctaaatgcaaaagatacagatgacaaagctgtaaaacatgaattaagaaataaattgtgtttcaaaactaaacctgatagtaatggaaattataaatgggaatttcataaaccttgggaaaaattcacaaaagaagcccaagacaaactaaacacgacaatcgttagttttaagcaaaatactagagttatcaacaaaacggtaaacaagtatgtgagttataaagatgaaaacggcaatttgaatgttgatgcaaatggattgccacaaaagaaagttattacgcaaaccaaaggagacaattgggcaattagaaaaccacttcatgctgagaccgttagtggtaaagtatttttaaaacgtattaaacaaagtcatataactatagcaaacgcaattgaacaggttgaactgattgttgataaagaggtaaaaaaacaacttaaagctaaaattaaactttatccaaacaatatagccggcttaaaaaaacatctcaaagcttttcctgtaatgataaacgacaaagcgattgataaaatccagatttatgaaacgctagaagcgacagccacaagaaaaatacttgatatcacttttgacgaaaaaaagatacaaaagataacagatacgggtatccaaaaaattctattgaatcatcttaaacaagaaaaatatcaaaatacagttgatgaaaatggtaaaaaattagctccacatgaaatagccttttctgaaaatggtcttgaagatttgaataaaaacattacttttttaaatgatggtaaaaatcatcagccaatcaaaaaagtaaggatttttgaagaaggcaataaattccctttaggtgaagtaggaaataaaataaataaatttgttgaaactgcaaaaggcacaaacttattttttgcagtttatgaaaatgatgataaaaaaagaaattacaaaactattccttttaacgaagtaattgaaaggcaaaaacaaggattaaatgcagcattagaaattgatgaaaatggaaatagacttttatttactctttctccaaacgatttggtttacattccattggaagatgaaattggatatttaaatggtgtttattttaaaaatcttaataaagagcaaactgtacgcatatataagtttgtaagttgcacaggaggagagggacattttgtaccgaataattactcaaaagaaattatttctaatgaaaatggctctaataataaaaatgaacgtatgttaaatttcaataatttcaacataatatttgatggaaaagaaaaacctgtaatgataaaatctatttgttggaaattagaagttgaccgattgggaaaggttataaaaataatcaaataatatacgccttcaataggattgcgcttcaacccaatctaaaacatacaaacacaaaatgagggctttagccaaaataattcggctaaagcaaatccttttaataaataatctttttccctccagctaaagctggaagcaattgaatgctgtagacaattttaaaatgatgacaatattatttttcaaaataacaggttttaaaacattgttatacaacccattcaacattaaaaaatattccatattggctttagccaaaatagattgtgaatttaaaacatcaaaaaaatgatcaaaagaacgcttttttttggcaacccagcctatctgagtaccaaaaatgaacaaatagtgatctcttatcctgataaagaacaagagaccaaaacagtagccattgaagatgttggtgtccttgttctagaaaaccaacaaataaccatcaccaatggcttgctcgaaaaactaacaaacaacaatgtagcactgatcaattgtgaccaataccatttaccgatcgggttgttgatgccacttaatggccatacggaacaaagcgaacgattcaggaatcaaattaatgcttctgccccactcaaaaaaaatttatggcaacaaaccattagttccaaaattaggaaccaagcgggggtattaaaagagaaagggattccttgtcgcaaaatggagatttggtccaaggaagtgacctcaggagatgcgctgaatcacgaatctagagctgcagcattttattggaaaaatcttattcctgttgcaaattttactcgaggacaaaaaggaattccacctaacaacctgcttaattatggctatgctattctgcgagccattaccgcccgcgctattgtaagctcggggatgttgcccacgcttgggatttttcatcgcaataaatacaatgcctattgccttgctgatgatattatggaaccctatcgaccgtatgttgatttaatagtatgccacattatggaaaccgaagatcactatgacgaattgactatcgaaatcaaaaaacgattactgagtattgctaccattgatgtaattatagatggcaaaaacagtccgttgatggttgccatgagccgcactacgcattccttacaggaatgttttgaaggaacagcacgaaaaataatgtatcctgtctacggttaaacagctttgaaataaatatgtttgacaaacagtacacccgattaaatcaatatagaagtttgtggatattagtattttttgacctgcctacagaaacacgcaaagagcgcaaaattgccagtggatttcgaaagaaattattggacgatggattttctatgtttcaattttctatctatatgcgtttttgtgccagtaaagaaaatgccgaagtacacaccaaacgaattaggaatagtttacccgagcacggcaaaattggtgtgatgcaaataacggacaagcaatttggaatgatggaacttttttatggcaaaaagccggtagaaacagataaaccttcgcaacaattggaacttttttaaaaattagaattccaaaaacctacaacaagctgaagattagcactatttaagaatccatttttattttctaaacaaacccataactaccaacatatcaaacgattaaatcgcggtatgttgggaattataagtaaaaatacaattttgaaagcaattcacaacagggggcggcattatttgtgaaaggcttaggttgggaattataagtaaaaatacaattttgaaagcaattcacaacgaagtgataccttgtttaccaactgctccggttgggaattataagtaaaaatacaattttgaaagcaattcacaacagcctgtgggtaatgtgaaaacttgattcagttgggaattataagtaaaaatacaattttgaaagcaattcacaactcagtgccagaacgctcttttggttgtctggttgggaattataagtaaaaatacaattttgaaagcaattcacaacgtggtagccgataacgagaatttgaactgagttgggaattataagtaaaaatacaattttgaaagcaattcacaacaaagaatctgtttttccatccatccatttagttgggaattataagtaaaaatacaattttgaaagcaattcacaaccggggtggtatgattggctgtggaaattaagttgggaattataagtaaaaatacaattttgaaagcaattcacaaccttcatcagcagagccttttttcgcaagttgttgggaattataagtaaaaatacaattttgaaagcaattcacaacgcttacctgagaaattgagaattgatttgtgttgggaattataagtaaaaatacaattttgaaagcaattcacaactgaatacgtccgaatattaaaagaatgtaggttgggaattataagtaaaaatacaattttgaaagcaattcacaacgtatgccagcatttcggaatatttagcctcgttgggaattataagtaaaaatacaattttgaaagcaattcacaacattaatccgctaacatcgaaataaatattgttgggaattataagtaaaaatacaattttgaaagcaattcacaacatataagctccgtagcacgtggaatagtgtgttgggaattataagtaaaaatacaattttgaaagcaattcacaacacatctcaggaaactcagccaagtttctaagttgggaattataagtaaaaatacaattttgaaagcaattcacaactaggaaaagagggtgcaaccgaagcgtacagttgggaattataagtaaaaatacaattttgaaagcaattcacaacttaaacctctcggtattatgcctgaggtgtgttgggaattataagtaaaaatacaattttgaaagcaattcacaaccggctcttgatactgcctgccgtcatatcgttgggaattataagtaaaaatacaattttgaaagcaattcacaacccgaatttatggagttggaaattgaaaaaagttgggaattataagtaaaaatacaattttgaaagcaattcacaactctttttaagtagcatcgcttttaattgtagttgggaattataagtaaaaatacaattttgaaagcaattcacaacgccacttagtacgattagccagccccttagttgggaattataagtaaaaatacaattttgaaagcaattcacaacttgcttttaacttttcttttttcgcttctgttgggaattataagtaaaaatacaattttgaaagcaattcacaactgaaaactgagtctgtcttagcccattgagttgggaattataagtaaaaatacaattttgaaagcaattcacaacagtacgcaagcatttcggaatagttagccgttgggaattataagtaaaaatacaattttgaaagcaattcacaactatctgccgtaggtttagccgataattggggttgggaattataagtaaaaatacaattttgaaagcaattcacaacaggtatgctcttttttctttagtttcaaatgttgggaattataagtaaaaatacaattttgaaagcaattcacaacttattaatcgcaataccgattatttggtagttgggaattataagtaaaaatacaattttgaaagcaattcacaactagtaagtactcgccccaaaacagaaactgttgggaattataagtaaaaatacaattttgaaagcaattcacaacaaaaagtgaccgatgaagccacaagtgctagttgggaattataagtaaaaatacaattttgaaagcaattcacaacattcttgatgaaatacttaagttgttaaaagttgggaattataagtaaaaatacaattttgaaagcaattcacaacttaatcctttcggaataatccctgaggtggttgggaattataagtaaaaatacaattttgaaagcaattcacaacctaagctagcaacaaaattgccccatgaatgttgggaattataagtaaaaatacaattttgaaagcaattcacaacaaatcttcggaactaagctttgccgtttttgttgggaattataagtaaaaatacaattttgaaagcaattcacaacatcatatttcacgtttataatcatacttttgttgggaattataagtaaaaatacaattttgaaagcaattcacaactgtcaaaatctcctttggttttcttaacgtgttgggaattataagtaaaaatacaattttgaaagcaattcacaaccgtttccgttggtagcgaaataaccagccggttgggaattataagtaaaaatacaattttgaaagcaattcacaacaacaagattaaagcattaaccgaggtgtcagttgggaattataagtaaaaatacaattttgaaagcaattcacaacaataaacttcattaattctctatttccgcgttgggaattataagtaaaaatacaattttgaaagcaattcacaacaagtaacagtacaaacgtttttctcgtcgtgttgggaattataagtaaaaatacaattttgaaagcaattcacaacttcattaatacttcagcagcaaacaagcgtgttgggaattataagtaaaaatacaattttgaaagcaattcacaaccaaacattacgtatttttccataattgtttgttgggaattataagtaaaaatacaattttgaaagcaattcacaactagccaacgggatgcttgcttcaactaccgttgggaattataagtaaaaatacaattttgaaagcaattcacaacgatgcttctaatgtcgttattatcagcaaggttgggaattataagtaaaaatacaattttgaaagcaattcacaactgatccgctcaataagctttggaagctgctgttgggaattataagtaaaaatacaattttgaaagcaattcacaacattgaactaaaaaacaaaacaaaatggaaagttgggaattataagtaaaaatacaattttgaaagcaattcacaactgctgttccagctctttgtttatctgctccgttgggaattataagtaaaaatacaattttgaaagcaattcacaactagcggaaacgatgaattaatcgaagataagttgggaattataagtaaaaatacaattttgaaagcaattcacaacttaccagctttaaaaaagtacttgctgcaagttgggaattataagtaaaaatacaattttgaaagcaattcacaacccgagttgtgcgcttcccatttacttctcagttgggaattataagtaaaaatacaattttgaaagcaattcacaattggagctactaatttatacctctgaaatttaaatgtaattttgggatgttatattctgagaaataaaaaaacctttttgtaccctaaaaccactcttaattagataattatttttttatttaatactgctttactatctttcgagttcaatttattagcaaccttaaacattgaaccaatgttagaagaaaagaatgataacctgcaaaatgcagatggaaaatcagcactagagtctctcgaaaaaaaacaaaccacagctcctgaaaaagacgcaacggaaaatacaattgctggaataagtgagcaatccttagagcaggattcacaaagggcactgcgttctattgatgcttctaacgccgaagaaagcgaagaccaaaccctgaaagagcgccatgaaatacccatgcaggattatgactctttatctatggtagatctcgttgaggcattaaatatcattgctggctctgataaaataatgtctgttaaagaacatgtggatgaaattaaaaaatcttttttagcaaaatacacccattttattgaagagaagaaagaagaatttcaggctgaaaatccagatagcaccgaagattttgaatatcatttgcctctgaaggcacaatttgatgcattgtatactaccttcaaaaataaaaagaatacgcattttaagagtttacaaaccaacttaaaatccaatcttgagaataggcttgctatagtggaagaactaaaggagttaatcaatccgcaagaaaatatcaaagataccttaaagcattttaatgaattgcgtgagagatggaaaaatgcaggttccatccctaaggacaaatacaatcatgtctggaataattaccattttcatgtagaaaacttttacgattacctacacttagatagagaagcaagagatttagattttaaacataatttagaacaaaaacaaaaaattgtgttacgggttcaagaacttttgaatgaagaggatgtcaataaagcctttagagaactgcaagacctacacagaatgtggaaagaggacatagggcctgtatctaaagagcaccgtgaagaaatctggaatttatttagtgatctcactaaaaaaatgcacgacaaaagagagcttttatttgaaaaacaacgagaattagagctagtaaacctagagaataaaaaacaaatcatagctgagattgaagatttggctaccattaaagtacatgcacactcccagtggttacttcagattgaaaaggtagaggctttgagaactgccttttttgcggccggaaaagttccctctgaggtaaacgaagctacttggtctagttttaaaactgctgtcagaaactttaattcttttaaaaactctttttataaagaaataaaaaaagaccaaaacgaaaatctaaataaaaaaaatgccttggtagcaaaagcgcaagaacttcaagataatacggattttgaagccactacgcctatcatgaagaacattcaagaagaatggaaaaaaattggacatgtgcctcgaaaattttcggacaaagtctggacggagttcaaggctgcttgcaaccattattttgatcgtttaaatgagcaaaagagtgagaacattgccgaagaaatggaatcttttgacaaaaagaaaacctacttagaatctttaagagagtttgagttatccggagatcacaaaatagacctagaggccattaaacaacatattgaaaactggaaaaatctaggaagagtaccccatgctaggaggcatattgaaggcaagtttaataaaattttagatgctctttttgataaattaagtcttagcaaaaaggaaacagatatgatgcgttttaccaaccgtctggataacttagccgaaaataatgaaacccgtaagctagaaaacgaaaagatttttttgatacgaaaaattgacgaagttcagaatgagatttttcaattagaaaataacatccagttttttgcaaataccaaaaatgctaaaaaagaaaattctattgtattggaggtgcgcaaaaatattgccatccataaagaaagcttagaggtttggaaagaaaaactaaatcaattgcgtagcttaaatcaagaataaactggatttaaagaaccaaaacaaacctcattctagcaatagtttgaggtttttttgtgttcaaaacaatggttttattaggttagaagcatgataattatcattttaatatttagggtatacttttacttttgaacaatagctaaatgtgatataatgaaaaatgctttaattcaaaaatataatgttcccgggcctagatataccagctaccctactgttccgtattggaacgaagaggattttgtataccaaaactggatggataccctacaaaaaacctttatagaaagtaatgccaccgacggaattagtctgtatatacaccttcctttttgcgaaagcatgtgtaccttttgtggttgtaacaaacgcataaccaaaaatcatgacgttgagcatccttatattcaggctgttttaaaagaatggtcgctttattgcaaggttttagatcaaaaaccaattataaaagaaattcatttgggtggtggtacgcctacttttttttcgcccaaaaatttagaagatttaatacaaggtattttgagctatggatctaaggctacaaattatgagtttagttttgagggccatcctaataatactactcaaaagcatttacaaaaattatatgacttaggttttagaagagttagctttggagtgcaagattactctcctaaggtacaaaaagcaatacatagagaacagccctttcataatgtggctaaggttactttgtgggcaaaagaaattgggtatacttctataggtcatgatattatttttgggttgccttttcaaaatatagaagacgtgattgataccattgaaaaaacaaaatccttgcaaccagatcgtttggctttttatagttatgcacacgtgccttggattaaaggcaatgggcaacgtggttttagggatgaagatatccctaaagataaagagaaaagagagttgtatcaaaaagggaaagaattgctactcaaaaatggctaccacgaaataggaatggatcattttgctctaccaacagatagcttatataacgcttttaagaacggaaaattacaccgtaattttatgggatatagtgcttccaaaacaaaattaatgattggcctgggggtttcttctataagtgatagttggtacagttttgcacaaaatgaaaaaaacttagaggattattaccagttattagagtggaataaattacctatatacagagggcatttattaacgccagaggatctcatcatcagaaaacatatccttaatctaatgtgtcaatttgagacttcttggaaagatattgcgcattattttgacgaaattccggatgtaattgcccaattggaagaaatggataaagaccaattagtacttattaaccacaacacgatacaggttaccgaaatcggaaaggcttatttgcgtaatgtatgtatggcttttgatttgcgcttaaagcgaaaagctccagatactaaattattttctatgaccatttaaaacgctttatttgtactaaaaaatccttttggtatgctaaaaaaccgcaaattctagatttagaacttgcggttttttttaaaattaaaagcaatggcacctatgtaggggctataatttacttttagttactgttggttaagatgctatataattcgtcttttaaaaataaaaactttgcttttacttcgtgtgcgtgtgcatctgtaactgcctctgtatcggtattgatacggtgtatttcatgctccaattcgtggtattcatcaaataattttctgaaatggttgttttctacttttagttggtgaattttttctgcatgctcgggaaactcgtggacaaaattatgtctttccatgttgattgatttattagtggttattaaattaatgacaatttggagtagcttgtacaaacaaactcatattagagggtgaaacatacggaatacctagccctagacctctcagtataaaaagtactccaataaaaacggctacataaggaatggttttttgaattttattacgaacctctaggctaataaaagtgttcagatacacaatgctactcatcatgggcacggttcctagtccaaacaaaatcatgtaaactactcctagactagcactttgcatggctatggcgccaaacaaagcaacgtagaccattccgcagggcaaaagcccattgagtaaccctatggtaaataaggattggtaacttttgttcttgaattgtttgcctaattgctgcttgactttggctataattttaaaaacaggctttgaaaaattatattttgcaaaaatttgttcgggtaacaaaacaatagcaatcatacaaatgcctattataatagacattttttgctgcaatcctgccataaagaaaccttttccaactaatccaaaaacaagcccaatggtggcgtaagcggttattcgtcctaaatgataggtcattatttggattaccttttttgct

SEQ ID NO: 1077 - DNA, 24608 bp, synthetic construct
  misc_feature 1..24608: note = Synthetic
  source 1..24608: mol_type = other DNA
gaggttcaattccctggacgtgaatattttgtgcgttcacatgaattggcgctatttgaaaggggcacgcagattgaaatgaaagcaggtgctgatggcgcaagattgctgctattgggaggaaagcccttgaatgagagaattgcatggaaaggaccaattgttatgaatacagatgaagaacttgaagtggcttttgaagagttctataatggtaattttattaaaatagcaaattaatttataatgcgattcgggttttaaaagagtttgtagttaattcaaattaactcaattgatataaaatttaccgtaaaaaagaagtagtaaaatctatcaaaaataagcttataaattcataggtaataatcatatttgcagattcaatagtttaccattcttatgccgcagctaatcgctttagtcaacccaaacgatgagattattggttatgataataaaacagtagttcatcagaaaggattattacatagagcattttcgattttgattttcaatagcaaaggtgaaatgctattgcagcgcagagcacttagtaagtaccattcaccgggtttatggacaaacacatgctgtagccatttacctaaagggcttgagatggaatccattattcatgaaaggttacaggaggagatgggctttgatagtgaattaaagcatacattagcattccactatcaggtcaattttggtgatggtatgatagagaacgagatcgatcatatctacattggattttttaatggaaacccaattccaaaccccactgaggtttgtgaatgggcttggcgtacaaaagattatgtattggaagaggtgaaaaacaaacccgaaaaatatacttactggttcaaaaatatactcgaaaattatttcgattccatagaagaaaaactgaaaggttgttaatatcatctagttagcattatatatttctttctaaatagtagtaaacatcttgattcccagcgttgttaacaattgttgataaccactgtttaaaacaagtgcatataaacaaacaaaaaacattgcaatcacttgatttccaaagtaaatttgtttcatcagacaagcgataaaaggtttgccgctgaaaagtaaaagcgaaactacgctgctgtaaaaagcaacataagccgtttgagaactaaagaaaagaaatcgaaagaggactaatctgaatgttcaactaatcagagggcggatatgaggggaaaagtagctgtaataggcgaattgaaaccgaatatgggcgaaagaaaacctgcccgcaagggtaagagtcccgtcaaccaaaataacagtagtctgacacttcagcggcttgtccgtaaaaagtgaccaggattttttcaacccgaaagaatcctggttttgttttgtagtttttgtaaacgaattaatgtgattcgatataatttttaacacagaggtctaaagttctgaatataaacaaaatggttgttttaataagatgcaagtttgcccaaatgatgtttattgatattgagaagcgcagagaacacagaggttttttgattttgcatttatgcaaaatcaacaatgttaatatctttaattttcaacttatcaatgtaatcccttgttttggactgacatctaattaaacttccaattttgccatttgtcttgaatgtcggagcttacgttggtttgtggattttgttctttattgtttatcaatactgatttaaggccaatttgctccattaaataatccgacaattcttgataggtgaaattaccttttgattctttaatttttttaagcaaatagtatgtaaacaacccatgttctttatctttatatgcaagcgatgattgctcaccactacttgcagtgaaaaccacaatatttccgttaagtatatcttccttaggttttacttttactccccttgcagcaattaaaccttgcttgcgagcacctccgctaaaacaggcatcaagaaatacagtaacccttttgcaaggatactcggttaattttttataggcatccattagtttaatcccatcgttaacgttattaccgctaacatcaacaggtattaggtagggttctttgttcacctcatcgggtaagccgtgtcctgcgtagaagaagaatagctccgcgttacccgaactgtttttagccagtaagctaattctatccaaggcttgtttcattttgcctgttgtagcatcaaggaggaatgttatgttttcggtaggaatatttagcgactttatggcatattccttaaatgcactagcatcgtttctggcaaaatctacatttacctcatttgtaatatcggtttgctgggaggcgtaatcttcattgcctataattagcgcaaaccgattttggtttttatgtttaagttctggaatgtcattatctacatccgatttgaatttgaatgtgtattttccattttcattataattggatgccaatgatggtgaggaattactctttttcaataactcatcaaagttgaattggctgatttgatcgaataaactgttgtatgctacggaatacgtttcggatagtacccttccggctttgtagtatggataatgggtaatgctaaagggtgcgctagaattaaacttaaaatcgctaatcgtagtgttgggaatatttatagccaactttgctgttaagtctgttgatccccaccaaggtgtgtaaggaaaccatccagtaaacggccaaaagaaggcagcatcaaatatccatgttctttttatcttttcggagggtacaatgtcaatatcaatttttaggttagggtatttctggataaggttgttgagtgtctcattcttataaatagcattgataaatctatttttcaatcccgttatatcatctgctttgtcttgatttgtaagtgctgtgattgttaaatcgatatttgggttgtcgatggttttgctactcgatctaacaatttgccgacctttgtagttcattcccaaacggcttggggttacacaacttataaaaaggatcgacattaaaatgaatgaacaggtcttcatatctataaaaataaattagttaaatggatgattcatacgttggttgctaaagatgaatcgcaccataaaaatagctaatttatatccttatctttttatttttcaagtttttttcagttcggaaatgataagagtaagaatatcaagttgaaaacctgtaggttgtgatttgtattatatcgttaaaaactagatttgcagggatatacctataacgaaatcataaatattggattgacaaaaactaattcagtttaatttttctaagccttaggctatttgaaaccaccgaaacagagctcatagccattgcggcaccagcaatcattgggtcgaactgaaatcctgtgaatgggtagagtatccctgctgcaaggggaattccaataaggttgtagataaaagcccagaaaagattctgcttaatcgttttcatggtttgttttgaaagctgaattgctttggcaatttgattaagatccgaggtgataatagtaatttttgcaatctccatggcaatatcagaacctttgcccatagctatacttacatcggcttgagcaagtgcttgagaatcgtttatgccatcgccaatcatagcaacaatcctaccttccgattgaagtttcttgatatactcacctttatcggatgggagcatactggcctcaaatcgggtaattcccactttactggcaacggaagcggcagttgatttgttatcgcctgtgagcataattacatcaatgccaatttccttaagcttagaaatggcttgttttgatgttagttttattgcatctgcaatgacaattgcagcaataacctgtttttgatctgagaagaagattactgtgtttgaatcctgctcccattgcaatatcttgttttttatggagtccgaaaaagatatcccattgtcaagcatcaatttttcgcttccaaccagaaagatttcatcattaatatgtgccttaatacccaaccccgttaatgcttcgaagtgagctgtttttaggggtgagttagtttttaatcctagatatttaactaccgcttcagcaagggggtgttctgataatgattcaatggaatataatatctcctgatatgttttaaaatctgaaagaccttcaatccatattttgtcaactacttcgggttttccctcggtaattgtccctgttttatcgagtacaacggtgttgattttatgggcaatctcaaggctctcagcgtcctttattaggatgttgttctcagcaccttttcctacacctaccattatggccgttggagtggcaagtccaagggcgcaagggcaggcaacagccaaaacggttaccagcgcaagtattccttgtataacccctttttcgccaccaaataaaatccagataatcatgctaagtatcgcaattcccattacggttggaacaaatattcccgcaattctatcggcaagttgctgaacgggtgctttacttccttgcgcttgctcaaccatcttaattatatggcttaaaatagtctccgaaccaacctgctccgccttaatagttagcgttcctttttggttgattgtacctgcaaaaactttgttgtctactgatttaaatactggcagtggttcaccagtaatggtgctttcatcaacgaacgatgagccatcggacacagagccatcaacaggaattctatcgcctggctttacaactaccaaatcgtttgctactacctcgtggataggaacttcaacaagtacatggttttttaatagcgttacagttgtgggctgaagacccattagcttacggattgatgatgatgtttttccctttgctttctcctctaagtatttgccaaggagtatgaaggttatgattactgctgccgactcgtagtaaacatgtgggtgtaaaccacgattatgccagaattcaggccatattgtgttgaataggctaaatgaaaaggcaataaaagtgcttagcgcaacaagcgcatccatgtttgccttaaaatgctttgcctgcttaatggcgttgatataaaaggtccgtccaaaccagaagacaacaacgatagagagaaccatcgatatccaaggtgagtattgccagttcatgaaaaccataccaagaactacaactggtatggagaatatggatgatagaattgttttcgtttttagcgagtggatgttcttctcccgtgcttcgctaaccgatttattagtatcaacggaatcaataattagatcgtaacctattgagcgaattacctcttgtagcttggcaggtgatatctgtttttcgttaaagtcaacccaggcggtatggtttgctaggttaactcctgcatcggtaactcctgcttgtgatttgagcattgattcaacgctgcccgagcaaccagcacacgacatgcccgttacagggtaaattacttttgtcattactaaaagatgtttattattgagaataacagccaaaagtaggaaaagtttatggggagtagtaaagttgatttgctgatatgtcaacgtgtggagaagatataatttgagataacaattagtgactgaaaatatagtgagatgaaaggcgtttgttgataagggcttttttcgactggaggggaaatggagatgtgttgttttatggatggttaagagtgccgatctctttataaaactttctctgtacttttttcttgataaaaatgtacccaaaaatcaagaagatatgatgctccgacccacaggctagctcaggctcgccatatcttcaggccgcccgctgacaaaacaatgattttgggtgatggattgccattttataatggacgaagattatctgaatgcgggcacggacgaggacgtccgcacgagcaggtagttgatatgccaaaaagcggggaagaaggtaggagtgaggcataatcagtttttttatgggagttgctgataatatgttgataatttcattatctgttttatatcttatcaaatatcttgcaataactttcacatcctaaaatattttgaaatggctatatttaacaaaaatcagcagggagcaaaattgtctccggagaattatataaggcaaagagccagaacgcttccagtctacgagtgtttggtaaacaggggctgggaggaatcaaaaatggcggatgttatagttgccagattgcacgttaatggtaatgttacgctagggttttatcaggtcgatttattttgtttaggcgtaaaggatacatggtatgcttttaatattccaattcatgagtatagagataaatttgtaactccaaacagtgactatgagatggagtttgataagatagattacaagctagctcataatataatttttgctggggttgattttgctactaatatagggtttgaccctcataaagatttcctgaaaactacacagtatttactcgaagaggatgatgaaaacgttgaacttgttgaggtggagtgcggttacaatggaatgcccgcagtagttagaggcgaagagaatagtaaggaatgttcgaaaattatcgcaaagctcgattatttggttggcaaagggaactatcatgtgattaatattgatgggcttgatgaggatgaacccgaagaagaggttgccgaatacactcaggagcagttcgaggtggataagaagacctttaaaaaagggataaaaaaaatcaataagtttaaacccaatgattttatgaactttctggaagtttctaggcgaatgttttatcatctggttgacgacagtaaggttgatgaggcatacagtaatatgactgaaacattagatgttgtggtgtcttacaacgatattcccgatgaattctttggagtctcaaccagtactatcaaagatatggattggcttaagagtacaatgattgatgctttttatgcaaaagtaggtgatgagaactttttaatactatacaactctttaaagaatgcttatcccgacatgcctgctgtagctgcgctggatttgtccttgttgtacgattcagattttgaaacttatcagcagagattagaggagtatagggttaaattccccgattataaacttttcgatataatgaattacctggaagtttcggagagtaagcctttcgatgaggagttactaaaaaaagaattgagattatgtgatttttttgatgaccgaaaaacgttattctgggttgagatgtatcattttattaagttgtactcattgcatacgctagcccaagccgatcccgttcgaattggggcattgtacgattttttatttgaggattacctgccacaggaggcgacaccaccgggtaaagttacttcactgatgtttatgactgattatgtgaaggaatctatataaaaggttgtagatttgctaacaattgatatcattgtaactattcagcaatagacgcaataaagataaaaactacggagacgtagagaacatagagaggcacagagatgattattcaaaaaaatgtattggtgttgcatgccattaaacagtttgccaagttgtttcaaggctattttttctgtgactggtgaaacaattattgagataaaactctgtgatctccgtgcctccgtggtgaacattttcatatcctacaacatttaaatcaaccctaaaaataattgtatggaaacccccattaaccccaaaagcactaagaatgaaattctagcagcttacgatgatttacttaagcagataaaagacggcaaaaaggacgatcagccaagcggacaatccacaaaggagcgggaaaaacctcaaaaagtggcagctgatgtatcgttcgaggggattgttaaaagcatagccgatcaaaagataaatcttacaacttcgcttgataagctggaaagtcagctgctcgaaaggtttaaacagctaacccagttgaatgaaactgttaccaatcaggaaaaatacttaaacgaactttactccattaaggcgaatgttgattcgttggcagctctaattgaagcacaaaaggttaaaaaggtagagtttgagaaggagatgagcgaattgcagaggttgtttgagaccaaaaaggtagaatttgagcgtgaattcaaggagcaaagcgataagacccagcgtgaacgcaagcgtgaggaggaggaatatcgctataaccttgctatttctagaaagaaggagaccgatgcctatgaggagaaaaaacttaaggctgagaaagacctacaggaaaagagtgaggcttttgagcgtaaagctaaagagtttgaagccagcaaggctgaaatagaattggagctaaccgaactacgtaagcgggcaaagaatttccctgtagagctcgaatcggctgtaaaactagcagaaactaaccttgaacaacgcctccagttccagtttaagcacgagcgtgaccttgctacccagaaaacggagagcgaacagaagttgcgtgaccaaaccattacaacccttaaggataaaattaaggagcaggaacttctaattaagcagcttgcagaaaaggctaccagcgccgagaatagcgtgaaggatattgccataaaagcccttgaaagctcatcgaacgttaggatattcgaaaaatcgaaggagggacgggataattagtgtgtacttggttagcgtaagcaataggtaatataaattccatcgggggagttcctatctctttatgagattggaactctttgtatttaatcccgaagggattgaaggtgaatagccccgtatgcaagcggggtgaggtatgagcgaaagaacaaccacaaagtggttgaatattattagtataatgaattctgtgaagcagggtgtttgttattttgaattagtgcggtcaaagaccgctatttaaaaaagacgaagtcgcagacttcgcccagctggggtaatttaagtggtttgactccagaatgttaccatctaatcgcaggatgtgatgtaaatatcgcaagatgtgataattttgcattgtaaggcatctgtaaatgatgcaataccattaattgattgtataatgtgaatctcactagcgcagatttagctacgctgaactcgtaaagtacactcggttgtaaccaaccaaagtgcgctcagcaaagttaatccatgctagagttaagagcgatacatacagtaattggcaataaaatttaagctagagaagcacggattcgacggagcgtataaactccagccccttgaaaagtggctataacagagtggtacggtggtttcttttcttttttgaggagagtaggagtgataattttaatggtttgactccaaggtgttatcaattaatcgcaaagtgcgatattattattgcaaattgtgataatactgcatatgaaatttaaaattaaataatacgtatttttaagtttaacactgacagggttcaaaaccctgttagagtttgtatgattttggcaaagttgtaggtgaattttatataaacgctgccagcttctccgaactctggcaggttgtgaactgacgaattacggaagacccggcagcgttcgaagaacctgccggagtctaaaatggtaactatgaaaataaatctaggaaacccattggtagtcagccaaaatattttatacttttataaacgattatttaaacaaaaaaaggcgacttgcgccgccgtaaatgttttattcatgctttaaataggttttaatatggtattcatgaaatatttaagcaaaaaaatacccccgtattgtaagacgagggcggcttaaatgttttcacaacggaataatccttattgtgaattgcttttagattgtagaacaaatatagacataaaaatttaaagtcaatataatatgaaaaagattttaggacttgatctgggaactaactcaattgggtgggcgttgattagcgaaaacgaagcgaaaaaagaaattataggaatgggtagtagaattatacctatgagtcaagatatcctaggcgaatttgataggggtaattccgtttcacaaacagcagaaaggacaggttttagaggagtacgccgattacgtgaaaggcatttgctgcgccgtgaacgattgcacagagtattgaatattatgggctttcttcctaggcattatgcagaatctattgatttcgaaaagaatttagggcaatttatagatgattctgaaccaaaattggtttatcgaataaacccaataaccaatagggttgaatttatctttcaagaatcctttaatgaaatgatggctgattttagaaagaatcaaccccgtttattagagaaaaacaaaaagatcccttacgattggacgatatattatttacgtaaaaaggctttgacctctaggattgaaaaagaagagttgggttggcttcttttgaatttcaatcaaaagcgagggtattatcagttgcgtggagaagatgaagaagaacagcaaaataaaacggttgagttttattcgcttaaagtcattgatgttattgatagtggagataaaaaaggaaacaatgatatttggtataatgtggttttggagaatggatggatttatagacgaacaagtaaaacacctctagattggaaggggaagattaaagattttattgtaacaaccgatattgacgaaaatggaaatgtaaaaacagataaagaagggaaagagaaacgttcattcagagcaccattggaggacgattggacattaatcaagaaaaaaactgaagcggacatcgacaagagccataaaactgttggctcatacatttatgaaacaatgcttttaaatcccactcagaaaataaaagggaaattggtaagaacaattgaacgcaagttttataaagaggagttaaggcaaattcttgagaaacaaaaagagtttcattcagaattgaacgattctaccctttattctgcttgtttagaagaactatacgaatttaacgatgcacataaaaatagtattagaggtaaagatttcacacatctctttttgaatgatattattttctatcagcgaccattaaaaaccaagaaatctttaatcagtaattgtcagtatgagacgagaacttttattaaagatgggaaaaaagaggtagaacccctaaaatgtattgccaagtcgcattctttatttcaagaatttagattgtggcagttcattcacaatctgaaaatatacgtccgagaaaaagtggtaaatggtaaaattgaaaccgatgttaacattaccaacgaatttttaaaaaccgatgatgattgggttaatctatttgattggcttaatggtagaaaagaaattgatcaaaaggctttcttgaaatatttcaaattaaagattgaaacacatcgatggaattatattgatgataaggagaataaaaaaagttatccatgcaacgaaacccattttcaaatagcctcccgtttggcaaaagttgaaaaccttcctgatgatttcttgactaaagaggttgaagagtcgctatggcatatcctttattcggtggaagataaaaaggacattgagaaagctctaaagacctttgcagtaaagcatggattgaacgaagattttgttgaaggtttcaagaaattccctcggattgaaaaggagtatggctcatactcctcaaaagcaatcaagaaattgttatcgttaatgcgtatgggaaagtattggaatgaagaatcaataccatttgaaattaaaagcagaatagaattaattgttgagcgattgaaatctgtagattatattgaaagtaagattgattcaatagccgatgatgatattccaaaacaaattttaaaaagttttgtaaagtgtaataatcattatagcggattaaatacctatcaggcttgctatgcagtttatggcaggcactcggaatctggtgaaatcagaaattgggaaacccctgccgatattgagcaatacctacgagaagaatttaagcagcattcacttcgaaatcctattgttgagcaggtaataaccgaaacgttgagggttgtaaaggatatttggaagcattatggcaatagtgagaagaattttttcaaggagattcatattgagttggggcgtgaaatgaaaaatcctgccgataagcgcaaaacaatgactaatcagatgtctgagaatgagaatacaaatttgaggattaaagcaatgcttgttgagttatttaatgacgggaatattgaaaatgttcgcccttactctccaaaccagcaggaaatactcaaattatacgaggaaggcgttttgaatgctgaaactgatattcctgaagatatcctgaaaatatcaaaaaagtcacaaccctcaaaagtcgaaattgagcgatataaactctggttagcacagaggtactgttccccatacactggtgaaatgatacctttatctaaacttttcacaacagcatatcaaatagaacatataatacctcaatcccgctattttgatgactccttaagcaataaggttatatgcgaggctgaagtaaataaggataaagacaatagtttggcttacgagtacattaaaaataatagtggtaaaaaaattgaattgagctatggtaaagaggttaccctttttacactcgctgcctatgaggaacatgttaagcgaagtttctcaactagtaggggtaaaatgaagaaactgttaatggaggatattcctgaaacttttattaaccgacaattaaatgatagtcgctacatcagcaaggtggttaaggggctgttgtcaaacatcgttcgaacagaagatgaactggagagtacttcaaaaaatgtattatcaagcaatggtaatattacatcaatactaaaacaggattggggattaaatgatgtttggaataatgtcataacacctcgtttcgagcggttaaataaacttactggtagtaataattttggtcaatggaccagtaaggaggggaaacaagtttttcaaacacaggtgccattggaattgcaaaaaggttttgtgaaaaagaggattgaccatagacatcatgcaatggatgcgttggttattgcctgtgctacacggaatcatattaactatctgaacaatgaacacgcaaggcaaaaagaggataaaactcgctttgagttacgcaatatgctccgaagaattgaggaaattgaagttgataggattgaaaatggccagaaaatcagaaagaaaattaaagtagccaaagagtttcacaagccctggaaaacatttactcaagatgctcaatctgtactagagggtattgtggttagtttcaaacaaaacttaagggtaattaataaaagtgtgaaccattatcaaaagtttgttgacggtaaaaaagttcttgaaaagcaaatcaaaggagatagttgggcaattcgaaaacctatgcacaaggataccgtttcaggtagcgttactctgcggtttaaaaaaatggttcaacttacggttgcaattgatagcgtagaaatgatagttgataaatccttaagagcaaaagtaaaagagctattagtacagaacaatgataaaaagaaaattgtcaaattttttaaagacattgagtataaatggaacgataaggacatttcgagagtcgaaatctactacttggataatggaaatgtagcatcaagagtgaaagttgacgaaagttttaatggtgaaaaaattggtaatattaccgatacaggtattcaaaagataatgttaaatcacttgaatcaggagaaatatcaaaatcaattagatgagagtggaaaatcgatactgcctgaaacactggctttttctgctgatggcttggatgatttgaatgcaaatattgtaaaactcaacaataataaatcccaccaaccaatactcaaggttcgaacatttgaacccaaagggaataagtttaatgtaggtgttactggtaataaaagagataaatttgttgaagctgctaaagggacaaacctgttttttgctgtatatcaagataaatcaagtaaacgaaattatgaatctattcaattaaatcatgttattgaattgcagaaacaaggttttatgccagtacccgaattgaatgagaaaggtgataaactattattttatctttctcccaatgatttggtctatgttccaaatgaagaggagcaagagaatcctcatttggtaaatttttcaaaattgcaagaagagcaggtaagtaaagtttataaaatggttagttgctctggaaatcaatgtttttttatcagaaataatattgcaaactctattgttaacaaagtggaattttctgctttaaataaaatggagaaatctattgagggtacaatgataaaagaattttgttggaaactcaaagtcgaccgccttggcaatattaccgaagtcaacgggaaaccaattttataattcaacggttattaagaatatctaaccccaacagggttttgaaccctatcgagggttcgttggttaaccaaccctgacagagttttaaactctgtcagggttttctacaaaagggttaagttcatctaccataggcttcaaggttttttataaaaaaatcttcctttttttgtcagtatcccaaatattatttaatttagtattaggaaaggctattgccttctctgcttttgttttacgcctttattattttattaactaacatctaaaaaagtaaatgttatgagtaactacatttcagcagaaattacccaagaggtaattgacaaagtgaccgccgatttggtcgacattcaatccaaactgccttttatacttaagctaagccctgccgttaagcagtccatgcccaagctggaggattcccgtgctccatttgtaaacaagtgcctcttctatgcacgtaaagagtctaaaatactacccccttataccgatatcgatgagctggagcgcgatctcaagctgttcaataacctccagaatattgccaaggaggttgacaggctgtccgatatgattaacgatacccgcattgctgctggttccgatgcttacgtggcagccctctcaatttacaattcggttaaacaggcagccaagatgaacgttcctggcaccaaggccattctggacgacctgaaaacggcgttcgaaagcatgtccaactccaagaccgctaaagaggtaaaagtcagctagaccgtgctttacggattgagtgatggggtacttgaaaagtgggagggggtacttcgcaagtacccccctccacctcaataccaagcaatcctatcattttaataagcggccttaccgaaacgataagaccgcttatctttttgacccgttcgcttatcgaattaacaagaccgcttatcgtttgggtaagcaatcgcatcaaaatgacaagagagcctatcgttttaataagcaatcctatcgaaatggcaagagagcctatctttttgataaacaatcctaccgaaacagtagggtgacttaatgatttcacaagcagtttatcctaaaatgtagggtgtgccattttgatgctaaaataagataatgaaactagatcaaaatctggcaatgtataaccctgacagggttttgaaccctgtcagggttatgcccccaaataataatttcaaaatactttacccatgaacgaagaaattaacggcttttacgatgataatggcaataagattaaccccaatttgatccctaaaccgcagctttgcctttcgtgcaaaagtaatggggttgaggattgggacgagaacctgctctgccagatgaaccgttacgatcagcggaacgataaggagtttaaatgttttgcctacgaggcgatttcttgataattggttaggataaccttccagaatccgcaggatctggaagcgttaatacgggataattgattaaactcttccaggttctacgaactctggaaggttgtgatttaaaaactcttccaggttctacgaactctggaaggttaggtttataaggagtataatatgaaaaaaacgagggagatagaattagaatatggtggtttctatcatatttataatcgtgggaataatggaacaacattattccacacccctgataactactaccactttcttcgtctttacgagaaatatgtcgaacccattgccgatacctacgcttggtgcttgatggggaatcattttcatttgctggtgagaataaaggaggagggggatattggttttcttgctgattttaactcttccaggtctggcgactctggaaggttaaaatggaaaacctctcacaaccgtccagagtccgaaggacctggaagagttatgggtatgaagaaaccaataccccacaggatgtttggtcatctttttaattcctatacaaaataccttaatctaaaaattggaaggacaggcagtctttttgagaagaactttcatcgtatccccatcaattccgacaggtacttccgaaacctagtgatgtatatccaccaaaacccggtacaccatggttttaccaatgattttaaggattacccttggtcatcgtacggatcggtgatatcagaaaaaaccacaagggttaagcgcaaggaggtgctggattggttcgataaccgaaacaattttatatatgcccatattcagcccattgatacggattacatcaatcaccttattgtggagtaaacctgaagcacaaccctgttagggttttaaaccctaacagggttagatcatcatttataccgattcgcaatatattatagtccaagaagcggactatatttattgtcgatcggcattaaccaatgccgttttataacaagacctttggactgttttataaaagcatttggtattatttgttgttaaccaatcatttggattcatctatttggaggatataccttttaatttgtaacttatcatgcaaacaaatataaatcccctatgataaaacgtaccctcctttttggaaacccagcataccttagcctgcgcgaccagcagctggttgccgatatcactggcaacgaaaaaaagcagatgacagctcccgtagaagatatcggggtggtgcttttggattcgtatcaaattaccataacacatcagctgctaaactccttacttgccaataataccgccgtaattacgtgcaacgagaagcacatgccttacgggctgctactcccccttgagggtaacacgctgcaaagcgaacgattcaaggatcagatggaggctagcgttccgcttaaaaagcagctatggcagcaaacggttcaggcgaagattgctaaccaaaggtggctactgcaagcaagaggaattgatgttgagcccatgcgctactttgaggcgaacgttcggagtggtgatcccgataactacgaggggcgtgctgcggcatactactggaaaaatctttttgatggtttaacggatgatgcatttataagggggcgatacgaggaggaacccaataatctccttaactacggctatgcagtgttacgtgccattgttgcccgaagtttggttgcctcgggtttgcttccaacgctgggtatacatcatcataataagtataacgccttttgcttagccgatgatatgatggaatcgtaccgcccgtttgttgataagctggtgcttgaaattgtgaacgatactaaggattgctcggtactaacaaaggaaatcaaggcacgtttgcttgtgctacccgcaattgatgtgctgattgatgggcaaaagagcccgctgatgctggctacacagcgaaccaccgcatcgctgtacgattgctttgagggggtaagccggaagctcttactccctgagtttatttagattttcaatcctaacagggttctgaaccctgtctgggttaaaaaaaactatcgaatgaccaccgtagacagactaaatcaataccgtgttatgtgggttctagtgctcttcgatttgcccacggaaaccaagaaggagcgtaagaattactcccgtttccgtaaggagctgataaaggatggctttaccatgttccaattttccatttatacacggtgctgcccgagccgtgagaatgccgatgtgcatataaaaagggtaaaaaagctgttacccccgcaggggtatgtagggattctatgtataaccgataagcagtttggtacaatggaactttttcactccaccaaacccatagcggctcagcccgaaccgcagcaattggaactattttagtgatttaacctgtcagagttcgcagaacctgacagtgtttatagtttgaggtatctttttttgaatagaaacaaaaaatccacgggttttgattcccgtggatctccttttggtcacttttttttaatcgaaaaattggtataaccagctattggtcagctataaaaacctacctatgctgtgaccaatatttcaaagatacaatctgaaagcaattcacaactcatggatgcaatgcatcatgtatcttttggctgtgaccaatatttcaaagatacaatctgaaagcaattcacaacggaagaagggaggaggagggagaaggaaggctgtgaccaatatttcaaagatacaatctgaaagcaattcacaacaacgttagttgatggtaccccagctactgggctgtgaccaatatttcaaagatacaatctgaaagcaattcacaacacgatgaaggaggtttatcaccaataaaatgctgtgaccaatatttcaaagatacaatctgaaagcaattcacaaccagctggttgaagtatagccctgcactaacgctgtgaccaatatttcaaagatacaatctgaaagcaattcacaacggagagcgttacgattgttgcaatctgatcgctgtgaccaatatttcaaagatacaatctgaaagcaattcacaacttagtagatttgagcgtgaaaatactaacggctgtgaccaatatttcaaagatacaatctgaaagcaattcacaacgcgcatggatcaataacctccgctacgattgctgtgaccaatatttcaaagatacaatctgaaagcaattcacaactgttggcgataaagttaaattaaagaaagagctgtgaccaatatttcaaagatacaatctgaaagcaattcacaacgagaaggaggaggggggaagagggagagaagctgtgaccaatatttcaaagatacaatctgaaagcaattcacaactgaacccgcataaacaccaaagaataaattgctgtgaccaatatttcaaagatacaatctgaaagcaattcacaactgcttcggtctgatcctgcccatcaaggctgctgtgaccaatatttcaaagatacaatctgaaagcaattcacaactattgcccgcatctccatcattagtagtttgctgtgaccaatatttcaaagatacaatctgaaagcaattcacaactatatatgcccaatttcgtcaacctcccatgctgtgaccaatatttcaaagatacaatctgaaagcaattcacaaccctcataatcaaacccaacgatgtcgaggtgctgtgaccaatatttcaaagatacaatctgaaagcaattcacaactatatatttgcaatataaatattaaataatgctgtgaccaatatttcaaagatacaatctgaaagcaattcacaacaacaaaacgctgagggtttgaagaataattgctgtgaccaatatttcaaagatacaatctgaaagcaattcacaactggggtgcgcaaaacaacttgaaaagtaccgctgtgaccaatatttcaaagatacaatctgaaagcaattcacaactaaaaagctccttgctccgatcaattatttgctgtgaccaatatttcaaagatacaatctgaaagcaattcacaacgtacacagggtgctttttaatccaagccccgctgtgaccaatatttcaaagatacaatctgaaagcaattcacaactatctttttactactaaattaggataccaagctgtgaccaatatttcaaagatacaatctgaaagcaattcacaacaaattcgtctatactaacaatttcttcgttgctgtgaccaatatttcaaagatacaatctgaaagcaattcacaactcggtttagttttaccattttttaaaacaagctgtgaccaatatttcaaagatacaatctgaaagcaattcacaacaaataaactatttaaaaaatttgaaaattcgctgtgaccaatatttcaaagatacaatctgaaagcaattcacaacatgatagtatgtaggctatctaatgcaattgctgtgaccaatatttcaaagatacaatctgaaagcaattcacaacgtaccggtgaagagatatttgcagaaaatgtgctgtgaccaatatttcaaagatacaatctgaaagcaattcacaacatctccgatgcaccaaccacaccaatacatgctgtgaccaatatttcaaagatacaatctgaaagcaattcacaacagtgctagatgacacttgtcatctggtatagctgtgaccaatatttcaaagatacaatctgaaagcaattcacaacattggataacaccagattttgctcatatcggctgtgaccaatatttcaaagatacaatctgaaagcaattcacaacataatccatcgttggtattaacaccaaacagctgtgaccaatatttcaaagatacaatctgaaagcaattcacaaccgataggagagtatggaacaaaaactttacgctgtgaccaatatttcaaagatacaatctgaaagcaattcacaactagtatggctcatgataggaaaatgtggaggctgtgaccaatatttcaaagatacaatctgaaagcaattcacaactcagggcttgaggttggtcaagttgctatggctgtgaccaatatttcaaagatacaatctgaaagcaattcacaacagtacaactaatatgtacacaaatgatattgctgtgaccaatatttcaaagatacaatctgaaagcaattcacaacagtacaactaatatgtacacaaatgatattgctgtgaccaatatttcaaagatacaatctgaaagcaattcacaacgaattagtattagtttgccaccacaaaacagctgtgaccaatatttcaaagatacaatctgaaagcaattcacaaccttccgtctggagttgtcctgtctgttcttgctgtgaccaatatttcaaagatacaatctgaaagcaattcacaactgataaaacattgcaagcaattagtaatgagctgtgaccaatatttcaaagatacaatctgaaagcaattcacaacttggtgtgtcatcgggagatttactatttggctgtgaccaatatttcaaagatacaatctgaaagcaattcacaacggaggtgtagttgcttgggccgtgttgggtgctgtgaccaatatttcaaagatacaatctgaaagcaattcacaacttttgaccgttctttatgtcaaaagttttgctgtgaccaatatttcaaagatacaatctgaaagcaattcacaacgttttaatgtattcaatatcagcatttacagctgtgaccaatatttcaaagatacaatctgaaagcaattcacaacgctgatatatatctgcatgaaatgggacacgctgtgaccaatatttcaaagatacaatctgaaagcaattcacaacgatgcaaacataagccctttaaaagcaaaagctgtgaccaatatttcaaagatacaatctgaaagcaattcacaacggtgatgaagtgggtattatcggggttggagctgtgaccaatatttcaaagatacaatctgaaagcaattcacaacctgcaatcggagttcatgatagggctattagctgtgaccaatatttcaaagatacaatctgaaagcaattcacaactatcctccttatttaagcctaaagaagcgtgctgtgaccaatatttcaaagatacaatctgaaagcaattcacaacaaccgacactaagctaaatgcgagccacaagctgtgaccaatatttcaaagatacaatctgaaagcaattcacaacccattggcaattgctaaaaatctcacttgtgctgtgaccaatatttcaaagatacaatctgaaagcaattcacaacatcaacccctacgcctataattccaacctcgctgtgaccaatatttcaaagatacaatctgaaagcaattcacaacaaatagctgatgctggattatttccagtgcgctgtgaccaatatttcaaagatacaatctgaaagcaattcacaacatcaaaccagaacattcttgagccgcaacagctgtgaccaatatttcaaagatacaatctgaaagcaattcacaacatggaaaattgttgtatctttatggaaattgctgtgaccaatatttcaaagatacaatctgaaccgagcgttctttgtgagttcggcgcagccaaagcaattcacaacatggcttcttatgaatattgtcataaatgggctgtgaccaatatttcaaagatacaatctgaaccgagcgtactttgcgagttcggcgtagccaaagcaattcacaacacaaccagagacactattgatatcccaattgctgtgaccaatatttcaaagatacaatctgaaccgagcgttttcccgataaaaagcatcgggacaagttttgcgagttcgctgaaagcaatctacgatgaatggggtagtttaaataatttgactctaaggtgttatcggctaatcgcaaaatgcgatacaattatcgcaaaatatgataatctgcattacaacctcatcaggaaatgatgcaacaccaaaaattgattgtacaatgcaattctcctccttttttaaggtggggcagaggagagtaagttttgtagttaaaacttccgatctctttaagatatcataaccattagtaaagtaccctataggtgtttagcgtattattttattagaaagatctaagaattgttgctatttagttactttttatttcccatccacgagatgtatagcttaaaagatactccatgatttataaagaaaaaactagagtcatatcccaaatccgtgttattatccgctgcacctccaaagcccataatagcagcaccttctaagtcgtaaccagctgcaaatagcaggaatactggccctgcatttttgtaatacctaaatccaacggaaagagagtaatgaactaatgctgtgaatgaattgctcttaacaaatgttttaccagggttaagggcttcggccatatttaccccatagtcagaaattttacccgttccaaaaccgattttatcttgtgttgaagcatacattccgaaacgcattgctggtcttcccggtatactacccaatttaccacctgtcaggcaaagctggcggagaatatcaaatccaaaacaagcagaataaaatttggcagtgaatagtgtatcatatgcaggaataccaaatttttgatgctctcttccccccggtgttaccaatgtgctgaatttcatagggaatcccatagatgtataacctacaccccaatatgttccaagaattctattcattacagcccctccagccatgtgtttatacatgtttgaagtttttataagttctactgtaaaatatttattgctaaatttacgactggtaaaataaccgtcagtagaggggagttgtccagaccatgtaaaaactccagaaacctccgaactttgaagtttgagccaataattttttaggttaatataccctccgtacttgtatgcttttccaaccaagttattttcaacatttgccgagagtccaaatcgtaaaccaattctgcgtaaggcaaagttgccttcaaaggatgattgtgagtttatatcgaatttgtattttaagtactttccatcatcatcgttgaggttgaaaaccttccattttaatgctgggatatatgaaacacctaaaaaggctggaagcgtatcttttttgctttgtgagaaaagggaagtaggtactattaaagctactgagaaaagaacaatgagaaaattacgcatagcgtttattttaaaaagattttgatttcaaagttaaaaataaatactacaaatgtgctcgtaccttctttgtttaagattaaatcaaagaattttcataacctccaaattagttacttagcaaaacgctcataaaaataagtattttatttagctaaacgggtgtttaattgcaatatttaatgactacctttgaagattaattatttaatagatatgatgaaatctctaagaattggtgatttagcaattgcaatcccaatagtgcaggg

SEQ ID NO: 1078 - DNA, 24602 bp, synthetic construct
  misc_feature 1..24602: note = Synthetic
  source 1..24602: mol_type = other DNA
tgtgaccgaccagttgccgggaggattcgggggaaaggatatctggtatgtggagaaccgggaaggtaaatggggcgagccggtgaatgccggtgaagtcatcaatacgtccggggatgaaatgtatccctatgtgcgggataacggcgatctttattttgcttccgacgggcattatggaatggggggattggacctttaccgggtagagacggccgatggaaaagaacagttgaggcatttgcctgctccgatcaattcctttgccgatgatttcggaattattttcaaacccggtacggacgaagggttattgagttccgcccgttcgggcagaactgataaaatatacagtttctgttttattccccagcagttacaggtgaggatgctggcacgtaatgcaattacggaattaccgatcactaaagtgcaggttacggtgacatccgataatggagagatcgtatatctggaaaccgattctgtgggaattgtttctatgcctgtggtatcggatcgggaatatgtttttgtgaccgaaaatcctgcttttctgaaaggaaaaggaatcctatccacttatcgggaaaaatccgatcgtttgtatgaattgacggtggatatgcagccgatagaaaggccgatcgttattcccgacatttattttgatgtggctaaatgggatctacgtccggaggcgaaagagaacctgaacgaactgctggttattctaaaagataatccgaacattgcgattgagttatcggcacacacggatatggtgggaaatgataaagcaaatatgattttgtcggaaaaccgggcacagtcggtggtggattatctgattgaaaagggcgtgtattgggataggctggaagccaaagggtatggaaaaacacagcctcggcagatcaatgagaaggatgcgaaagcctatccttttttgaaggcgggggacattttgaacgaacgttttgtaggtcgtttaaggggtacgcagcgggaagacgctttgcaattgaacaggcgtatcgagttcaaggttttgcggacgaattataagcccggccccaattctttgcacaatcctaaccggaaagcgatagctgttgaagaaaagcaaacggtccatatcggcacaacccagttgcgggatttaaaaagcgtacaaggtaaattctttacgttgcagttgggtgtgttcagaaatgtgcctgtcttgatcaatcaatttaaagtggtgtttaccgaacaggtgaaagacggtattgtccgttattgtaccggaatttacgatactcgcgaagaagcggtggcagcagcggctcaattgaaagcaaagggcattgaaacgatgatccgggaatattgactcccggcggtagtatctgccggtttgaggcagatcaatgtaaaaagaattttctgagacggttatcgatgaataacaataaaatcgccacaactccgataatgacggtcagagtagggaactgacctacagttgccgatggtgtaagaaatatatctctgaacattttcaatagatcgaccgacaaaaaatgaaaaataccgatcggtaagaagatcaaggccacagaggccagagatacggcacaccaaattccccacaaatttctacggcggcgtgtttcgccggctttttggatatattgtaatatgccggcattcaattccgaaggtaactgttcctccggtaattgcttgaaaagctgttttaaggctttatcggtatgtattttatcggccatgactttttctttttacaattatactaatttattccggtcactgttcagtagtaaataaagtttttttcgggtacggtgtaattttacttttacgttactgcttgaaagtcctgtgacctcggcaatcgcttctattgttttttcttccatataaaatagggtaatgatgccccgttcctccggagaaagctgatctatagctttgtgtaatgcctgtaagtgatcgcctgtaaccgtattttcgaaagtttcgtccacatccttatcgggaatgttctgaatggtttgttcttctatgtaaagaaactcctgtttctttttacgggtgtacgaaatagcggtattataggctatacgatataaccaggttgaaaaaaggctgtttccctgaaagtcttttaaagtccggtatattttcagaaaaacatcctgggttaattcttccgcatcttcctgattacgaacgatccggcagattaataaaaagacgggtttactataatgctccacaatatggctgaaacattccatttcaccattttgtatccgctttatatatagttcatcctgcattctcatgttgcctattggacgcaagttacctatttcggttacacttttttgttaaaaaattacagataaaaacatctttcgaaacaccttttaattaagagtttgaatattaaatcgttggaaatatgtaatgaaaattaagggacggataaaagaaattataataagaatttgtgtttgaataatactgcttttgttgtgtttttattctaaagtgaagcctataaattatagctatatttaccaatgttcgatgatagcgataagaatatcgaatgccggaatcgtggtttgtttgcagcctaaacgggaagaataggattaagaataatttttctgtcttaaagctgtaacctgctttcgtttcatgcgtcaaatgggcaaacagaaaaattattcactttaatattttgaattatgggttatattattgctccttttattgtaggtattatttgtgctactatttatgggttgtttgaattgtttgcccgccggagagagcgtattgccgtcattgaaaaattggcagaaggaaaaactttcggtcagatagaaggaaagttcgatttttcgttcggtagatcgtattcgtattggggattgaggggaggctgcttgatgctgggcatggggatcggactgatcttagggacgattattgttaataatatggtcggttttaatgacgaagtaagttggcgaatgcgggaaattcaggaggttatctacggaggctctgtacttttatgtggaggtttgggattactgatagcatttcttgtagaagtgctttgcttaaaaaagaaaaaatgcaattgatttttatttgatttttagttttgaagaagggctgtttctgaaaagaggcagtcctctttgtttatgacaagggcttaccctcacaagttcatttgagttgagaatggctaaagtaagttaacttataaacgatatataaaaaacgatttatctgttcgtattccatcgttatttctgaataaggaaaaagggaaagtaagtaataaacgagttctattgtgtctttaaaataatgagagagctttaatagaagagacctataaaggaatgggaggaaaatgaaaatacatctttcctcccatttcgattttttattccggtcagtttacatactttttaaaaagccgccagtttattcctgtaataagtttccacatctttccagtgataatatggagctatatcactttttaccgggagtttcatttcgttttcgtttagcatgacctttactagaatgtcatcgctacctttcttacggaagaaaacgaactgaacattacttgccatcgggaagatgcgataattacgccatactccggctactttatccgcatcgtccgtttgatagccacaatcgcccaactccaggaggcaggcaaatggcattaaacaaacctcatgtccgaagcgtaaggtggcacagttattttttttcacgatgcaagtatctgccgtattcaatatattttccagcagttctgcttccgaataaggaatcctgcctttattcagaggagaggggccgtagtttaaataccagtcgtagttatcggccagccataaatcataacattcgtctttcgtaaaaatagaataaagctctaaatccgtgtcgtgactttgcatattgccggctaatttaaataggtccgtcattagcttatcgtcgtctatcttccatttcacataatcctgattattaaaaagagcgttcatcaagcgttccggatgaatatgttctttttggaatttcttttttgcagtgacgatttcatccgatttacgtattttcttaaattcttcattgctcggactgcctatataatacatatcgtgatagctggcatcgttcttgaattgcaacttcggatttaaagattgcagtttcaggcattccgaggtcatggaaagaatgcaacggataacaaccgaagaacgtgcgtttatttcagcttctccctggaacacttccggatagtttttatacattctttcagcaatgcctcggtgctggcgggctcccagcggagttaactcgccgtatctttgcacggccattttagccatactatcgagaatacccagtacctgtttacccaatggggtaagcactccattttggtctgcttcacgcataaggttcaacggtttctcgtaatcgttggggttaatcagaaagcgggaaccatggcgcgcgtaatggctcagataaaacggcttatatcctttgggcggtgcagtcgatgtgcctgtcggagtgggataagcataataattactggctgagcgatgaatgtcggcgaaaatttcttctttggctgtttgcgcaaataatcctaatgcgaaacagcaaataatggctaatagcaaaaagcgtttcatatatctttgttttatagatagagtaccggggtcgaaattaattaaatttgtcccctttctatctgattttcatgaattatttttgaaaacggtactttatcggttttatatgaattcgtattgacagataccgattatcccgaattggtatttataagaaaaagagggaaatttctatatatagattatagaaagatcatggctttgttctgtcttttttagataaaatatcgaatgacagagtggaataatattctatttataagtataatgactaaaatataaattatggttttaaagaataggtgaaaagaaatggtttgtttaattttgaccgtgtttagaagataaaatcagccacgttcgtgtggctttgatggcagaataatgatccgttgctttatggagaaaaaacgtgaaatcatcgataaattgattgggaaaatctatccggtaagtgaagaaggcagacaaaaactgtctgatgttttagtgtccttctatttggaaaaaggagattactttcttcgcgagggacaggtgtgcaaatacatttgttttgtggagcgggggatggtaagacagttttataataaaggaaaccgggatttgacagaacattttacttatgaaaacgggttgtttatttgcctggaaagtttttttaagcagattccgagctatttgcaggtggaggtgctggaatcgtccctgatttacgctttgcctcacgatgcttttatgcagcttgtacgggaaagaccggaaatacattacctctattccggtattcttgaaaattgcctgattatttcacagcaaaaagcggatgcttcccgttttgagacagcacatgaaaggtataatcgtttgctatcagaacatccggaggtggtgaagcgtgctcctctgatttatatagcctcttatttgggtatgacacccgaaacgttaagcagggtcagagcgggaacttgattatcaagccgctttctgcgcaggattggaagagggtaaaggttgtaccttcgtgaaggtctttccaatccatttgcggctattccaacggcgaacgaatattacagcccggatattctcgtcgagtaaaaaggcaaaccacataccggctaatccccagcctaattgaatgccgaaaacgtagctgaggtaagtggccactccccacataacgattatacctgtgataaaagggtaggtcacatctcctactgcgttgagtacatttaccgaaaggatattgacagccctgcccacttcgagaaggatatctatgcaaaggatgattatacctaaatggataatctcaggattgttagtcaggaaactgaaaataaatttaccgagcccggctgtaatgatcgccataatcaaagaaatcaatacggatattttcatacaatagcgttgcaggatgtaggcggcacgggttttttccgctccggctaaatgaccgatgcaaatagctcctccttgtccgatggctattgcgaatacgtaggtaaacatcacgatattcatggcataggtgcgggcggtaagggctgcggtgcctatcatgatcgtgaaataggttacaaccacttgtgaaagattataagacacttgttctcctgcagctggcaggccgacatacagcaggtttttcagtttatccatcgggaaaggccggaacagcgatagcggaatgtgtggagtgactttacgaaacagtaaacagattaagaggagcatggcaattaaccggcaagccgaggtagatatcgctgctccttccacgcctaaaggcggcataccgaattttccgaaaatcagagtgtagttaccgatgatattcaaaatattcatcaataaagtaacccgcatgggatagtaggccagattgtggcttcgtaaaatggccgataatgtaagtgctatcgcctgtagaaatgcaaaacctcctacgattcgcatgtaggacaacccttcaccgatcaactccggagcaagatccatcatttgaagcaattgcttgccgaagaagaatagaaaagcgctggtaatgattccaatgaccgtattaaataacagagatacgccgatggtctggagaacattggtctgctgctttgctccgagatattgcgagcaaaggacagatgtccccagggtggtaacgccgaagacaataaaaaccatgttcagtaattgattgacgacgccgactgctgctaccgtttcatcggaatgacgacttagcatgatgatgtcggttgttcctaaaagaatgacaagcagagtttcgataaagatcggtgcagccaggttaaataactgtttacgaagaccttgttggcgtttaatgaacatctttcaatttttctgcaaaagtaaattgaatcttgaatcgccggcttgatttatatcaaaaaataatgagtcgttttttcctgttgaggatgggggatttttctcgttttttgataaatttttccctcgaaaaacgctgattttgaatagaaaatttgtatatttgtaacatgaaaaggacaaccaaaaatacgatgcaaatcattcctgttcgccctgtcgaacgtaaaaatattctcgaatctactgtcgcttcctttcgtatcgaaggtatttttttaccggattcaaaaatccggtcgatttatgaccgggtaaacgaaaagctcagaaaagattaccgataattctttccatagggagatagtttttctcgcttacccgttgcacggctattatatattccctgaaattaattttatcgaatcgtaatccttcatatccttgctttctgaccattaaattggccagaatacgtgctgtacgcccgttaccttcccggaaaggatggatgaaaagtaattctccgtgtaccctggcaacatctttaatcagagcgtatttatcggcatattcgtcgggtagcttagtcaatacctcgttttcgaataattgcatgctttccgggataaaacgggcggtggggaatagaaagccgcctttcgacatattgacagtacggtatttacctgcaaatgtatataaatgacctaaggccagtttgtggatgtcctgaatgtatttacaattgaagtgggtgtgagtattcagacgttcggtgaacacaatctctgctgtcagaaatccttcaaattctgcttctgctatttcctctctgttcgtgagccccaataaattagggagcaattcattttcggcctcgtttgtggtgtatttgtccatattccatagcctttagaagggttttgtaaatataggaaaaataataatcattcctttgattccacttttcatttttcctattctgcttttcagaaggttatttattatctttgtacgtttactaacaatagaaataaaatgtttcagatcgagatagaccgggctgttccccgttttaaagagtttcagtttacggaacctgtttcctggaagataaacgagggggaaaattgggcggtgatagggcctaatggagccggaaaaaccttattgacagatattctgcaaggaaaaatcgttttaaaagaagggcgggtacatgttgctttcggggaagagacgggcacttaccgactgattaagtctatggcttttcgggatatatattcattggcagattgccggaatatgtattatcagcaacgctggaattcttcggatgccgaggaagctccgttggcaggctctttgttgcaagagttttcatctgaaaagattgccggttatactaagctatttcatatagacgaactgcttcaaaaaaggattatttctttgtccagcggtgaattacggaaatttttaattacccgtactttactggcagaaccgaaggtgctgatattggataatccttttatcggattggatactgcgtcccgtgattctctcgtccagatgttacagcaaatggctgttttaagtggcttacagacgattttagtgttgtcgaaccccttggatattccggaatggacagggaatgtgctgcctgtatgggagaggacatgcctacctgtgcgaaaccgggaagaatttttgaaagatgtccggctgataaaccggttattcccggaacaagaagggcaggctccggttttaccagctgatgatgaaaagcatgccgaatattcggaaaccgtgaagatggaagctgtcacggtcaaatatggaagccgtgtaatattgaaagatatcgattgggttgtaaaaaatggggaaaaatgggcattgttgggggaaaacggcagcggtaagtccaccttgttgagtttggtatgcggagataacccacagtcgtatgccaataagctaacccttttcgatcgtcgccggggaacaggggagagtatatgggatattaaaaaacggatcggttatctttctccggatatgcatacttactacttgcaggacattccttgtatcgatgtggtggcctccggtttttttgattctatcgggttgtttcgtaaatgctcggaagagcagcgggaaactgcccggcaatggttggaagtgtttcggataagttaccttgccggacgttcttttgtgaaaatatcttacggagagcagcgtttaattttattggcccgtgccttcttaaaaaatccggaattattgattctggatgaacctttgcatggattggatgtcggaaagaaaaaattagccagacaggtgatcgaagctttctgtgcccgccccaataagaccttaatctacgtaactcactacgttgaagaaattccgccctgtgttactctcttcaaaaccttatcgaagaattaaaaagaatggtttatccgacggaaaacctgctcatcggtttaattttagtaatttattgattcttaatgagctataaccttggtcgataaaactcaatggtttggcattcgatcgaaatagatcagataacagttaaaaggagtaaggtttacttatagaaatttcccaaaagttttgtatctgacttttgaaagaacagtccatagcctgccctaaataaatactctaatctaaaatatacttttacaaaaagaaagcgagcaaagtttgtgctttgcccgctttaaatgttttcacaacggaataatccttattgtgatttgcttcaaaatcgtaagtgcaaatatatataattttttcatttacaaaaaaaattgcaattaaaatttagtgttgtttatctaaaaacaagatattcatatattttatgtgataataattgcataataaaatatttacgtttatttttaaaagtgtgttttataaataaaatgaatatgaagaatatattaggtttagatcttggttccaatagtatcggatggagtgtggtttcaaaggatgaaaaggatcaattaaaaagaatagaaggaatcggaagccggatcattccgatgagccaagacatattaggaaattttgcagtgggtaattccgtctcccaaacggcggaaagaacggcttttcgtagtgtgaggcgtttgcgggaacggcatttgttaagaagggaacgattgttgcgggtattacatttgattggatttttaccggctcattacgatgcttcaatcgggtgggataaaaccgattaccggacttttgcaaaattcaaaaatgttgcggagcccaaaattgcctggaaaagtgaggagcaaggaaatcggacattcatttttggagatacattcaaggaaatgctgtccgattttatgcgggaacatcccgatttagtggccggagataaaaaagttccttatgactggacaatttattatctacggaaaaaagctctggagaagcctattgctaaggaggagctggcgtggattattctgaattttaaccaaaagcgtggatattatcaactcagaggggaagatgaagaacaggaaacgaataaatctgtcgattactatgaattgaaggtggtggacgtacaagccgaggaaccgcaaaaagggaaaaaagacatttggtataatgtcattttggaaaacggctggatttaccgccgatccagtaaagtttctttatcggaatggattggaaaaacgaaagaatttatagtaacgacagaattaaatgctgacggaacgccgaaaaaagataaagaagggaatgataagcggtcgtttagggctccaatggaaggtgattggatgttattgaagaaaagaacggagactaatatagaaaaaagccgtaaaacagttggttgctatatatacgatactttattacaaaatccggaccagaagatcaaaggaaagctgatacgtacgatagaacggaaattctacaaacgggagttattggagattttacaaaaacagtccgagttccatccggaatttcaggataaagatgtatatagagcctgtctcgaagaactttacccgcaaaatgagaatcgtcggttgaatttagcgaatggtaatctggtacaccttttattggaagatattctattttttcagcgtcctttaaaaagtaaaaaatctttaattagcaattgccggtttgagtatcggatttttatgaaagacggtcaaaaacagattgttcctttaaagtgtattgctaaatccaatccattgtttcaggaattccggctgtggcaatttattcaggatctgagaatataccaacgggaaaaagaagtaggcggtaaattacagacggatgtagatgttacttccgaatttttgccgaccgaagatgcttttgtggagttattcgagtggttaaatacccgtaaggagatcaatcaaaaagtattattgaaatatttagtcaaaaagaaaccggagctttatcgttggaattatgtggaagataaaaactatccttgcaatgaaacccgtgcattaattttagaacgtctggaaaaatgtagcttatctgttgattttttgacgaaagaaaatgaaatgtcgctttggcatatcctatattctgtcaatgatctcggtgaacttacgcaggcattgaaatcttatgcgttgaaacatgggctgaacgatgaatttgttcgaatattccgaaaatttccgccttttaaaaatgaatacggagcttattctgaaaaagcgataaaaaaattattacccctgatgcgtatggggaaatattggaataaagataagatcgatgggcaaacattgcaacgtatcgagaaactgcttacgggagagtacgatgaaaaaatcagagaccgggtacgtgaaaaagcgattcatttaacggaaatatcttcttttaaaggattgcctgcctggctggcgagctacatcgtttacgatcgccatgcagaaatcggcggaatcaggcattggaaaacaccacaggatattgagcattacttagttacggaattcaaacaatactctttacgaaatccgattgtagaacaagtcattacggaaactctacgaacagtgaaagatatatggcaacaatacggtgattttgccgaaattcatatagagttaggccgggatatgaaaaacactgctgaaagacgggcacaattagctaagcagaatgctaaaaacgaagatacgaatttacgcttgaaggccttgttgatggaactgcagaatgatccggaaatagaaaatgtgcgtccctattctcccggtcagttggaaatattgaaaatttacgaagaaggagtattggtagccgaaaatgaactgccggacgatattgaaaaaatatcgaaaatgaatcaacctacccagtcggaattaatccgttataaattatggctggaacaaaaataccgttctccttatacgggtgagattatacctctaagtaagctttttactccggcttacgaaatagaacatgttatcccacagtcccgctatttcgacaactctttgagtaataaagtgatttgtgaatcggaaatcaataagctcaaagataatgctttgggatatgagtttatcagggatcatgagggagagattgttcaatcgaatttcggaaaaagattaagagtttttacgcttggtgaatatgaacaattcgtcaaaaagaattattcccggaatggcaataaaatgaaaaaattattgatggaagatattcccgattcgtttattcagcgtcaattgaacgatacccgatatatcagcaaggaagtcaggacactattatctaatatcgtgcgggaagaagatgagcaggaaatatctaaaaatgtaatttcctgttcgggaggaattaccgaccgtttgaaaaaagattggggactgaacgatgtatggaataagataatcactcctcgttttgtcagattaaaccggatgacagagtcgtcaaaattcggagagtggaaaaacgggcatttccaaatacagatgccattggagttgcaaaaaggattcaataaaaaaagaatagaccaccggcatcatgcaatggacgctcttgtgatagcttgtgctacgcgaaaccatatcaattatttaaataatgagtccgctttaaaagatgcaaaaatttcccgttacgatttaaaacattcattatgtcaaaaatcaaaaccggatgctaacggaaattatagttggtcgttcaggaaaccgtgggaaacattcacacaagatactggtgaagcattgaaaagcattgtcgtcagtttcaaaaaaaatgtaaggataatcaataaaacgacgaattattatcaggcatacgaatacgggaaaaaggtgatgaaaaagcaagtgaaaggcgatagctgggctatccggaaatcattgcataaagcatcggtttttggaaaagtgtcgcttcgtcggcaaaaagaagtacggctcggtgtggcattggaaaattggaatatgcttgtagataaagaattgaaagagaaaataaagcaactgataacccaatatggtagggaagatgttaaactattcttgaaatattttaaagaccgcgaaaataaattcaatggcaaggatatctctaaggtgtctatatattactgggatacggaaaatgcagctatccgtaaacctttggattcttcgtttaccgaaaaagaaataaaaactataacggatactggaatacagcagattctactgaatcacttacaagcaaaaggcggacagtctgatattgccttttcgcccgaaggcctcgatgagatgaataaaaatctaatacagctaaacgaagggaaaggccataaaccgatttataaagtcaggattttcgaaccgatcggtaataaatttcaggtgggagaaacagggaataaatcaaaaaagtttgttgaagctgataagggaacaaatttgtattttgcagtttaccggacagaagatggtaaacgtacttattcgacagtacctttgaatgaagtggcagaaaggcaaaaacaaagattatcccctgttccggaaacggatgtgaaaaattcggcttctcttttattttggctgtcacccaatgatttggtttatgtgccgaccatagaggaacgagagaatcttcagggatttgattggaaaaatttgacagaagagcaaacaggtagaatatacaagatggtaagttgtacaggtgaccaggctttttttattcagatgtctgtggcaaatcctataataaataaatatgagttttcgtctttgaataagatgggaaaaacaatcgacggggagatggtaaaagaactttgttggaaattgaaagtggatcgtttagggcatatcattgaatgtatccggtaaagcgcattgaaaatgtttaatcagctatgaagtgttatgataaaaaagactctttattttggtaatccgacctatctctcccttcggagtgaacaattagttataaagcttccggaagtggagaagggggatttaccggattcttttaagcaggaggctacgcggacgattcctattgaagacatcggtgtgatcgtactcgatcataaacaaataactttaactcagggggtcattgaaaagttgttagaaaataattgtgccttgattacctgtggaaataaccgcatgccggtgggattaatgttaccgctttgtgggaatacgactcaaaatgagcgttttcggagtcagttaaatatttcattaccattacaaaaacagctttggcaacaaaccgttcaatataaaattcgtaatcaggcatcggttttaggaggcatgcggggaacgatcgtaaaaaatatgcaggcatgggtaaaagaagtaaaaagcggagatccggataatctggaggctcgggctgcagcctattattggcgtaatctttttccggaaataccggactttacccgtgaccggggaggatgcccgcctaataatttattgaattatggttatgccattttacgtgctgtagtcgctcgttctttagtaattagtgggttactccccactttggggattcatcaccataatcgatataatgcttattgtctggccgatgatattatggagccttaccgtccgtatgtggatgagttggttgtgaaaattgtcgatagtggtgtggattgttcagaattgacaaaggaaataaaaagtcaattgctcaccattcctgtaatagatgtagttataaatggggaacgtagtcccttgatgatagccgtgggacagacaacagcttcattgtataaatgttttagtggagaattacgaaaaatcatgtatccagaaaaatcttgatggaccgatttagtgaatatcgtatcatgtgggttttggtattctttgatttgccgacagaaacgaaaaaagagagaaaaatgtcctccgattttcgtaaaggtttgttaatggatggctttactatgtttcagttctccatttatgttcgtcattgtgccagtcgggaaaatgctgaagtccatattaaaagggtaaagaatcttttacctccccaggggcatgtcgggattttatgtattacagataagcaattcagcaatatagagatattttattcgcagaaaattatccagccctcaactccaggtcaacaattggaacttttttaaaataagaaaaccactataaaggtggttttcttatagaaaataataggtgatttttaaatcctaatttgcttgttatattttttgattataagatacatacagatagtcagttgtatctcatataccaaaggtacgactttgaaagcaaatcacaactattgacctttcaaaaagttctcttatatgttgtatctcatataccaaaggtacgactttgaaagcaaatcacaaccaaattcaactcctttgaacaacttttcaagttgtatctcatataccaaaggtacgactttgaaagcaaatcacaactccgaatttgtttttgttgagataaccatagttgtatctcatataccaaaggtacgactttgaaagtaaatcacaacgattgaaaagtcattatttataataataacttagactattctacagagctaattcgtttacaggatttcactagattatatttagaatgttatttaaaagttctttgatgggaacttttaaatgaattgaagatcagggagaaatatttaaatcttgatttaaatatgctgtttatccaaaataactatttatagttatctttgtcgtatggtttctaatgaattaacccgggagcagttatgggctaaacagcatttatcgatttcggatattgattatactatctgggaacgggataaaaatatgctttgccaaatgtcgaaactaagccggagttgtacatttgttgtcgatacttataaatgcagatatgcttttgcgtcttcgaattttgtggatttattggggtatgacggtcataaaattactacaatagaaagacagggagattatttagaatcgcgtattcatcccgacgatctatcgctattgaaagctttacaggttaagcttggcaggtttatttacagtttgcctgccgagcaaagaaattgttattgcaatatttatagttttcgggtacgagatgccaaacgacggtatgtgcgggttgtcagtaaacatcaggttttagagcaaagtcatagtggaaaggcttggctcattatgggaaatatggatattgcacctaatcaggaagaggtcggtggggtagattgtaccgtgcttaaccttaaaaacggggagttgttttctccgttaccgttatcggcctcacatcgtgatctaactcaaagggagatagagatattacgttatattcaaaaaggatttttaagtaaagaaatagcttataggctgaatatcagtattcatacggtcaatattcatcggcagaatttgctgcgcaaattaagtgtatcaaattcgattgaagctgtaaatataggattaagatccggattgttgagatagattgtaatctcaacaatcgtcgggtggtgtcccggtgtttgaaaacaaagtaaatgtagaatcatattttcagtatcgacaaatctctctttaaatttcatgtgaaattgatattgcaatattttttccggaataagtgatatcgatttttttgttttaaaccttgtgtcgtttatatgtggtcaagtgttaaatcgacctatcgttatttttcggatggagagaaatagtaaagaatatagttataaataactatttcttttctttatatgccagaataattttgcctattcttcagattttcaatttaattatagggaaaattatggtatttaatgaaacggaaaagcaggaaaatgaatatttacagtggcttatcggacttgtcaatgagatgctctgccatacagacacttcagtcaaagagcatgtagatactttacaggaatacaaagaatatttgtggtcgaataaggatattgatcctcatgaaattcgttctatgcgggaaagtattttgaatcattttgctttgggggagagcgtcatcgataaacgcaggcgattaagtaaaatcttagatattccctattttggccggatcgattttaaagagaaaaaagagggaagtaaaacaatatctacctatattggcatacatacattatatgacactcaaagtaaagccaatctgatttatgattggagagcgcctgtttccggcatgttttacgactatgaattgggagaagctttttattcttctcctgccggcgaaatcgaaggagaggttcttcttaagcgtcaatatcatatccgtaaaggaaaattggaatatatgatcgaaagttccttgacgattcatgatgatatattacagaaggaacttagttctcatgctgatgaaaaaatgaaaaacatcgttactaccattcagcgggaacagaatcggattatccgtaacgaggaggcgcatgtactgattatacaaggcgttgccggatcgggtaaaacctctattgctttgcaccgtatcgcttacctgttgtatgcgatgaagggagatatttcttcaagggatattttgattatttcacctaataaagtttttgccgattatatttctaatgtgcttcctgaacttggagaagagactgttccggaaatcagtatggaacaaatcctttcaggaatactcgatcataaatttaaatatcagaatttttttgaacaggtatcggaattgcttgaaaaaccggcacagggctttgttgaacgaatacagtataaatcttcgttcgattttatttcacaactcgatcggtttattctgtatgtcgagaataattattttaaagcaacggatatacagctgacaagacatattacgattccggccgaatgtatcgaggaacagtttaaacgattcaaccgttaccccatgcggcggcgctttgagccaatggccgattatattctcgaattaacgacgattcaatatcgttctataattaccacagcagagaaaaatttgctgaaaaaggaaataaagaaaatgtttatggggaattatgatattcaggtttataaagattttttcgagtggatagggaggcctcaattatttaagatgcggaaaaatcatacattggaatatacggatttggctcctttggcctatttgcacctggcattggatggaaatcttgcccaatcccgggttaagcatcttttgatcgatgagatgcaagactattctcccatacaatatagagtgattcaaaagctttatacttgccgaaagacaattctcggagatatttgccagtctgtcagtccttatagttcttctacagccgatatgattcggcgggcatttacggtgggtaaggtgatgaaactctgtaaaagttatcgttccacgtttgaaattacagattttgcgcaaaagattcaaattaatgaagaattggagcctattatgcggcatggacaatctcctaaagtgttacagtttaaaagtatagaggaagaaatttccggtattggggttcttatttccacttttaaaatctctatttaccgatcactcggaattgtatgtaaaaccgaaacacaggcgaaagctcttgctcaaaaacttcaaatgtactttgaggatatttatcttctctccagcctaagctctacttttgtaaagggtgttgtcgttacttccgctcatacggctaaaggattggaattcgatgaagttatcgttccgcaagtcgaggataagaattacaattcggccatagataaaagtatgttatatgtggccgtaacccgggcgatgcataaactgacattgacttatagtgggtcacgaagcgagtttgttccggaatctcttggaaaatagaatgtctgtttaagaatatcgttaataattattatatttagatgtgaattaagatgtcgatttatgtcaaactacagaacttcttccttatttcattatacaacgtataatggattgaaatctatattaaaacaagggattattcccaattattgtaaagaagatttttccatagacggagatcgttttgcgatagggattcctatggtaagtttttgcgatatacctttaacaagaacgaaggagtttactaaacgttatggacatcatgccataggacttagtaaggaatgggcattgaagaaccgaatcaatccgattttgtatattaatgatgagaatatcatcacttcgttaaagttttataaggaatacgagctttactcaaaagccgaaatggaaacaggcaagattagttctattgacttaaaaatcgatcctgtaaaggttcggtatccctccgataactataaatcttcgcataatgctaatttgaatttgttcgggttttccaaaaaatatatgggaatcaatccacatacaggaaagtctcaatgcaattatgaagagaatgaatggagatttatactgaaagaagaggagggtattttatggaaatggggtgaaacagcgtattcctcatggagagggaaaccgaaagagaagaaacccgggcctgatgagtttttgaaaaccaatactctaaaattcagtattgacgatatttcatatatcatcgttcaatttgaaaatcaacgtatcggagttatcaattatataagcagactgacaagactatgtgaatctgatcccagtttagacgaaaatagtaagaaaatccttttttctaagattatatccatggaacgtattgataaagatttctaaaacgatttttgagtaatcgtttgcttgtgaattgtatttcatttaggatatttcaagtggtataatctcacttttagtgagtccggagggggggataaataaaaaacttccgatttattagaaatcggaagtttcaatttatacttttttcaagtggtgccaccgggaatcgaaccagggacacaaggattttcagtcctttgctctaccgactgagctatggcaccgttgcctgattgcgagtgcaaatgtaagggttttctttaatagtgcaaggctttcggtgctttttttgttcattttatttagaatttattttcgcaggttgggggaaattcttttctgtttttgcttttgtctgaaacagaggtatatcatcatgacaatgaacggaaacgaggctaaaggaacggcgggttgagccagaaaccataccgggattgcgatagcaagcagtatgaggtagaggtttaaatagcctcgtatgatgcgtgggaattgacgggagaagataaaccacatagcgatcaggtttagcgggtttgcccataaaatgttccagttgggagcggttatggggtgttccgtgaaaaagccgagaaagacaattaaagctcccacgattccggtaaaaaggaagaagaggagtgtgatcgtatttaagagtttcagatttttctgtttttgtagcaagagaatgagtaacagaattcctgagctaaacacaaaccaggggctgaaataccagggattactgattttgggtggtggtgcctgatagagaatttctgttttttccacgagcggattcccgttgtaggtagcggaatctaaaccgtacatcagatagtcggggaggaacatgtattcaaaggtcgttgctttccggttaccgggttgacccaatatggtgtgtattccccattttacccagggagatatgcggagatattcgtcgagcaggttccagaaacttttatctgtgtttgctaagtgccaggttatggacgagggtaagctcttctgaacaatgtcccggctccgggtggtgcagttgtcgaacaggaaattatacagataggaacggttttccgggcggtagttttcaagcaataaatcgaacagggtttgtttttccagcgagtccaattttaaggtttgagaatagaccgtgcggttttccctttggtatccggagagaaaaaacggatacgaagagacggctaattgatacgggagcagtccctgtgcatattttagataaaatcccggagtttcaaaatcaaaagtcccgaagttaaatacctgatcgaaacgcaaggaaggatcggaaacgcgaatggccgtatggccgaacagggaatacaattccgaacccggcgaacaggttaaaatactgatttcggcttcttttgagaggggaaaagcgaagctttcgaataccgatagcagggtaatgatgaatatagataattttttcatttttggctgagttcaggtattttgtttttattgtattctatgtcacaaaggaacagtgcattgccgggaaccgatgttccggcactacaacggtttttcgattcgatgatccggcgtaatccttcaacgtccagtttgccttgtccgatttcgagcatcgttccgacgattgccctcaccatatttcgtaaaaaacggtcggcttttattgtgaaaataagccggtttccttcttctatccattccgcctgcatgatacggcaattgttggttttggtatcggtgtgcagtttggaaaaactggtgaaatcggtgtattcgaaaagtatccggcaggcctcgttcatccggtagatatctgggagcggatagggacaaaaagtaaaaggataagtaaatggatcttttcttttgtctataaagtatttatatgttctcgacaaggcactgaaacgggcatgaatatccggcgggacgggatatatccgggatattgcaatattgcgtcctaagaaccggtttaacttgtaaaccaggtgggcggtgtcctgaatttctacgggagtatcgaaatgtgccacgtaaaaagaggcatttactccggtatccgttctgccggctccgaccacgccgatattttcccgcaatagagttgtcaatgcctggtttagttctccttgtaccgatggggcgtgaggttgtatttgccagccattgtatccgttaccgttgtaggctaattctataaaatatcttgtcatatcttttgcgaagataagaaatatattttttagcttattattttgactttacttttcccatttccggttttatgaacatagatttgaaccgggatacgttcagccgtttcgtggacatgggaaataactccgactttcctgccttgtgaacggaggtgttcaaggacttccatgacaatctgcaaggtgtcggtatcgagcgtgccgaaaccttcgtcgataaacaggttttcttcgtgatgattatgtgaggagaatgacgagagtccgagggcgagtgcaagggataagtattgcacaaacttcttatccgtttggcaaagcacaaccctaaattttactatattgcgacaaattataaatgtagtctcctgtacctcttatttcaaggtgacaatgattattacgacaaagaacattttttcgggaggtattagcctcaatttgaaaaccatagatgttgatgtttgttatgatgcttaagcaggcaggaatatcattcatagaagatataatagatcacgaatggggagacagagcttttagaatcaaagacccgataggaaatttactttatatttattcagagcgggagattgccgatatatataaagatgctataaaggaataatctatttattactcatattttgaaattagaatacaatataagaagtctatacactccagttcagccagcagtaacgggtactgatggcgaggtctcatacattgaattactaccggacgcacaactacaagactttatttattgttactggaatctaaagactagtaaaccattagatgatatatacaattatcgtgtagtttccgatggctgtatcgatatcgtttttaactgtactgatcatgatgaagcatatataatggggtattgcaattcttttgcgaagattggtattgataaagaatttaattatttcggaatacggtttcttccgggtatattccctttgctatttaatatagatgcatcagaattaagcaatcattacgaacgtttggataccgtgcaaccttatctatacaatgtaattcaacaatcgaaaaataaatgctcgtgtcttcaagacttgtgcaatgaactcaatcactatttcattgatcatattaataaaatagataaactttttgataatagatttttctgtgcattagaaattattttaaaaagtaaagggtcgattcatattgagaaagatttgaaagatggaataagcagtcgtcatttgcaacgactttttaatttttatataggagatacagccaaatctttctgccgaattgttcgttttcagaatcttttaaagatcgatccttcaattaaattaataaaatccgaaaaattattttatgactttggttactacgaccaaactcatttcataaaagagtttaagttattttacggtaaaactccctcaaagatcgctatagaataaactgtccgatttttcctatttcagaaaaactctatgttttaacttcgcggcatggaattacatgatataaaacaattgcctatattttatttaatagccagtaaaagtaaagctaaagataaacagcaatttaagaaatcgctaaaaataagagcaactgttgaaaaatgatttaataataagataatgaggtctatagaaagatatatcgttgtgtgcaaatggattgaaagctatgaaaatcctattatattaaagaaagatgaaaaagttgtcatcaatttagctataaaagaaactgatccggaatggataaattgggtttggtgtatagcagac

SEQ ID NO: 1079 - DNA, 24602 bp, synthetic construct
  source 1..24602: mol_type = other DNA
  misc_feature 1..24602: note = Synthetic
atcaaaatacctctatttattagggtatattatactgccatttgtatttatcactaaaatttcatttggaatatatgactataatcctaaaattataattggattattcatcttaatctggaccaatgatacctttgcttatattgtaggtaaatctatgggccgaaccaaattatttgaaaaaatatcccctaaaaaaacaattgaagggttcttaggcggaatcatttttgcgatttttgcaggttatttaatatcaaaatactacataaaggccaatcctgaatttagtgaccgatcaatcctaatttggacttctattgctgttattgttggaattgcaggtactataggagacttaattgaatccaaattcaagcgtatcgcaggcgtaaaagacagcggaaacataatgcctggtcatggaggcatactagatcgattagatagtgttatatttgtagcaccaattatttttttattttatcaaattttaaactatgtttcataaagaaggaacccaatctattttattagctacaattttcacggctattgtacttttactgacagataattttattgacacgaactggattaaaatgactattcaattagcaactttgttgtttttgataatcattttgcaatttttcagaaatccaaaacgcattgctattctaaacgaaaatcatatcattgctcctgttgatggaaaagttgtagttattgaagaagtttttgaaagcgagtatttcaaagacaaacgtttgcagatttccatatttatgtcgcccattaatgtgcatgtcactcgttatccgcttagtggattagtgaaattcagtaaataccatcctggaaaattcctggtagcttggcatccaaaagcgagcgaagaaaacgaaagaacaaccatagtggtcgaaaataaaacattcggcgctgttttataccgtcaaattgcaggtgcattggcaaaaagaatcgtaaattacgcccaagaaggaatgcaggtaattcagggaactgatgccggttttataaaatttggctcaagagtagatctctttttaccattgggaacacaagtaaatgttgtattgaatcaaaaagcaatcggaggaaaaactattattgctacaaaataagcatgattgaaaaagatttagatactcggtttttagaagcggtagaaatagcctctgaaatgacacaggcatctttacctcaagatgtacaattgcgtctttatgctttctataaacaagctacttttggaactttagatttaaaacaaacttcttcataccatttgagagatgcttttaaaaccaatgcctggatgcaaattagtcatcttactccagaacaagccaaagaacaatacatagaaatgattcatttactgatcaaaaaataatacaaattatgaaaaaactgaattttttaatttctgttttatttttatttatgactttactttcttgtaacaataagaaattaactgaggttgtcgaagttcctttacccacaacggaacaaagtgtttccatcatgggatctccggatgatgtaaaggcaaatgaaggctcatttcagctagaaaaattaccttacgcttataatgcgttggcgcccaatatatcagccactactttagaaatgcattattccaagcattatcttacctatactaacaatttgaatagcgctgtattaggaacgcctttagaaaatctgacaattgaagaagtgttgtcaaaattagaccctaatgacgctgctcttcgcaacaatgccggtggattttacaatcattctttgtattggaaatgtatggctccaaaagcaggaggtgaaccaacaaatacattagcggaagcaattactaaagattttggttcatttgaaaacttcaccactttattcaaaggagaagctacaaaacaatttggttccggttgggcatggcttgtggttgacagaactggaaaacttcaggtaaccagcacttcaaatcaggacaatcctttgatgagtaatgcacttattcctggaactccaatattagctttagacgtatgggaacacgcttattatttggattaccaataccgaagaaaaaattatatcgatgcctttttcaatgtaatcaattggaaaaaagtagaagaaaattacgatgcagctataaaaaaataatgctctagttttaaactataaaaaaatgctgatataaatttatatcagcattttttattaccattttgtcagtaccaaaaagactcttttttacaattgataaataaacgattcggatggagcaattgtaatttgtgcttttccttctccattcaatacctgcaactgaacggaatttttatgatacaattgatccgtaagtgtataatttccgtctttcaaattccatttctggataacatctgtagggatttttaattcgaaattgctagtggtagcaccagaaaaattagtaatgacaatcagtttttgagtatcggaccaacgggtgaaagcataaattccaggatcataatcctgagtcgttttacgatttatcgtttggatttcttgatatttccccattaatgccgaactattcaaagagaaattcaatattcttttgtaaaaatcacgtaagtctttttcatcctgcgttaattgacctccgtcaaattttcctccgttcatccaacgttgatgattggaaaccccaatataatcaaaaattgacgttctggaatgcgttccaaatcctgcattttcatttccggcctctcctacttcctgtccaaaataaaccatcgtaggcgaagtgcttatggtagtggaaacgaccatcaaaggttttcctttctgtggcgttcccgcaaattccggactagccaaacgttgctcatcatgattgtctaaaaaatgaagcatgtgatgctcaatatctgccattccgctttgtatgtctgataatccgtccggcaatgattttccttgaattatctcttttaatttatcataggtttctactttgtcatataaataatccattttacccaagtgaatgtaatttcgatattctttaggattatacacttcggccaatagaaaagcatctggattttttgttttaattgctgaattcatgtagctccaaaattcatacggcaccatttcggccatgtcaaatcgaaaaccatcaactcctttagccgcccaatacaacgcaatatctttaaatttatcccaagaatccggtacgtcttttcctttccaaaaagcataatgttcctgatgggatttggtgtcaaaaccagcaggaagttcagggaaatctttggagccatccaggcgaataccataatttactttgatggtttcataccaatcattacgatctggttttgccaatcgagaaccgttacccgtccattttgctggactttctgcaaatttaccatctattaatggattattctctccatttaatggtttatctgaatctggcacttcaaaatgcgtatttggaatataatagaagttattatctcttttatactcaacagaaacatcatcatcagctccaaaatctctaacgccaaccggattattctttccttcgtatttacgcgcaatatgattaggaacaatatcgattatgacctttaatcctactttgtgtgttcgcgcgattaaagcttcaaattcttgcaaacgattagcaggatttacggccaaatctggatttacattgtaataatcttttacggcataaggagaaccggctcgtccttttaccacttcggggtcatcattggaaataccaatagccgaataatctcgtatcaaagcatgatgcggaactccggtgtaccaaacataagtaactcccaaatcctttatttcttgtaatgcggtatccgtaaaatcgttgaacttccctactccattttcttcaatagttccccaaggtttattagtggtatttttatttccgaataatcgggtaaaaacctgatacactacttcttttttatttgagactgactctttctgttctgcgttcattttaaactctttcgttttacaagccgttgctaaaagcaccacgctaatgcctgcaacaatagttatttttttcatcgtataaaattatttatgttgatttcaatcttttttatgtcaaaatgaatatcaatttttaaatttaatattttttaaatagaagaagtctatatcatttgaaattaaataattctgtttttaaaaacggacactacaacgaaggagttataccatttgttgataactttaaaagtaatagttactgttttttggttcccttttaactaattataaataaatcctaatatggattaggattgtttcctttttcataaatttgacaaaaattaaatccattgaagaaatcgctatttttccttcgttattgtttgatactgcttgttactaatttagttttggcgcaagccccaaaaaaaattattgtagaacattccgatttttttgacgtcaatcaaatcgaaactccagatgctgctttgcttactggaaacgtacgtgtcaatcatgatggtgtggtattgacgtgcaataaagcctattattttcaaaaggaaaactatatcaaggcttttggaaatgtacaaatggtgcaaggggacactttatttttgaacagtaaatacgctgaatacaatggaaatgtaaaaaaagcacttgcttccggagatgccgtaatgagttctccagatgcgactttggtgacagatattattaattttgatagaaacatccaagaagtattttacgatacaccagggacaattaccaataaagacaatacgcttaaaagtaattcaggaagatattatgtgaaacaaaagaaattccaattcctgactgcggttaccattacaaatccaacgtatgtaattaaatcaaatcacttggattatttcagtaattccggtcattcctatctttttggaccttcaacaattaccagtaaagccaattatatttatactgaaaaaggattttatgataccaaaaaaaatctggcgcatttcctgaataaatcctatatcagatacgatgatcgaatcataaagggcgacagtttatattatgacagaaacaaggaatttgcatcggcaacccgaaatgtaaaaataaccgactcgatcaatcgagggattgtaaaaggacattatgccgaaatttataaaaataaggattccatgtttgtaaccaaaagagccgtggcggtaaactttgtcgaaaatgactcggtttacattcatggaaaaaaattaatggttaccggaaaagaaggaaaccgaattatcagagcgttcaacaatgtccgattttttaaaacagatatgagcggcaaatgcgattcgattcattcgagttccaaaacagctttgacgaaaatgattggaaatccgatactttggaacgcagaaaaccaaatcacaggcgatgtaatgcatcttataggcaacaacaacactcaaaaactagattcactcaaagtcctcaataatacgttcatagtctcaaaagacacgataggaaccggctataatcaagtcaagggacaaaatctctacggtaaatttgaggaaggaaaactacatgatgtcgatattgtaaaaaatgccgaagtcatctattacatgcggaacgaagcccaagaactcattggtatcaataaaaataagagtagtaaaatcaatcttattttagaaaaaaatgagatcgaaaccatcactttttttcagcaagtggatggcgatattttccccgaaaaagagctgccggaaaatgcccgaaaactgcgaggattagtctggcgtggtgatgaacgaataaaatccaaggacgatatttttcctcccgaagaaaatgaagacaacgataaaatagccaaagcaaccaagtcagctgaagctaaagaagatgttcccatgaaaattcgaaaagaaacgctgaattacgataagaagaaagggaaaaaatagtgttcagtcgcagtattcagtttttctaaaaacgaataaacgattaaactaataaacgattaaactaataaattttgaataccgatttcctaaaataccaagcacaaacctcaccgtatccattgggtatggaagtttcacatgctgtaggttcttatatttacgacaccaatactaaaaaatacttggattttgtggctggagtttccgcctgtacgcttggacatcaacacccaagagtcaatcaagccatcaaagatcagttagacaaatattcacacgtcatggtgtatggcgaatattcacaaagtccggcagttcaatactgcaaattactagcctcactcctgcccgctcctttagacaaaacctatttggtcaattcaggaacagaagctattgaaggcgccttaaaactcgccagaagaactaccggaagaagccaattgatttcgtgtcataacgcgtaccacggtaataccatgggttctatgagcgtaatgggatttgaagaacgcaaacaaatctttcgcccgttgattcctgatgttgattttatcaccttcaacaacgaagacgatttacaaaaaataaccaccaaaaccgcaggaattattctggaaaccattcaaggtggcgccggatttattcagccaaacaatgatttcctcaaaaaagtgcgtcaacgctgtactgaagtgggtgcaatgatgattctcgatgaaatccaaccgggctttgggagaaccggaaaacttttcggattccaaaattacgatgtcgttcctgatatcgtggttatgggaaaaggaatgggtggcggcatgcccgtaggcgcttttacagcttcatcgacaataatggatttattgagtcatgatccaaaactgggtcatatcacgactttcggaggccaccctgtcattgcgtcagcctgtttggcgactttgcaggaaattactgaaaccaatctcatggccgaagccatggagaaagaaaagctattcagatcacttttggtacatcctttgatacaagaaataagaggaaaaggtttgatgctggctgcaatgaccaaaagtgctgatataacaaacgaagtgattctcaaatgtcaagacaaaggactcattttattctggttgctttttgaaggatgcgccattagaataacacctcctcttaccatttctgaagaagaaatacgggaaggttgcagcatcatgcttgaagtaatggatgaaattttgaacaagaattaatagttaaaaatatagtaattgggagctatttcctgctatacgttacaatccacgcgaaaagcgtgggatttccacttctatcagggctatggcatctgtttaaaccaaagcttttttgttaattaaattgttcacaacaattctaactttccctcacagtacaagcacgattacctaaatttatttaggccaaattaaaaacacacagtatgcaattaagcaacgaagaagaagactataacttatccctgtctaaatttgagtccatgttgaaaaccaacaaagtgctcttttttgactccgaagaatttgaagaaattattcttcattatctcgatatgggtaaggccgctttggcaaaaaaagccctgaaactagcattggaacaacatccaaaatctaccggactaaaactagttcaagtggaaatgttagtatatgatgacaaactcgaattagccgaaaagctattgaatgagttgtatgccattgaaccaaccaatgaagaaatctacattcaaaaagccaatatctgctccaaaagagaccaacacgaaaaggcagttgaattactaagaatagctttaaaatacaccgatgattatgctgatgtctataatttaataggcatggaatatctttttatggacaatcttgaaatggcaaaagaaagcttcatcaaatgtttagaggaagatcttgaagaccagtcggccttgtacaacgtggtgtattgttttgaattcttggatcaaaatcaagaagccatagcctatttgaataaatacattgacaaaaacccctacagtgaaattgcatggcatcaattgggtcgtttgcattatggcgtaaaagagtatgaaaatgccattcgtgcatttgattatgcaacactaatcgatgatgaattccttggtgcctttatggaaaaagccaaagcttttgaacgattgaaaaaatacgaggaagccattgaaagctacgaaagaaccatcgaattagatgatgctacttcctatgctttacttcgaatgggaaaatgctatgaaagattaggcaacaaagctttagcattaaaatatttcaatcaaaccgtgcatgaagatccacttttagataaaggctggattgccatcacagacttttacgtacgccaaaaaaattaccaaaaagcgttattttatgtcaacaaagcattagcaattgacaaccaaaatcgtttgtattggaaacgttttgcgacaatcaataaacaaatgaacttctttgaagaagctgaatttggttaccgaaaagcagtggagtttggtgattatggtttagacacttggttattctgggtggatattcttcagtttttaggggaattcgaaagtgctattcaaacgttattacaagcttctgaatattttccggaagagaatgaagtcgaataccgtttggccggattgtattttatgctaacggataacacaaaagcaaaattccatttgagcaacgccttacgattgaattttgacaattacattctgttagaagatttattcccggtagtttgggcaaaaaaaatggtgcagaattatattgcaaaacataaaaaacaataatggttgacatagttagaaaacgctttggattattaggacgcaacattaattattctttttctaaaggatattttaccgataaatttaatagcgaaaactttgccggttgtacctatgaaaattttgacattcctgaaataactgcgtttccagaggtaattaaaaacacttcggatttaaaaggaatgaatgttaccattccgtacaaagaaacggtaattccatttttggataaactatcgaaaaaagcggcattaattggtgctgtaaacaccatcaaaatcaccaaaaaaggaaagctgaaaggctacaatacggactattatggtttcaaaaaatcattagaaccgttattgcaaccgcaccataaaaaagccttgattttaggcacaggcggcgcttctaaaggagtggcgtatgcattggaggagctggatattccatacacttttgtttcgagagaagccaaagaaaatgcaatcgactataatcgaatcaacgcaacaacctttgataattaccaaatcataattaactcgactccagtaggaacaagtcctaatgtggatgcattcccattaatcccgtatgagttttttaccgagaatcacattgcgtttgacttgatttacaatcccgccgaaacacaattccttaaaaaagccaaacaacaaggagcacaaatcaaaaatggtttggatatgcttatttttcaagcggaaaaagcttggaagatttggaataaataacagaaaaatactttaagaatatagttgtcgtcttgttttaaaattagctttactcgttttgagttatgctgttttaaaacaagacgattttttttatataaaaaaagcgacaaccgagaggatgccgctttgaatgttttcacaacggaataatccttattgtgaattgcttcaaaattgtactgcaagtatacaacaaaagttttactattcgattgaggtttcccgtaaagcagttaattttcttttgattaaatttcgagattaatttacaatcaggaataaatcatcaaaaaatacagctataaaaaatgaaaaaaatattaggattggatttgggaacgaatagtgttgggtgggcactaaccaataatgactttgataataaattagggaacattgaaggattaggaagtcggataatccctatgagtcaagatgttcttggcaaatttgacagtggagtttctatttctcaaactgctgaaagaacaaaatatcgtgggacaagaagattagttcagcgctttctattaagaagagagcgacttcacagaattctaaatatccttgattttctacctaaacattattccgaagcaatcgattttgataaaaagtttggacaatttaagcccgaaagagaagaaatattatctttttataaaaatgaaagcggtaaaaaccaatttttatttttggaaagtcaccaagaaatgctttctgaattcaaattaaccaatcctgatttaaaacaagttccttatgattggacaatttattatttgagaaaaaaagcattaacccaaaaaatatccaaagaagaacttgccttgatattactgaactttaatcaaaaaagaggttattatcaattgcgtggtgaagaacaagaagagaacaaaaacaaattggaagagtttcataccctcacagttgttaatgtaattgaaagagaaaaaggaaaatcaggtatatggtataatgtaattcttgaaaacggctggatttataaacgtgaaagtaaaatcgcattatttgactgggttggtaaacaaaagaattttatcgttactaccgagttaaatgatgacggaactgtaaaactcaataaagacaatgaagaaaaaagaagttttagatctccaaaggaagatgattggggattaagaaaaatcagaacagaacaaactattaaccaaagtggtaaatctgtaggttcttttatttatgataatttacttaaaaacccaaaccaaaaaataaaaggtgaattagtccgaacaatcgaaagaaagttctataaagatgaaatatcaaaaattcttaaaactcagatagaatttcatgcagccattttaacagatagaaatctttataaaaaatgtattgatgaattgtacagacacaatgattctcataaaaacaacatcaaagacagaggttttgaatacttgtttttggatgatattatcttttatcaacgtccgttaaaaagcaagatttctttgattagtgattgtagtttagaatacagacccattaaagataaaaaaggtgttttagtaaaagatggtaatggaaagcaaattttaaaacctttaaaatgtattgcaaaatcaaatcctatttttcaagaattccggttattgcaatttgcaaaaaatcttaaaatttacaaaaaagaaatagtcgatgacattgatgtaacgattgattatttaaaaacggaagaggatttagtcgaattatttaattggctaaatgataaagcagaaatcagtcaaaaacaatttttagcttacccaaaattcaaattaaaagaggataaattcagatggaattttgtagaagacaaaatctatccttgcaacgaaacaagaaatcagtttttgaatgcaattgcaaaaattgatgtagataaatctttttttgatgccaaaaacacccaagatttatggcatattttatattcggttactgataaaattgaaattacaaaagcaattacaacttttgccaaacgacatagtttacctgatgaatttatagccaatttttcaaaaatcaaaccatataaaaaagactatggttcttattctgaaaaagcgataaagaaattattaacgttaatgagaagagatggaacttggaatcaaaatgcaatttctgatagagttactgccaaaataagtgccattaaagaaagattggaatacataaattatgatgtgtcaattcttgaaaaagtatctgacagcgatattccaaaacaagttttaaaaagttttataaattgtactgaattcaataaaggtttaaatacctatcaagcatcgtatttaatatatgacagacacagtgaagctagtgatgtttccaaatggaaaactcccgcagatattgaacactttttaaagtacgatttcaaacaacattccctccgaaatccaattgtagagcaagttattacagaaactttacgagttgtaaaagatatttggcagcattatggagatgggaaagaaaacttcttcaatgaaattcatattgaattaggcagagagatgaagaatgacaaagccactcgtgaaagaatgaccaaacaaatctctcaaaacgaaaacacaaacttgcgaatcaaagccattttaacggaattaaaaaatgatggaattaatgatgtacgtccctattcgccaagtcagcaagagattttaaaaatatacgaagaaggtatttatagtagtgaaaacagaaaagaaaagttagaagaggttgataaaattcggaaaaatgcgaaaccaactacttcggaaatcaacaaatataaactttggttagagcaaggttatgtttctccttacacagggaagaacatcatgatgagcgaacttttttcaactaaataccagattgaacacatcattccgcaatcaagattatttgatgattcactatcaaataaagtcatttgtgaatccgaagtcaatgaacttaaaagtaatatgaccgctttagaattcatcttaaaaaacgaaggcagaattgtgaccttaactggtggaaaaacagtaaaaatatttactaaagacgaatataaccaacacataaacagctattacagcaataataaaaacaagcaaaaacgattattgagtgaagaaattcctgaaaaatttattgaaagacaattaaatgacactaaatacatcagtaaaattgtaaaaaatattttgagtaaaatagttcgtgaagatgatgagcaagaagtaacctctaaacatgtcgtttcactgaacggttcaatcacttcaaaaatgaagcaagattggggattaaatgatgtttggaatcaaatcatcacacctcgttttgaaagactaaatacattaacagacagtaataagtttggtaattgggaaaacaaatttggaaaaaacgtttttcaaaccaccgtacctgatgaaatagccaaaggattttctaaaaaaagaattgaccatcgtcatcacgctctagatgcattggttatagcttgtgtaacaaaagatcacgtaaattatttgaactcaataaattcagagagaaaaaattattccttggtttcaaaattaagggttcaacaggagttagttacaacaaaagacaatcacgacggaacactttgcgaggaaaagaaactaattgctaaagaattccataaaccttggaataatttcacaaaagatgcaaaagacattctaaaccaaaccatcatcagtttcaaacaaaacactagagttatcaataaaacggtaaacaaatatcaagtttggaaagaagaagatggtatgatgaaaaaaattacgactaaacaaacaaaaggagataattgggcgattagaaaaccactgcacgcagaaactgtgagtggaaaagtcatattaaaaagaatcaaacaaagtcatattactattgcaaatgcgattgaacaaatagaattcatcgtagatgcagcagttaaaaaacaactaaaagaaaaaatcaaactatatcctaacaataatgatggcttaaaaaaacacctcaaagcttttcctgtaatgatagatggaaaagctattgacaaagttcagatttatgaaatgatagaagccacagctactagagaacgaaataatttagatattacgtttgatgaaaaaaagatagaaaagataacagatacaggaattcaaaaaattcttttaaaccatctgaaacaggaagtgtatcaaaatgcaatagacgaaagtggaaaaaagatagctcctcatgaagtagctttttcagaaataggtatagatgaattaaacaaaaacattatagcactcaataatggcaaaagtcaccagcctataaaaaaagttcgtgttttcgaagaaagtaaacggtttccacttggacagacaggtagaaaaaaagataaatatgttgaaactgccaaaggaacaaacttattttttgcaatttatcaagatgaaaaaggtaaacgaaactataaaaccattcctttcaatgaagtaattgaaagacagaaacaaggattaagttccgctttagaaatagatgaaaacggaaatcgtcttttatttactctttctccaaatgatttagtttatttacccaccgaagaagagaaagaaaatttaacgtcacttaattttgatcaattatcaaaagagcaagtgcaaagggtatttaaaacggtaagctttactggaaatcaagctttttttgtttcaaacaatatagctacatcaattgtagacaaaatggaattttcagctttaaataaaatggaaaaatctattgaaggaatgatgataaaatctttgtgttggaaactcgaagttgacagattagggaaaatcaaaaaaatcatcaaatgataaaacgaacccttttctttggtaatcctgcttacttgagtacgaaaaatgagcaaattgtaatctcatatcccgactcaaaattcaataggattgggctttagcccattcgacaaaattagaaataaataaaaaaggctttagccaaaaacatttcagctaaagcctattcaaatcaaaatatattaatcccctccagctaaagctggaggcaattcaaaagctggaggcaattgataaaaacagaaaaattcaaaaattataagcaatttaaaaaataaattatgccttatatcaaaacctatattcattttgtttggagtacaaaaaacagaatcccttttttggacagcaaagaattaagacaaaaagtttggcatcatattaaagaaaatgcccaagagaaagggatttttgttgattatgttaatggatattcagatcattgtcattgtttggtttctataggagcagatcaaaccattcaaaaaattatgcaactcataaaaggggaatcttcgttttggattaacaaaaataaattgtgcttagataaatttgaatggcaagatgaatattttgcagtttcggtttcggaatctatgcttgataaagttcgaaattacattagaaaccaagaagaacatcatagtaaacaaacatttgaagaagaatacaacgaatttattactaaatacaaatttcaaaaagaatagaatttggctaaagccatttacattattatcatatcccccctccagctaaagctggaggcaattcaaaagttataggattcaataggattgggctttagcccattcaacaaaaaaacgaatttaaaaggttttagcctaatgttttagtgaagtatttttatttataaacagctaattataaatttgcaaatccaaaaaagaatgataaaacgaacccttttctttggcaatcccgcttatttaagcaccaaaaacgaacaaatagttatctcttatccagacaaggaacaagagactaaaactgtggctattgaagatattggagttatcgttttggaaaaccaacaaatcaccattaccaatggtttgctggaaaaactgacccataacaacgtggcgttaatcaattgcgaccaacagcatttgcctattggcttgttgatgcccttgaacgggcatacagaacaatcggaacggtttagaaatcaaattaatgcttctgccccactcaaaaagaatttgtggcagcaaaccatcagttccaaaattatgaaccaagcaggattactcaaagagaaaggaatcccgatgcgaaaaatggaactttgggcaaaagaggtcacctcgggcgatgcactcaatcacgaggcgagagcagcggtttattattggcaaaacctcatcacggtagaagatttcacccgaggacaaaaaggaattcctcccaataatttattgaattatggctatgctattttgcgagccattaccgcaagggctattgtcagttccggaatgctgcctactttgggtatcttccatcgcaacaaatacaatgcctattgccttgccgatgatattatggaaccctatcgcccgtatgtggatttgattgtatcccatattatggaaaccgaagattcgtatgaagaattgactattgacatcaaaaaacaattattgagtattaccaccatagatgtttttattgacggaaaaaatagtccgttgatggtggcgatgagccgaacaacacattctttacacgaatgctttgagggaaaatccagaaaaattttataccccgtttatgtatgacgaacattacacccgtttaaaccaatatagaagtttgtggatattagtattttttgacctgcccaccgaaacccgaaaggaacgtaaaatagcttcttctttcagaaagaaattattagacgatggattttctatgtttcaattctccatctatatgcgattttgtgccagcagggaaaatgctgaagtacacaccaaaagaataaagaacaacttacccgaacacggcaaaattggcgtcatgcaaataaccgataaacaatttgggatgatggaacttttttatggaaaaaaactcgtagaaacagacaaaccttcacaacaactggaattattttagtctcataggatgagaaaaaagtataactccctgtacaacaacacgcaaacatcacttcttttcgatttcaaaataaactcataactaccaacatatcaatcgattaaatcgaggtatgttgggaattataagctaaaatacaattttgaaagcaattcacaacaatggatctttgcgcaattcaggatgtagtgttgggaattataagctaaaatacaattttgaaagcaattcacaacatccccgcatcaattaatatttgagcgcaagttgggaattataagctaaaatacaattttgaaagcaattcacaacatgtcgacaatcatacgcttataatgatccgttgggaattataagctaaaatacaattttgaaagcaattcacaactgcccgctgcgttatgattcgaaatgattgttgggaattataagctaaaatacaattttgaaagcaattcacaacaaccattccataaggaatatttttttttgtgttgggaattataagctaaaatacaattttgaaagcaattcacaacaaactgctcaatcaccggttaaccactccggttgggaattataagctaaaatacaattttgaaagcaattcacaacaattggttccgttgggtgatgtggttcattgttgggaattataagctaaaatacaattttgaaagcaattcacaacagtaactggtattcggcaaaagaaataaaagttgggaattataagctaaaatacaattttgaaagcaattcacaacattggtttatgcctttaaatataataagagttgggaattataagctaaaatacaattttgaaagcaattcacaacaaccattccataaggaatatttttttttgtgttgggaattataagctaaaatacaattttgaaagcaattcacaacaaactgctcaatcaccggttaaccactccggttgggaattataagctaaaatacaattttgaaagcaattcacaacaattggttccgttgggtgatgtggttcattgttgggaattataagctaaaatacaattttgaaagcaattcacaacagtaactggtattcggcaaaagaaataaaagttgggaattataagctaaaatacaattttgaaagcaattcacaacagttaaagtgttattgtatattattcttttgttgggaattataagctaaaatacaattttgaaagcaattcacaacactgattataaatagaacatattttgttacgttgggaattataagctaaaatacaattttgaaagcaattcacaacatgttgaatggtagcattaatatcaagtgtgttgggaattataagctaaaatacaattttgaaagcaattcacaactatttgaatgtagaacccatcgagccaatcgttgggaattataagctaaaatacaattttgaaagcaattcacaacatgttgaatggtagcattaatatcaagtgtgttgggaattataagctaaaatacaattttgaaagcaattcacaacagttgctggattagctttcgttcttagattgttgggaattataagctaaaatacaattttgaaagcaattcacaacacttcccagtagctttttaaccaactcaaagttgggaattataagctaaaatacaattttgaaagcaattcacaacgctttgatggttcttgctccagataatttgttgggaattataagctaaaatacaattttgaaagcaattcacaacaatttttgcatcgaaaatagcattggtaaggttgggaattataagctaaaatacaattttgaaagcaattcacaacaacttaacggtacgcttgcatcgttttccagttgggaattataagctaaaatacaattttgaaagcaattcacaacatgttgtccatcactgcaagaaatggtgcggttgggaattataagctaaaatacaattttgaaagcaattcacaacgcatctgtagctgcttgtttggcttttcttgttgggaattataagctaaaatacaattttgaaagcaattcacaacctattctttccatcggctccaactgtccccgttgggaattataagctaaaatacaattttgaaagcaattcacaacaggaaaaggacagtccaaaacatatttccggttgggaattataagctaaaatacaattttgaaagcaattcacaacgccagaataagtgatgtttatttcgtaaacgttgggaattataagctaaaatacaattttgaaagcaattcacaacacttatcgcgttaggtgttacactgctgtcgttgggaattataagctaaaatacaattttgaaagcaattcacaacataaatcgcctttagccatactcaaaatcgttgggaattataagctaaaatacaattttgaaagcaattcacaacaaattcacccaaaagctgaaattatattggttgggaattataagctaaaatacaattttgaaagcaattcacaactatgttagcgatgcggttgatgttaaccgtgttgggaattataagctaaaatacaattttgaatttatgaatattcagaacgcttctaaaaattaaaaaacagtaaggcaaagttattcataccaacgtttgtagccttttgttttttttttaagcttgtgttatttagcctaaaaatgtaatgactaaaattctttcctcttccataaatacaaaaaaacattctcatcaataaaaactcacaattacatccccaaaaaccctagccctgatggcagctgcatccttttttgttcgcctttttggcgaacaaaaaagatatagctaacagcaggaaattgcttcaaaaaaaactgttacctaacctaaaacgactataaataaaggatttattttgaaatttcatgctcctttactatctttcgtgttcgataaaaaaatagaaaccttacacattgaaaaaatgttagaagaaaagaatgataacctgcttgaagcagatggaaatttagaacacaattctgttgaatctactccattagaaccagaagttttggaaacggaaactgtagcggaaactagtgacagcgttactacgattcctgcagaagacaatgtagcaactcttaatgatgaagaattgttaggcactgaacctattatagagactgaaaaccagactgtactagatgctattgccgaaacaaatgctgccgaaagcgaggatgaaacgttgaaggaacgtcatgaaattccaatgcaggattatgatacattatcacttgaagcactggtagacgaactgaaaagtttagtttccaatgaaaaagtaatgtcatttaaggaacatattgaagaaatcaaaaaagcatttttggctaaatacaaccaccttattgaagagaaaaaagaggagttcttagccgaaaatcaagatccaaacgaagattttcaatatcattctccactaaaaacaaattttgataaatattattctctttttagagataccaaaaatacccatttcaagagcttacaaacgaatctaaaaacgaatttagaaaaccgtttggctattgttgaggaattgaaagagttgattaacccacaggaaaacatcaaagacactttaaaacattttaatgatttaagagaacgatggaaaactgccgggccaattccaaaagacaagtacaaccacgtttggaacaatttccattttcatgtggaaaatttctatgattatctgcatttagaccgagaagccagagatttagatttcaaacataatttagagcaaaaacaaaaaattgtagcgcgtgttgaagaattggtgaatgaagccgatattaacaaagcgttcagagaactgcaggatttacatagaatttggaaagaagacattggtcctgttgctagagaacaccgtgatgcaatttggaacaagtttagcgatctgaccaaacaaatgcatgataaacgcgaagttttgttcgaaaatcaaagaggaacggaacttgagaatttagaaaagaaaaaagaaattattgccaaaattgaagttttggctaccgaaaaagtaaatgcgcatacacaatggctcgctcaaatagaaaaagtggaagcgttgcgtactgctttcttctctgccggaaaagtgccatcggatgtgaatgaagaaacttgggctagttttaaaactgctgtcagaaattttaattctttcaaaaattcattttacaaagacattaaaaaagatcaaaacgacaatttaagcaaaaaaacggctcttgtagccaaagccaaagaattgcaaaaaagccttgattttgctgctaccacaccgatcatgaaacaaattcaggatgagtggaaacagataggacatgtgccaagaaaatattcggataaaatctggaaagagtttaaagatgcctgtaaccattattttgacaagttaaaagagcaaaagaatgaggaaaacggtgaagaagtggaagcttttgataataaaaaagcctacttggaaacgttgagagaatttcagttgaccggagatcacaaaacagatttggatgctatcaaattgcatatcgaaacctggaaaaacttcggaaaagtacctttcccaagaagacatattgaaggaaaatttaataaaatcctggatgctctttttgaaaaattgagtttgagtaaaaaagatactgatatgatgcgttttgctaatagaatggatcatttgtctgaaagtaatgacactcgaaaactggataacgaaaagattttcctaatgcgtaaaattgacgaagttcaaaatgaaattttccaattggaaaataacattcaattctttactaacacccgaaatgcaaaaaaagaaaattctatcgtattagaagttcgtaaaaacattgctatccacaaggaaagccttgatgtttggaaagaaaaattaaaacaattgagaaatttaaaccaacagtaaatttcagtaatcgttaaaaatagaaacctcgatcttaaatagttcgaggtttttttatggagaaaacctatctaacgctaaactttaactttcatttattagaaaaaattatataaatcgagtgactaattttagatttgcaaaatgaattggtttcgaaaaacacttgtttttattgggcttttaatagcttttttatttgcctttagtgcaaatgaaactcctattcataccactcaatcagaaaaatccagttcttcggtttctgttagcagcatttattcttcagattttatacaaccgcaagtaagtaacacatttacttcctatcataaaactccggattacagcattgtaaaatatctagcaaattttctgattgcaattccggattttaaaattagcacattctttattcgtttcgcgaaacaagacatcaatcgatgtgagatggtttcgctcctactctttcctttccattttttttggtgatttgaagcactgatttcgaaacttatcttcccttttgaattgattcctttggtttcggttcaaattatcatgctttacaaataactaaaaaataaaaaaatggatacatccgtaacaataattggccttatactaactttaataatcgctattcctcttttttatgtgattcgatcaaattcgattaacaaaacaaaaatcaaaatcataaaaacaaagtttagtcaaaacaatcgctttaattttgaattaaccgaaacacaaaataaaaaagtcttggcattagacgaaaaaaacaaaggttttcttttgatagattttaatgcaaaggaagaagttgtttcttttgtagacttaaatacggttcaatcctgcaaactggttccaacaacagagaataatagtgatacaattctaaaaattgaattcgaatttcaatacaaagaaggtaaaaaagcagtatttattccattttacaaaattgagaatgaccaaattggtcaagtttgtttgtatgaggatcatcaactagccaaaaaatgggcaaaaatgattcaggattgcatcaccgtttaagtaattgatatgttctgtaaaagaggcttttggagcctctttttttttgtgaaaggtttttttcaatatgataattatcattttaatatttaagcagtcgttctacttttgattaatattaaatgactccgttatgaaaaattctttaattcaaaaatacaatgttccaggccccagatacaccagttatccaacggttccctattgggatgaaactgatttttcagatgagatttgggccgaaacactaaagaaatcatttatagaaagtaattcttcagaaggtatcagtttatatatccatttgcctttttgcgaaagcttatgcactttttgtggctgtaacaagcgtattaccaaaaatcatggcgttgaaaatccgtatatagaggccgttttaaaagaatggacattatattgtaaaattcttggagaaaaaccaactataaaagagattcatttgggtggtggaactcccacatttttttctactaaaaatttagaggatttaataaatggtatttttgttcatgccaataaagccaaagatcatgagtttagttttgaaggtcatccgaataacacttcgcacgaacatttgcaaaagctttacgatttaggttttagaagagtgagttttggtgttcaggattattcagagaaagtacaaaaagcaattcaccgtttgcagccttttcataatgtggcaaaagttacgttctgggccagagaaattggatatacttcaattggacatgatattatttttggattaccgtttcaggaaatagaggatattatcgacacgattgagaaaacaaaatcattacagcccgaccgattggcattttatagttacgcacacgttccttggattaagggaaatggacaacgcggttttaatgacgaagacattccaaaagatgataaaaagagaatgctgtatgaaaccggtaaaaaattattgtacgaaaacgggtatcatgaaataggaatggatcattttgcgttgaaaacagacagtctgcatgaggcttttcaaaacggtaaactacaccgtaatttcatgggttacagctcttcaaaaacacaattgatgattggattgggagtttcttccatcagtgacagttggtatagttttgcacagaatgtaaaaaatctggaagattattatcaagtattagaatggaataaattaccagttttcagagggcatttactgactactgaagaccttatcatcagaaaacacattctgaatttaatgtgtcaatttgaaacttcctgggaaaacaaagagggttatttcaatgaaattccagacgttatacttcaattgaaagaaatggaaaatgatggattagtactcattaaagacaatagcattgaggttacagaaaaaggaaaaccttatgttcgtaatatttgcatggcattcgatttacgtttgaaaagaaaagcaccggaaaccgaattattttcaatgacaatctaatgtttctcaatcttacaaaaataaaaaagcacgctgaatggcgtgctttttttatactaaactattagaaaattaatgacaattaggatcggcttgaataaacaaactcatattagttggagaaatgtaaggaattcccaatcccaatcctcttaaaataaataaacaaccaatgcataccgccacataaggaatcgctttttggattctgtttcgaataggcaccgttaaaaacgaattgatatacacgacgctgctcatcataggaacggttccta

SEQ ID NO: 1080 - DNA, 24602 bp, synthetic construct
  source 1..24602: mol_type = other DNA
  misc_feature 1..24602: note = Synthetic
ttcggggttgatggcataaagcctgccgtccttacccttatgaatccaggcgatgtcgtcacccactgtggttactttccagccctcaaattctttcggtgggatcatcatggcgaagttggtcttgccgcaggcgctgggaaaggccgatgccacgtaggtcttctgcccatcgggagctttcacacccaggatcagcatgtgttcggccagccagccttcttccttacccatcacggaggcgatgcgcagggcgaaacatttcttacccatcagggcattgccgccgtaaccggagccataggaaatgatcagccggtcttcagggaaatgggagatgtattttacatccggattacagggccaggacacgtctttttgtccgggttccagcggtgcgcccacggaatgcaggcatttcacataatgtttgctgatatgtggcagcacctgttcccccatacgggtcatgatgcgcatgttgaccactacgtattcggaatcggtgatctgtaccccataccgggataagggagagcccaggggacccatgcagaagggaatcacgtaaagtgtgcggcccttcatggagccatcgagcaggttgttgaggattttcttcatctgggcgggcgccatccagttgttggtgggaccggcattttcctgcaggcggctgcagataaaggtcttgtcttccacgcgggccacatcactgggatcgctgaaacaggcaaaactgttaggacgcttttcctggttgagccgaatgaatgttccctttttcaccaggagattacagaggtcgtcatattctttctgggaaccatcacagagatggatgtgatcggcttcacactgggccgcaatctgtttggcccagttctcgatctcacttaggatcgcagatgacttgaactgcgaaaagttgcttttgagtgccatagtaatggtgtgttggttttgatactacgtaacaaatatcacagcctgttaaccaaaaatttctgacctgctactaatcgcgttatgattcttgtaagattacttcatgatttttgacttcgagccgatactccgctcccactttaagcgcatagttttctttttcgtgactcaccgggaagttaaagcataccggaaaccgatagccgctgacggcatgatgtaggatctcttcaacggactgtccgaatggacgatccgtatccttgttatccgtgaagccaccgaatatcagtccggccagttgatccagcacccctgcccttttcagttgaaacatcatgcgatcgatgttgtaaagttgttctcccacatcttccaggaagaggatcctatcctttgtcttgtaggcggatggcgttcctaccaggtgggcgatcagggtgagattaccaccgatcagccggccttttgccacacccggattgttcaggtgatgggccgcggcagtatagcggcacttttcaccggtcaataccttcctgagtgattgcacaaattcgttctcataaccaccatcattaaacgcagcggccatgggtgcgtgcagagttgcaattttgaggttgcggttgatatgggcgtgcagcaccgtgatgtcgctgaatcctatgatccatttgggatgtttccggaaggccttaaagttaatttgatcgatgatacggccaacaccgtatcctccccttccacagaggatggctttaatgttgggatcatcgagcatagtctggagatcgtccagtctttcctggtctgttccggagaaatagttggcggattcgctggtcatcgtgctgcccagtttcacctggaaaccccattccagcaattgtcccacacaggtctgccatttttccggcgccatgaacccggccgggcaaaccagtccgatcgtatcgcctttggagaggtagggaggtaaggtcataaattcaggtgtctgacatcatgtgcatcatgtgcatcaagtgcctgacaaatataatgcaggtcgctaaaatagccgcgatatcacgcaaggttaatacttaccttcataaaaatagtgaccaaatgcgaccgatcaaccttccactgtttttcgtttgtactatactggtatcgtttaacccttccaaactccataaaaacattcaacctgttcctgacaaacccaatgtcattttaatctttatggatgatatgggatatggtgatcccgtttgttacggaggcggaccttatcagacaccaaacattgacaggcttgccaatacaggaatacgattttccaatttttatgccgcgcaggcagtttgcagtgcatcgagaagcgccctgcttaccggttgttatccaacacgcatcggaatatccggagccatcgatcataatgcaggtttcgggctgaatcaatcggaggaaaccatccctgaactactgaaaaaaaacggctataaaaccggtatggcagggaagtggcacctgggtcatgtagaaccatacctccccctgcagcacgggtttgatgaatttttgggaatcccctactccaatgatatgtggccggtgtattatgacggaacaccctggacagacagcaccagctaccgatcaacctatcctgtattgccactgatagaaggaaacaaagccgttggatatatccgaacactggaggatcagtctaagctgaccagaatgtttacagagcgggcggttcaattcattcagaccaacaaaaacaatccgttctttttttacctggcccatccaatggtgcatgtgccacttgccgcaagcgaaagattcaaaggcaaaagcaaaggcggattatttggtgatgtaatggaagaagttgactggtcggtaggcattatattgaaaacgctggaggagaataaattactggaaaacaccctggtgattttcaccagtgacaatggcccctggttaacattcggaaaccatgcgggtaacaccggcggattgcgcgaaggaaaaggaacagcctgggaaggcggagtaaaagttccctgcattatgagctggaaaggaaaattacccgccggagtagtaaataatcaattagccaccaccatggaaatcctgcccacactcgccagtttatgcggagcgccgtcacctcagcaaaaaattgatggcattgatatggcgaatgttctattgggcagaaccactaccatcgggcgaaatgagtttgtatattattatgataaaaacaatctcaaagccattcgcaaccatcgttacaaattggtgttcccggccctgtcacaaacatatggaccgccggcagttatagggaaagatggctatcccggaaaatatggaaccgattcggtgaaattggcattatttgatttgtggacagatccgggtgaggaccgaaatgtgctggcgctgtatccgaaggtggctgaagagttgaacagcaaagcggatcaatacagaaaagaattgggtgatggattaacgaaagcaaccggaacatctgtcagaccggccggacttttgaaaaattaagaaataatccttgacagtttcatgaatccggggattatatgaacttatcttgtcaacggtaaaaagtacagatccttaaagataaaacccaaacatttaaattgcccgcagctgtagatttctacaggcccgctggatacagaagccggatttcaatcaaggttatcaatgggcacaacgattacattattcctttgcacaatgccctgaggtatgtgaccaaacttaaacaggtaattaaactgttcagccccatcacttttttactgtaacacgcagaaaggttgccggaacatccagtgtattttcatccttgctcctgttgtgctggttgaataaaacctccagttcctgttgcagtgcttcggctttgccatttttttcggccgcttcaaatgcgttcatggttggaccataataatgcctgaacctgtttaaaaattcggaagccgaaataggagcctgaaatctgaagctgtctttttgaaaagaaatattttcttccggaatacccgctgcagtgaaacgctcccttacattcgtctccaccccccaggtcatgggactaataaagccttccggaggtggtggtgcataggaagaactgatctttaacagttgcgccaccattgttggatcgcccggtatccagttacccatgatgatgcgtccgcccggacgggtaacccgtaccatttccctggccacgtcaaaaggccggggagcgaacatggcgccaaagatgctcatcaccacatcaaattcattatccggcaatccttgcagatccgtacagtcgccctccctgatgctgatatcgtttaatctctcctcctggatgcgggcgtttcctgccgccaccaggttccgggcaatatcaatccctaatacccgggcacccagccgggcagccggtatggcggtggttccatcgccgcaaccaaggtcaagcactttaatacccgggacaattccaatatctgaaaccagttgggctccactttcacgcatggtttctgcgatacgggtgaagtcacctttttcccataatactttattgggattgctggcagaaggggatgcagcaccaccctgaagagaagttgtttccggcataacttaatagttgaaggttaaaagatgtacagatccaaagggtaatatctatggcagggaaaagaaggctggtaataaatatacaatttaatttagttgtataaacattttacccatgcctggatttaaacttgtcgctgtcctgacgctgttcatcgctttctcagcatgccaaaacgaaaagggaatatccttccggctcattgacaccgacacctttcatttcaacaatttcgtggactgcaatatggcggaagcctggatcggcgacaccttccgcatctttcccggcaaatacggcgaagaccctgtctggggcgccgcacatgacctgaaatttgcaagcggtcgtcatgccgatgaaacattttcacaacctgccgccgcttatacggcaccgttactgccacagaacgcggccgttgggcaggcgggcctgcatggcgcggtatggtttgaaaccgtgcaccaggacagcaaagatgccagtggcaaaaccctttatgccatttatcacaacgaaaactatcctgaaacacttccatacgattcggttacaggtgaaggttatatcgaccggcactggcctctgggactaacggagaggatcaccccggcggcagtgtgccgcatcggcatcatgaaatccattgatggcggctggagctgggataaccgcgggcttttcctggaagacaaacagccgcgcatgatcctgaaaccgcacaacacttccaaaaccttcggtggtggtgtgggtgatccctctgcggtggccgtgggagattatctctacctgttctatggcgaatatggttatccgggtgtttatgattcatccacttatgatccgcaactggaacggggcggacagtgcatcagtgtggccaggattgccatatcggacctggacgatccgcagggaaaagcgaagcgctgggacggctccggatttactgctgactgggatggcattggcaagccagtagcttccctgcagataccggtttctgaaggcggcggacccgcatcctccccaggcggcggatttcactggggtccatccgtcagttggaatgaatacctcgaatgttgggtcatgatgatgggaagagtggaaggacaatcctgggtgggcgatgaattgtacatctcattcaacgaacataaggacctcggcacgggcactaactcccaggcatggtcgaagccgcagaagctgctggagaaacccggacatgtactctggtatccatcccttcagcccatgaatacggaggaggacatccgcagcaaacgcaccagcctgcgggtcggcaaaaaagccaggctgttctttaagtattccgatctcgggaaatatttttcaacctatattattgagtttgagaagggaggaaaatgatgttatcctttaatgcaaaacaccccattcatgtcaatcaaaatatatcaggtagacgcgttttcagataaggttttttccggcaacccggccgcagtttgtcccctcactgaatggctgccggatgaaatactgcagaacatcgccatggagaacaacctggcagaaaccgctttttatgtaaaagaagaccggcagatccaaatccggtggtttacgccaaccacggaagttgatctttgcggacatgccaccctggccgccgcttatgtacttttccatcaggaaaatcaccctggaaatattattcacttttattcgcccagaagcggaaaattaacggtgaccaaagacagcgatttcctgacactcgactttcccgtagatatgtatgatgaagtggaaatctctgacgccatcagggattgttttgacctgcaaccgatttccgcctttaaaggcaaaaccgattatttattggtatttgaaaacgaaactgacattgcaacaatacatccgagactggacaaaatagaaaaattaaatgcacgcggagtaatcattaccgcaaaaggaaaggaggtggattttgtgtcaagattttttggaccgcaggttggggtaaacgaagatccggtaactggttcagcccacacaaccttaaccccatactgggcaaatcaacttggtaagaaagagctaagcgccattcagctttcttcccgcaagggttatctgaagtgtagcttgaaagatgacagggttgaaatatgcggcaaaggcaaactgtatttaaaaggcgatatatatataaattaaagtggcccggatccgggccacttttctattgacagcttttgatcttaagccatgtcgaaacgatctaggttcatcactttggtccaggctgcaacaaagtcacggaggaatttctccttagagtctgaagaaccatacacttccgcaatggccctcagttcgctgttggaaccgaagatcaggtcggcacgtgtaccggtccatttcagctcacccgtcttgcggcaacggccttcaaatacctgctgcgattctgaagtagctttccaggtggtgcccaggtccagcaggttaacaaagaagtcattggtgagtgattcaggcgttttggtgaatacaccgtgctgtgacccgtcgaagttggtgttcagcacccgcataccacccagcaggacagtcatttcgggggcagagagggtcagcaactgcgctttgtccaccagtaattcctcagacatcaccggaacgcggggcttgatataattgcggaaagcatcggccagtggctccagcactgcgaaggaatccacatcggtctgctcctgcgaagcatctgcacgaccaggtgtaaagggaaccttcacctcctgtccggcattgcgggcagcctgttcaatggcagcggaaccagccagcacaatcagatcggcgatggacacacgcttattgccggactgcgcaccgttgaattcattctggatggcttccagggtatccagcactttacccaactgcgacggattgttcaccgcccagaacttctggggagccaggcggatgcgggcgccattggcaccgccgcgcttatcggaaccacggaaggtggaagcggatgcccaggcagtagataccagctcggatacagagtggccggaagccaggatctttcctttcagggcttcgatatcctgttcgttaatcagatcgtgggtaactgccggaatcggatcctgccagatcagttcttctgcaggcacttcctttccgagatagcgggcacgcgggcccatgtcgcggtgggtcagtttgaaccaggcgcgggcgaaagcatcggcgaactcatcggggttctcgtaaaaatggcgggagatcttttcgtaagcgggatccattctcagggcgatgtcggtagtgaacatcatgggagcatggcgcttgttcgggtcgtgcgcatcgggaacagaatctgcgcccataccatgtttgggcctccactggtgtgcgccggcagggcttttggtgagttcccattcgtatccgaagagattccagaaatagttgttgctccacttggtgggagtggaagtccaggcgccttccaggccgctggttatggtatatccggcattaccggtaccgtagctgtttttccagcccaggttcatttcttctaatcctgctgcagccggttccttacccacatatttggacgggtctgctgcgccgtgggccttaccaaacgtatgtccgcctgcgatcagggccacggtttcataatcgttcatagccatgcggccgaaggtttcgcggatatcgcgggctgcggcgatcgggtcgggattgccattgggaccttcagggtttacatagatcaaacccatctggacagccgccagggggttctccaggtcgcgctcgcctgaatagcgttcatcgcccagccattccttttcggaaccccagtaaatatcttcctccggctgccagatgtcttcgcggccaccaccgaatccgaaggtcttgaagcccatggattcgagggcgcagttgccggtgaggatcatcaggtcggcccacgaaatcttattgccgtatttctgcttgatgggccagagcaggaggcgtgctttgtcgaggtttacgttatcgggccagctgttcaggggtgcgaaacgctggttgccggtgccggcgccaccgcgaccgtcgtgaatgcggtaagtacccgcactgtgccaggccatgcggatgaacatggggccgtagtgaccccagtcggcgggccaccagtcctgtgaagtggtcatcagttcgacaatgtcctttttaacggcgtcgaggtcgagggacttgaaagcttctgcgtagttgaagtcctcacccatggggttagacaggggggagtgctggcgaaggatgttcagtttcagctggttgggccaccagtcgcggttgcctgtgccgctgcctgccacgggcttcatggagccattgtggaaggggcatttactgatatcacctgcgctgttgacatcgtgagatttgggatctgtgggtgtgctcatgttattagaattatctgtttgcaatcgtgattgtttcaggaagctaaggcaaatgtatcgatgaaatcaacaaaaggtttatctatttacttgattaactcatagataatatctatcggaaaccggccttcgtgtatcaggatattataaaaataattcgtgtatcctgtaataattggtaacttatggaaccaatccggccctgctcctggtcatttgaaacatcaaaacctataccatgcctaagtatgtaattgaaagggaaattccgggtgccggcaatctgagtccggagcagttaaaagccatttcccagacctcctgtggggtgttaagcaaactcggtccgcagatccaatgggtccacagttatgtaacgggagataaaatttattgtgtgtatatagcccccaatgaagagatggtacgggagcatgcgaagcagggtggatttcccgccaattctgtgagcgaggtgaaatatatgattgatccgacaacagcggaataaggtgggattgctttactggccagtgccagatagctgataataataccactaattttataattttctaccaccaaaccgatgagtttcccatcattcatcggtttggcatcaccgttattatctccagcaggaggtgatttttttgtccaaacctacgggcacaaaaaaaggcgactctcgccaccttgaatgttttcacaacggaataatccttattgtgatttgctttcaggaactaaagtaaaacttacatttcaaaaaagcaagtaccggtcaaaacatttttttaaatagacaattttatatatttagtacctaaaccttaaactaatgaaaaacattctgggtcttgaccttggaactaacagtattgggtgggcgctaattaattacagcaaatcggaagataagggaaacataacaggtatggggtcccggatcatccccatgagccaggatctcctgggcgattttggcaaaggtaatactgtttcccagacagcagaaagaaccaggttgagaatgatgcgccgcctccgccaacggcatatcctacgcagggaacgtttacatcgtgttttaaatctcatgggttttctcccttcccactttaaggaaggtttggatttcaaccaacggccaggacagttcctgaatgatacagaacccaaaatagcctaccgcaaagaatggaatgaagcattgcagaaatttcagcaccattttatcttcaagacagcataccaggagatgctggaacaatttggagtacaaaatccagaattgttactaaaagaagatggatctcaacgaaatataccctacgactggacaatttattacctgagaaaaaaagcactaactgaaaaaattgaaaaagaagaactagcctggctcctattgcattttaatcaaaagagaggatactatcaggcgcgcggagaagaggaagaagagcagcctaataaagatgtgcagtttcatagcctgctcataaccgatgtacaggcagatccggaaccaggtcgaaaaggggaaacctggtatgccctgacgttaagcaacggatggatataccgacgctccagcaaaacaccattattcgactggaagggcaaaacaagggattttattgtaactactgacctggaagcagatggctctcccaaacttgatcgcgatgggcaggtaaaaagaagcttcagggcacctggtccggaggattggacgcttttgaaaaagaaaacagagcatgatatcgaaatctcaggaaaaacagttggcgcatacatattcgacaccctactggcacaaccccgggtaaaaatcaaggggaaactggtgaggacaattgaacggaaatactaccgtgatgaactgcaccgtattttggaaacacaatccaggtttcacaaagaattaaaagatactgaactgctacagcaatgtatcaatgaattgtacaagcagaatcaaccccatcaggaattattatcgaataagaattttgcatacttattggcggaggatatcatcttttaccaacgcccgctgcgaagcaaaaaatcaacagttggtaactgttcgcttgaattcagaccctcccgggatgaaaaagggcaactggtatatattgatggcaaaccagcgttatatcccctgaaagctggaccaagatctaacccatactaccaggagttcaggctatggaaatggatgcacgatctgagaatctataaaaaagaagatgaaacagaccgaacttcagaatttctggggagtattgaacaaaaggaaaaattatttgaatacctcaacaaccagaaagaaatcacccaggagaagttgctaaaatttctattaagtcaacaagggttaaaagggaagcaattaaatcttgaaatagcagcaattcggtggaactatgtagaaggtaaaatttatccaggcaatgaaacaagagccatgatccttggcaggctcaacaaatgcctagatcaaccggaggcatttcttgacgatgaaaagttatatcacctgtggcatattatttactcaataaatgacaaagaggcatttggaaaagcactccgcagcttcgccaaccgttatgacctgaatcctgacaacttttatgaggcatttaaaaaaacccctccgttcgaaagttcatatggatcctattctgaaaaggcgatcaagaaatttttacccctgctaaggcttggaaaatattggagttttgacagaattgatgcagcaaccagaaatcgcattgaaaaaattcaaaccggagaatacgatgaaaacatccgtgaggaagtacgcaaaaaatcaattcacctgcaagcagatgctgatttccagggattacctgaatggctggcaaagtatgtaatatacgacaggcactctgaggcagactctgccggaaaatggaacagcattgctgatatagatcagtggttgaaggaatttaaacaatacagcctccgaaacatgatagtggagcagattgttttggaaagtatgcgtgtagtgagggatatctggatgcattatggaaaaggtgcagccggattttttgatgagattcacattgagttagggcgggacctgaaacaaaccaatgacgagagaaaacgcatgacggaccagatttcggaaaacgaagccaccaattaccgaatcaaacatttgctggttgaaatgcagcaatcggggcaggtagaaaatgtccgcccttactcccctatgcaacaagaaatacttaagatatatgaggaaggtgtattgcgctcgggaattgaagtggatccggaaattttgaagatttccaaaacggcgcaacctggtgcagccgatctaagacggtaccggctctggctggaacagaaatacagatcaccctatacaggacaggtaatccccctaagtaaactattcacgccagaatatcaaatagagcatataatcccaaaagccagctactttgatgacagtttgagtaataaggttatttgcgaagctgcggtaaacaagcttaaggacaatcttaccggctatgcatttattcaggaaaaacaggggcaaattgttgaattaggattcaacaaaaaagttaaaatcttcacccctgaggagtacaaggagtttgtacaacaacattacgcctctaatcctgtgaaaaaaagaaagctgctgatggaagacattccagaggagatgactgagcggcagttaaatgacaccagatatatcagtaaacttatttcccaggttttgtccaacattgtgagggccgatgaaaatgatgaaggcgtcaactccaaaaacataatccaggtaagcggaaaagtaacttccgcgctcagacaggattggggattaaacgatatctggaatgagatgctggtgcctagatttgaacgattgaatgtattgttgaaaactgaccagttccttgcctggaatcagcagcaccagaaatggctgccgaccgtacccctggaattcgcagcaggatttaataaaaaaagaattgatcaccggcatcatgcgctggatgcactggtaattgcatgcgccacccggagccatgtcaactacctgaacaatacaaatgccaggcgtggacaaaaaaatggagagactcaaaatggcacccgatatgatttaagatcgactttgtgttataagcgcaaaaactcagacaacaaagatggttacgaatggatattcaagaaaccatgggaaagtttcactgctgatgcagccttgactttgcagggaatagtaatcagttataagaaaaacctgagggtcctcaacaataccagtaatcgctataccaggtgggagttacaaaatggagagttggtccgtgccattgaaaagcagacaaaaggggaagcaaaagccattcgtaagccactgcacaaggacacagtatttggtgccgtaagacttcgaaagaagaaaatggtttcaatttcaacagcgttggacgatatcgggtctattgttgacgcggagttccgtaaatacctgcaatccctgcagcaacagggctacgacaagaaaaaaattcagtcccagttaaaaaccatgcaaatggaatggaagggacaatccatttcaagattggaagtatggtattgggagaacgaactggttgccagcaggaagaccctggacaccagtttcaatgaagaaggcatacaatcaattacagataccgggattcagaaaatcctcaccaggcatttggagaattacaaaggcaggcaggatgagaacggaaaacccatttctccggaaaccattgcattttcaccggaagggattgaggagatgaatgcaaacatgcgcacaattaacaatggaaaggatcaccagccaattgaaaaggtgagggtatacgaacctaagggcaacaaatttccggtaggtgaaaaggcaaacaaacgaagcaaatttgtagaggcggcaaaaggaaccaacctgtattttggtgtgtaccaaacagggactggaggcagaacctacgaaagtattcccttaaacattgtcatcgaacgcttgcgccaaggactcacccctgtaccggaaataaatgaaaatggggatcgtcttttgtttgatttgtcgccgaatgacctcatatatgtacccacggaagatgaaatacaggcaggggggaaaccgaaggtttcggaaggggaaaagctgaatgtggatcgggtgtataagatggtgagttgtactggaaatagaatgttttgtttaaagcaggacgttgcaacttcaattatagataaagtagagttctctagtttaaataaaatggaaaaggcaattgatggctccatgataaaatcctgttgttggaagatttccaacgacaggctagggaatattactattgaatagacccccgtttaaattgctctggcctaacaaattgccagagcaattttttatttatccacacgttttaaccatagctccaatattcattttgaaatcccaacacccggaactatggtcaaacgcacattgtactttggcaacccggcttatttgcgtgtggaaaatgaacagttaaagattgagttacgcgaaagcggggaaatcaggcagataccaatagaagacattggttatattattttagacaaccagcagattgttattactcaggttgccattgccaaactccttgaaaataatacagcactaatcacctgcgaccagacccaccatcctgtgggcctgatgttaaacctcgatggcaataatttgcaatcccagaaattccaggctcagattgatgcttccgtacctttaaaaaagcaactctggcagcaaactgtaatgagtaaaatccagaaccaggcatccgttctggaaaaccagcgcatttctggcaaggccctgcgtcatttagttcaacaggtaaagagcggagatgctgaaaaccacgaagcacaggcggcggccagctactggaagcaggtatttccggaatatttatcctttcgccgggagcggcatggccctcctccgaataatttactcaactatggttatgcgattttaagggcaatggttgcccggagcctgacaggatccgggttgctgcctacccttggcatacaccatcggaaccaatacaatgcctattgcctggctgatgacatcatggagcctttccgcccctttgtagatttgatagtatgccggatcatccggcaaaatggccaatacctggaaatgaccccgtcaatgcgggcagaattattgaaaatcccgcaaatggatgttttggttgagggcaggaaaagtcccatgatggcttcgatccagagaacaacagcctccctggcgcgctgttttgagggtaaagccaaaaaaatcatatatccagaactggaaacaaatgtttgaccgcttaaatgcttatcggatcatgtgggtaattgtattttttgatcttcctaccgtaaccaagcgggaccgaaagcgctatacccggttccgcaaggatattatgcaggatggattcgaacttttccagtggagcatctatttccggcactgtatgagtcgggaaaatgcggatgcgcatgtgtccagggtaaaaaaactacttcccaataaggggcatgtggttataatgagcatcaccgacaagcaatttgggatgatggaagtattccggggagtggagccaattaaaacacctgatgctgccacccaactggaaatgttttaaaaacaggattgaaaaaatggtcattactcgcattttttcaatcctgttttaggcattaaagcgctgattttcaccagcttgcagcattcgtgttgtctgtaaccgaagctaccacataatttgaaagcaaatcacaactctgcaagccatgtgaataggttagctgtagttgtctgtaaccgaagctaccacataatttgaaagcaaatcacaactcttctgctcctgctgttcacgttcggcatgttgtctgtaaccgaagctaccacataatttgaaagcaaatcacaacccttgttcgatcttctcacgcatcccctgggttgtctgtaaccgaagctaccacataatttgaaagcaaatcacaacgccaaccttggtagtgttgagtttagtatagttgtctgtaaccgaagctaccacataatttgaaagcaaatcacaactacgcgtcactcatgactttatgcacgggtgttgtctgtaaccgaagctaccacataatttgaaagcaaatcacaactgtttgcgatcagtaacgcccgcaccttctgttgtctgtaaccgaagctaccacataatttgaaagcaaatcacaacacttggacaactcttctaactgcttctggagttgtctgtaaccgaagctaccacataatttgaaagcaaatcacaacagcacattataactctacctatactccacagttgtctgtaaccgaagctaccacataatttgaaagcaaatcacaacggtcgcccattcccgtagttcggcggggttggttgtctgtaaccgaagctaccacataatttgaaagcaaatcacaaccacaggcgcgaaaagagtaattctacaatagttgtctgtaaccgaagctaccacataatttgaaagcaaatcacaactgaaacgcaggcgcaaaagcaattacagagttgtctgtaaccgaagctaccacataatttgaaagcaaatcacaacttgcccggaaattaggcatcaaagacaacgttgtctgtaaccgaagctaccacataatttgaaagcaaatcacaactggatctgtcaattccaacattcttagctagttgtctgtaaccgaagctaccacataatttgaaagcaaatcacaacgtcttccatacttgaaaacaactggaatgggttgtctgtaaccgaagctaccacataatttgaaagcaaatcacaaccatttgagcaggagtacgctcaactgaagggttgtctgtaaccgaagctaccacataatttgaaagcaaatcacaacaggatgagaggttgatgcctgaattgtgtagttgtctgtaaccgaagctaccacataatttgaaagcaaatcacaactcgtcgctgccatccaactcgaatataattgttgtctgtaaccgaagctaccacataatttgaaagcaaatcacaacccctactgcaactgcaatggtgcagggatggttgtctgtaaccgaagctaccacataatttgaaagcaaatcacaacatcgaagttcctgtacaccgtaataccgtgttgtctgtaaccgaagctaccacataatttgaaagcaaatcacaactcattatggaacgggcataagcctacataggttgtctgtaaccgaagctaccacataatttgaaagcaaatcacaacatattgttctctatcttcttcgccttcttggttgtctgtaaccgaagctaccacataatttgaaagcaaatcacaacgcacaagcctatatcttccagcaggtatttgttgtctgtaaccgaagctaccacataatttgaaagcaaatcacaaccgctgtggcagcggccttttctccgatcacgttgtctgtaaccgaagctaccacataatttgaaagcaaatcacaaccaggttcggcaaccagtcgctgaagatcaagttgtctgtaaccgaagctaccacataatttgaaagcaaatcacaactactttccattacgcaatcgttgtgtacgagttgtctgtaaccgaagctaccacataatttgaaagcaaatcacaactatacccctcatagtctgcccctgcatatcgttgtctgtaaccgaagctaccacataatttgaaagcaaatcacaaccgtgccggtagctgaactatccacaacacggttgtctgtaaccgaagctaccacataatttgaaagcaaatcacaaccacttgatttccgttgctgtccttccactgttgtctgtaaccgaagctaccacataatttgaaagcaaatcacaactctgcttaattactggatcatccgcatacggttgtctgtaaccgaagctaccacataatttgaaagcaaatcacaactgcggtgtaccaatatcaatactgccttgcgttgtctgtaaccgaagctaccacataatttgaaagcaaatcacaacgtaggcagagcaaatgctgccaatcatcatgttgtctgtaaccgaagctaccacataatttgaaagcaaatcacaacttggtatgtctattgaaatatgccctctcagttgtctgtaaccgaagctaccacataatttgaaagcaaatcacaacacgcgctcacacaaaccaccaatacgagtggttgtctgtaaccgaagctaccacataatttgaaagcaaatcacaacaagcaccgcctccagacgctggaattctggttgtctgtaaccgaagctaccacataatttgaaagcaaatcacaacgatatgccgcaacgggataggattacgcatgttgtctgtaaccgaagctaccacataatttgaaagcaaatcacaactcaggtcagtaagcctcacaggagatgtgcgttgtctgtaaccgaagctaccacataatttgaaagcaaatcacaacctcaggtgctaagctagcaacgggtcagggttgtctgtaaccgaagctaccacataatttgaaagcaaatcacaacaactgtgttgaatcccatgccacaaggtttgttgtctgtaaccgaagctaccacataatttgaaagcaaatcacaacatgcctcgcatatctgcgcgccgccttaacgttgtctgtaaccgaagctaccacataatttgaaagcaaatcacaactagatgccatcctgatagtacaactctgaggttgtctgtaaccgaagctaccacataatttgaaagcaaatcacaacgctatcaccctggccctccttaatgccagcgttgtctgtaaccgaagctaccacataatttgaaagcaaatcacaacgctgtatgtccttaccccgccggtgcttatgttgtctgtaaccgaagctaccacataatttgaaagcaaatcacaacgggtagtcagataagggaattacctgacaggttgtctgtaaccgaagctaccacataatttgaaagcaaatcacaacaggtttatgaaggtgagtaccgcacaaagagttgtctgtaaccgaagctaccacataatttgaaagcaaatcacaactacctgtatcatcgaatcctatacccaactgttgtctgtaaccgaagctaccacataatttgaaagcaaatcacaactcaggctaaacagcgtatcaacgttatgatgttgtctgtaaccgaagctaccacataatttgaaagcaaatcacaactgtggctttcaggctgctcaactcttcggcgttgtctgtaaccgaagctaccacataatttgaaagcaaatcacaacaacatgaacatcataaatatgaagaaaaagttgtctgtaaccgaagctaccacataatttgaaagcaaatcacaactgacctccaggccgacccaagggcaaacctgttgtctgtaaccgaagctaccacataatttgaaagcaaatcacaaccgcttactctatttattgcgggacactttggttgtctgtaaccgaagctaccacataatttgaaagcaaatcacaacaattggcttgatcatggtacgcagccattcgttgtctgtaaccgaagctaccacataatttgaaagcaaatcacaaccattgcgaagagcgttggtgcaaagaatatgttgtctgtaaccgaagctaccacataatttgaaagcaaatcacaacagtgacgtggagcgagcaactggtaaagtgttgtctgtaaccgaagctaccacataatttgaaagcaaatcacaactgacaccagtggccacatctgcgctctttggttgtctgtaaccgaagctaccacataatttgaaagcaaatcacaactttaaccgcctaatattgatgcacgttctagttgtctgtaaccgaagctaccacataatttgaaagcaaatcacaacgcgggaatgtcccttgacatattaaatttcctccaacttggacccatcattaagagccttttcataaggcacaactgtccccacaacaactgcggcctaattgcatctaatcacccgaatggaatgccataaccagtctatgtcgatgagggtggccctccgcttttttagacccccatttggcggaatattttcgttactatcaaggcttaaccgtatattcctaccatacccgcctgcggaaattttccaggcttaaattcatcacatcatcgtcagcaaggaccggaagggggacaattgcgcccattacgcgacattcaatttcattaatcggctaaacaattttgcgattatccataacatgagtatatttacaatacagagtccttccggggacactgtgccccccgccagaaatggcggggcttcttttttataaaacttctcctctcacgaatttggaatattgacctgcacttctgaacatgatcacctccaatatcgcgagagcaattcaccgcacgttgctgattgaacaatagcacaaaaaaaaggtatgcctgaaagcaaatcacaacaaagtctgctaaacatattgccaaactgaagctgtctgtaaccagatttacatttttttaaatcctttgtcttctatatattttgatggcacctataatcagcgatttcagctcaggcgaatccgccggtggcgcatcactaattaaaacatttccattatgatctaagaatggatgttaatcacacaccaacaatccggacattgtccaattattgcaaatcagtaaatgtttgcattaaatgtaggtcggcgcgggttaaaacaaattgttcgcaaagtggcgcaatggatttgaaggacttataatttatttctaagatttgaaagaagaaatcgctctaaatttcctgacgatgcagcttccataaaacgccaatcggcatccattgatttatccgacatcgcctctacatcaacaaccttaacagataccaaagtctttccattctcccggatgacgatagcttgaaggcgtccagttattgttaatggttgtaaaccaaactttcttttaagaagaatagcgtgaacagtatcctgttttttcttatcatcataatatttccaggacctgaaaaaattttgactggttgaaatgatcaaaccattatccctatcaaccctatcaattccaattccggatttaaaaaactcaactactaatgcgttaataactgtttcacgatccttgtctgtatatatcgaatagttatcttgcgcgtatcctgttacggttttcaggaaaacaataattattacaaatgaaaatcttttcataaactgaaacaattatgtgatttgatgacaactaccactttttagaagcatatttattcaactacatttccagtattttatcattaaaaaccagaaaccatataattatgcactgaatacttcttcaggtgttaagattgccttgcccgcaatacttaattaccctcctaagctttcattttaataattgtgttccaatacctttcccagccggtattcaacaatggcggccagatatatctccccgtcttcttctaattctatatcctgaccattttcatccgcaacgatcaaaatttcagcacccagcacttctaccagcgctttttttctattgacattataaccggcataaaactgtatagcatcatattgcttcggcgctatatccttctccccatcaggcaattcaatatcaacaatatagcgactagcatttttgggtcgaatatcccgcgtttctatcagtttcgtaccacttacaatctcagcaagaaatttctcttttatgatcaattgtaatgttttcaatcgattatgtttatggtaatggcaatcttcagattctacacaaggaaaaactccatatactcctcacccttttcacccttcacccattcaatggcctcgccaacctcatacatatacgcatatatgccatcgttactaacctgaacataacgtccgggtttgttgatggcgaccgggtaagcggaatagtattcttcgtagtaggctttggcttctgacaggtgatccggaatggcatccaggttgatgacccgatttgtattgtcaaacaaatcatcataagtaggctgaaccagttgtgccggcttttctttcttcctgttgccaagggtcctataatgcggtgcttctatcctggtgagatgaccggcatgagccggcaggtctttattcacttcctgcacaaaatagatggccacggccacattctcccagggctgggacttcttttcgaggtgagtgatcaccgcaaataggctgagggcatctgtatccagcaaataactcaacatctcgttagtatcggcaggaacaaagcctattttcttcccctgccaatgcaaggcgatggcacatgggtcatattcattttccggttcccgcacgagctccaataaatcaccggttttcattgcatccaggagtttcatgccttcataatgccggaatcccgctacaaaacattgaagcagatagatcttccgaaaatctttggtgatggacaccggtaatttaccgatggtcatggaaccgatgagctttttaaggaaagaggacctgtccatgcttatttttttccgagtgagaccataatttccctgaaaccggcaagggctgattcaagattttcaataatatcacccgccaattcatccggatcgggaagattgtccagatcagcgagggacttatcctttatccaggtgatgtcaagagacgttttatctctttcaagaatctcttcataagtgaatttccgccaacggccatccgggttggattcagcccaggtttctttgcgcttatttcgtttgccggctttataacaatcgataaaatcctgcaggtcctccagtttgagcggattcttttttagcgtatgatggatattggttcgataatcatagaaccaaacctctttggtccagggattcctggaagccggtttgttatcaaagaacagcacattggcctttacgccatgggcataaaatataccggtgggcagtcgcaggatggtgtgcaggtcggtggtttccattaaacgtttgcggactgtttcgccggcgccgccttcaaacaacacattatccggcagtaccacagccgccattccggtgattttgagcatgctgcgaatatgctgtacaaaattcaactgtttgttactggtagtagcccagaaatcctggcggttataagtgagttcttccttctcctgctccccttcttcattggtgaaagtctgggagctcttttttccgaacgggggattggccagcacatagtcataacgaccgggcgcaggggctatgagggcatctgcgggcgagatgaaattatcactgtcgatatcaccgatattatgcaggaagagattcatcagtgccaggcgacgggtactggccacaatttcattcccaaaaaaggtctggtatttcaggaatttgttttgctccttatcgagtttataagtatctaccaggtaatcataagcggccaagaaaaatccaccagtgccgcaggcgggatccgcgatggttttcatgggttcgggctgtacacatttcaccatggcatgaatcaggggccggggagtgaaatactgtcccgcgccgctcttggtatcttctgcgtttttttcaagaagaccctcgtaaatatcgcccttgtctttaacccccatcatcagccattgttccgcgtctatcatggcgataatcttactcagcttggccgggtcctggatcttattctggctcttggtgaagatttgtcccaggatacccttttgttgcccgagttcacgcagcaggatggtataatgtgattccagttcagcgcccttcaggctggtaagactttcccaattgtatttagcggggatgggcattttccgcgaatggggcggcctgctatactcgtctaccattttcaggaagagcaggtaggtgagttgttccaggtaatcgccatagccaaccccatcgtcgcgcagggtattacagaaggaccagactttggaaacgatggcggagttgttgttgctcatgtcagaatttttggatcggggctttttgggtatcgaatatcattgtgtggagggtatagtggaaccagttctggaacatattgaatgttctgttttgcggccacattgattcatccatgtaccatc

SEQ ID NO: 1081 - DNA, 24599 bp, synthetic construct
  source 1..24599: mol_type = other DNA
  misc_feature 1..24599: note = Synthetic
gcggcattggatttgcattaattgcaagttattttatttcaaaatattttttaatgcttccagaaaagaacacctacatttggcttataatagctgtaattgttggtatttttggaactattggagatttagtcgaatccaaatttaaacggatttcagaaaaaaaagacagtggaaacatcatgcctggacatggaggcattttagatcggttagatagtgttatctttgtagcaccaattatatttttattttatcaaattttaaattatgtttcataaagaaggaactcaaagtattttattaggcactattgttactgctattgtttttttagcatcagaccattttatccaaacagaatggattaaaatgactattgaaattgtaactttattgttactgattatcattttacaatttttcagaaatccaaaaagaactgtagaaatcaatgaaaatcacattatagctcctgtagatggaaaagtagttgtaattgaagaagtttttgaaagcgaatattttaaggacaaaagaattcaggtttcaatatttatgtcccccataaatgttcacgttacccgctacgccataagtggcctggtaaagtttagcaaataccatcctggtaaatttcttgtggcttggcatccaaaagccagtgaagaaaatgaaagaacaactattgttgttgaaaataaaacttttggagctattttgtaccgtcagattgctggtgcattagcaaaacgtattgtgaattatgcacaagagggtatgcaggtagtgcaaggtacagatgccggttttattaaatttggctcaagagtagatatttttctccctttaggcactccaattaatgtggcactaaatcaaaaagcaattggaggaaagactataattgcaattaaagcttaatgattgaagaagatttagaaaaaaaatttcaagaagctgtagaaatagcttcttttatgacacaagcgtctttacctcaagatgtgcaactgcgtctttatgccttttacaaacaggctacatttgacaaaagcaattttacagttactgacaattctgatttaagaaatgcttttaaaacgaatgcttggattcagatcagtcatcttacacaagctcaagcaaagaaaaaatatattaaattaattcattccttaataaagtaatcgtattattttcatgaaaaaaaacacttttatcctagcaaacctgctctttatttcggtcttagtttcttgtaatgaaaaaaaaatgactgaggttgtagaagttccgttaccaacagtgcaagaaaaaattaaaataggcaatccaaatgatttaaaagcaaatgaaggctcatttcaattgggaaaaatttcttttggctatgatgcattagtgccagacttatcggccttgacattagaatctcattacaaaaattatttatattacacgaacagtctaaacaaaactatagccggaacagacaaagaaaatctaagcatagaagatattcttgcaaaattagacattaacgatcccgaaatacggaataatgcaggcggttattacaaccatagcctatactttaaatccataggcccaaaagcaggtggcgaaccaaaagacacattggcttcaaagattactaaagattttggttctttttccaattttaaaactgtatttaaagagaccgcaactaaacaatttggatcaggctgggtttggctggtagttgataaaacaggagttctgcagttatcaactactcaaaaccaagacaatccattaatgacctatgcacctgttattggatttcacggaacacctattttagggattgatctttgggaacatgcttatttcttagactatcaatacaaaaagaaaaattatatcgatcattttttcaatattgtagattgggaaaaggtaaacgaaaattacaaaactacttttaaaaagtaaggaataaaaaagctgatatcttaaaaatatcagcttttttattatccattaaccgctattataactgaaaaataaatgattctaatggtttaacagtaactgaagctttaccttcaccatttacaacctgcagaactgcactttttccatacaattggtcttttatagtataactttcgtctttcaaattccatttactgattatatctactggaattttcaaatcaaaactattagtggcttctgaagaaaaattagtgacaactatcaatttttcattatccgaccagcgaacaaaggaatataaatggttaggatcgtatccttgacctgcatgacggtttatctcttgaagatcttgaaactgccccatcactgccgaacttttcgcagagaaattcaacagtcttttataaaaatcacgtaactctttttcgctttgcgataattttccaccatcaaatgcaccgtcattcatccagcgctgatgatttggaacacctacataatcaaaaattgatgttctggaatgagagccaaatcctccattttcatttccaggctcccctacttcctgaccaaaataaatcataataggagctgcagtaatcatggcagaaactaccatcattggttttcctttttcaggagaaccggcaaattccggacttgctaatcgctgttcatcatgattatccaaaaatttcaacatgtgaatatcaatatcagctaacccgctttggatgtatgacaatccatccggaggtgtttttccttgaatgatatctttaagcttgtcataagtctctactttatcatataaataatccattttgcccaaatgaatataattgcggtattctttcggattgtacacttcggccattaagaaagcatcgggatttacattttttatggccgagttcatataactccaaaattcgtaaggaaccatttcggccatatcgtatctaaaaccatcaacacctttagctgtccaatacaaagcaatatctctgaacttaatccatgaactaggcacgcttttatctttccaaaaatcaaaatgttctttatacgatagcttatcatagccagccggtaattcaggaaaatcttttgaaccatcgggacgaacaccataatttactttaacggtttcataccagtcatttttatcaggttttgctaatcgggaaccatttcctgtccatttggctggattttcttcaaatttgccatcaataagcggattattttctccgttcaaaggtttgtctccgtcaggtaattggaaagacgtattcgggatataataaaaattattatctcttttgtattccgcagcaacatcatcatcagctccaaaatcttttacgccttttggattgcttttcccttcatatttacgggcaatatgattgggaacaatatcaataattaccttaaggtttgccttgtgggttctttttatcaatgcttcaaattcttctaaacgtttttctggatttacagccaaatctggattaacattataataatctttaactgcataaggtgaacctgccctgccttttaccacctcaggatcatcatttgaaactcctattgctgtataaccccttataactgcatgatgcggaacgccagtataccaaatatgcgtgactcccaaatctttaatttcatgaagcgctttatctgtaaaatcattgaatttcccaactccattttcttcaatagtaccccatggtttgttggttgtatttttgttaccaaacaatcgggtaaaaacttggtaaactacagctttattttcagaaacggtttcttttttttgtacactcatttttacatctttagttttacatgcagctgccataagcaaaacacttattcctgctattactattttttttgtgatcatttttttaaactataaaaaattaaaaaacatacaattgatactatatttatattcgcaatcaatctataaatttaatgtttttttcaaaaaataaccgccaaaaacctgccgcttcgggttaacttacggattaaaaaattactacaacgtaatagctaattcttttgtttataaataaatctttcgaaaaaggcctttataattctaatggcaaattattataaataaatcctaatatataaagggtttacctcatttttcataaatttacaaaaaaaataaaaccattgaagaaatctttatatttcattatctatagtttagtattacttagtgcaaatcttattttggcacaagctcccaaaaaaattcatgttgaacaatctgactttgcagatatggataaggataagtatccaggtgctcttttactcacaggaaatgtaaaagtaagccatgatggtgtgattcttacctgcaataaagcttatttttttcaaaaagaaaattatttaaaagcttttggaaatgtacaattagtacaaggagacactttgtatctgaatagtaattatgctgaatacagcggtgaattaaaaaaagcttttgcaaccggtaatgctgttatgagttctccagatgctacgctggcaactgataccattaattttgacagaaacgtgcaagaagttttttacaatacaaacggaaccatcatcaataaagacaatacactgaaaagtaagtccggaaggtattatgtaacccagaagaaatttcaatttttaacagcagtaacacttaccaataaaacatacgaaatcaaatccaaccacttggattattacagcaattcagggcattcttatctttttggcccatctacaatcactagtaaaaccaattacatttataccgagaaaggattttatgataccaaaaaaaatctggcacatttcttagacaaatcctatatcaagtatgatgatcgagtcataaaaggagatagcttgtattatgaccggaataaagaatttgcatcggcaacccgaaatgtaaaaataaccgattcgattaatcgtggagtaattcggggtcattatgctgaattatacaaaaagaaagattctatgtttgtaactaaaagagccttggcagtcaattttgtagacaatgattcagtgtatattcatggaaaaaaactgatggttactggtaaagaaggagacagaatcattcgggctttcaacaacgtccgtttttataaaaccgatatgagcggcaaatgcgattctatccattccagttctaaaattggattgacaaaattgataggaaacccaatactttggaatgcagaaagtcagattaccggtgatgtgatgcatctcattggagataaaaaaacacaaaaactagactctctcaaagtcctcaacaatacttttctggtctcgaaggataccctcgggactggctataatcaagtaaaggggctaaacttatttggaaaattcatagacggaaaacttcatgaagttgatattataaaaaatgctgaggtgatttattactcgcgcaatgaagccaaagaactcatcggaatcgacaaaagcgtaagcagtaaaatcaatattctttttgataaaaacgccatagaaaccataacgcgtttcaagcaaatagatggcatactttatcccgaatccgaattgccagaaaatgcaagaaccctcaggggacttaaatggcggggtgatgaaaggataaaatccaaagacgatgtttttagcaaagaagagaatgacgaggaactcaaagtcattgaagacactaaaaaagacaaagcaaaagaaagtgtcccaatgaaagtgcgaaaagaaactctgaattacgacaagaagaactcgaagaagtaatcagattgcagttttcagtccttatcttagacaaattaaacttttcggttaaaacaattttaaacctttacaaaagtgaatcctgatttcataaaataccaagcacaaacttcgccttacccattgggcatggaagtctcgcatgcaattggctcttatatttttgacactactaacaaaaaatatttagactttgtagcaggagtttcggcttgtacgcttggacatcaaaataaaagggtgaatgacgcgataaaaaatcaattggataaatattcgcatgttatggtttatggtgaatattcacaaagcccatcagttgaatactgcaaattaatggcctctctcctgcccgctccgttagacaaaacctatttggtcaattcaggcactgaagcaatagaaggcgcattaaaacttgccaaaagagttacaggaagaagccagctcatttcctgccacaatgcctatcatggcaatactatgggatcaatgagcgtaatgggatttgaagaacgcaaacaggctttccgtcctttgcttccagatattgattttataactttcaataacgaagccgatttacaaaaaataacgaccaaaacagcaggaatcttactcgaaaccattcaaggcggagctggttttattgaacctcacaatgattttttaaagaaagtaaaagccagatgcaccgaagtgggtgctttgatgatattagacgaaattcagccaggatttggaagaacaggtgctctttttggatttcaaaactatgatgttgtgcctgatattgttgtcatgggaaaaggaatgggaggcggaatgcctgtaggtgccttcaccgcatcctctgcaatgatggatttgttaactataaatccaaaattaggacatattaccacttttggagggcatcctgtcattgcgtcagcatgcttggcaactttgagagaattaactgaaaccaatatcattgcagctactttagaaaaagaaaagctctttagatcgcttttggtacatcctttgatacaagaaataagaggaagaggattaatgcttgcagctatgactgcaagtgcagacataacgaatgaagtgattctaaaatgccaagatcggggcttaattctgttctggctgctgtttgaaggctgcgccatccgaattacgcctcctttgactatttctgaagaagaaattcgagaaggctgcgctataattcttgaagtgatggacgaaatgatgatttaagattttgatttttagaaaatagaatacagattttagaataaagaaaagcattgtaattgatattgaaaaacctgttaattaaattgttcacaacaaatagaattcttcctcttttcaacaatacgtttccttaattttaatttaggataatttaaaaacacacagtatgcaattaagcaacgaagaagaagattataacttatccctatccaaatttgagtccatgttgaaaaccaacaaagtactcttttttgactccgaagaatttgaagaaattattcttcattatctcgacatgggcaagtctgcattggccaaaaaagcattaaaattagctttagaacaacatccaagatccagcggccttaaattagttcaagtagaaatgctgatttatgatgacaaactcgaaatagctgaaaagctattgaatgagctgtatgctatcgaacccacaaacgaagaaatatacattcagaaagccaatatttgctccaaaagggatcagcacgaaaaagctgttgaaatgcttaaaatagcattacaatacacagatgactatgccgatgtttacaatttaattggtatggagtatctttttatggacaatctagaattagccaaagaaagctttattaagtgtctcgaagaagatttagaagaccagtctgctttgtataatgtggtttattgctttgaatttttagaccaaaatcaggaagcaattacctatcttaataaatacatcaacaagaatccttacagcgagattgcatggcatcagctggggcgcttgttctatggcgtaaaagaatatgaaagtgctattcatgcattcgaatatgcgacactgattgatgaagaattccttggtgcttttatggaaaaagcaaaggcattggaacgcttaaaaaaatacgccctggccattgaaagctacaacagaacattggaactggacgacgctacttcatacgcactgctccgaataggaaaatgctatgaaaaattaggcaataaagttttggctcttaaatatttcaacaaaacggttcatgaagacccattgctagacaaaggctggattgcgattaccgatttttatgtacgtcaaaaaaactttcaaaaagcattgttttttgtcaataaagcattagcgattgataatcaaaataaattatactggaaacgatttgctgctattaacaagcagatgaacttttttgaagaagctgaatttggatatagaaaagcagtagaatttggcgattaccaacttgatacttggttattttgggttgatattttgcagtttttgggagagtttgaaagcgcaatacaaacattactgcaggcttctgaatattttcctgaagaaaatgaagtcgaataccgtttggcgggattgtattttatgatttcagataatatcaaagctaaatttcacttgagcaatgctttgcgtttgaattatgacaattacattctgctggaagatttattccctgtggtttgggagaaaaaaatggtacgaaattatattgacaaacataaaaaacaataatgattgaagttttaagaagacgttttggtttattgggtcgtaatattagttattccttttcaaaaggatattttacagaaaaattcagcaaagaacattttgaaggctgtacttatgaaaatttcgatattcaggaaatcaataattttactgaattagtaaaaaacaatcctgatcttaatgggctgaacgttactattccttacaaggaggccgtgattccttttttagacaaactatctaaaaatgccacccaaattggagctgtaaacaccattaaattcacaaaaaaaggaaaactaaaaggctacaataccgattattacggttttaagaaatcccttgaacctttattgcaacctcatcataaaaaagccctgattctcggcactggcggtgcttccaaaggagttgcctttgctttagaccaattggatattacttatacttttgtgtcacgcgaagccaaagaaaactgtattgattacagccttataaacgctacaacttttgataattatcaaattatcattaactgcacacctgtgggaacaagcccaaatgtcgatttatttccgcttataccgtatgaattctttactgagaaacacattgcttacgacttaatatacaatccagcagaaacccaatttttaagcaaagccaaagctcagggcgctcaaattaaaaatggtttggatatgcttatttttcaggcagaaaaagcctggaagatttggaataaatagaaagcagtctcgtaatactattttaaaaatagatttataaaatacaaaagccctcaaaatggagttccattttgagggctttctgcataaaaaaaagcgatgtagttatgaataactacaccgctttgaatgttttcacaacggaataatccttattgtgaattgcttcaaaattgtactgcaataatacaacaaaaaaattattatttgaatgaggttttccgtaaagtaattaatttccttttaattaaatttaaagattaatttagataacgagaaaaatcattataaaatatagtttaaaaatgaagaaaatattaggatgaggtggtgaaaaataaaaaagcaagggttttcaacccttgctcacaattttaaaagcaattcacaactatctattgtaatttaaaactttaaatagaatgaattaaagaagtcgacttaaaataagccagacaatagtttggacctattatctcacaatttctgatcatcaaatctcgaacttcaatgcaaatatagaaactaattttatatttacaatagataagaaataaatatttattaaatttgttaattataaagggacaaaacagacaagaatatgaaaaaaatattaggattagatttaggtacaaatagtattgggtgggcgttaaccaataatgacttcgacaataaacttggaaacattgaaggattaggcagtagaataatccctatgagccaagatgtacttggtaaatttgatagtggtgtttctatatcccaaactgctgaaagaactaaatatagaggaacaagaagattagtccaacgttttttattgagaagagagcgactgcatcgagttttaaatatccttgattttctacccaaacattattctgaagcaatcgattttgataaaaaatttgggcaatttaaacctgaaagagaagaaaaattatctttttataaaaatgaaaatggtaagaaccaatttttatttttagaaagtcaccaagaaatgctttcggaatttcaattaacaaatcctgatttaaaacaagttccctatgattggacaatttattatttaagaaaaaaagctttaaccgaaaaaatatccaaagaagaactagcttggatagtattgaatttcaatcaaaaaagaggctattatcaattgcgtggtgaagaacaggaagaaaacaaaaataaactcgaggaatttcatactcttgtggttgttgatgtaattgaaagagaaaaaggaaaatcaggtatatggtataacgtaattcttgaaaatggttggatttacaaacgagaaagcaaaatagcattgtttgactgggttggtagacaaaagaattttattgttactaccgaattaaatgataatggaactattaaactcaacaaagacaatgaggaaaagagaagtttcaggtctccaaaagaagacgattggggattagagaaaattagaacagaacaaacaataaatcaaagtaaaaaatcagttggtactttcatttatgataatttacttaaaaacccaaatcaaaaaataaaaggagaattagttagaacaattgaaagaaagttttataaagaggaactatctaaaattcttaaaactcaaattgaatttcattcaactactttaaaggatagaaatctctataaaaaatgtattgatgaattgtataaacataatgattctcataaaaataatattaaagacagaggttttgactatttgtttttggatgacattatcttttatcaacgtccgcttaaaagtaaaacttcattaatcagtgattgtagtttagaattcagtccaattaaagataaaaaaggtgttttggtaaaagatagcaatggaaagcaaattttaaaacctttgaaatgtattgctaaatcaaatccaatttttcaagaatttagactattacaatttgtaaaaaaccttaaaattttcaaaaaagaaatcgctaatgatattgatgtaacaattgattatttaaaagcggaagatgatttagtagaattattcaattggttaaatgacaaagctgaaatcaatcaaaaacaatttttagcgtatccaaaattcaaactaaaagaagataaatttagatggaattttgttgaagacaaaatatacccttgtaacgaaacaagaaatcaatttttgaatatcattgcaaaaattgatgttgataaaactttttttgacgccaaaaacacccaagatttatggcacattttatattctgttactgataaaattgaaattacaaaagcaattacaacttttgctaaacgacataatttgccaaatgaattcgtattgaatttttcaaaaataaagccgtataaaaaagattatggttcttattctgaaaaagcgataaagaaattattgactttaatgagaagagatgaaacttggagtcaagatgcaatttctgataaagttacaaccaaaataagtgccattaaagaaagattggaatctataaattatgacacatcgatacttgaaaaagtatctgacagtgatattccgaaacaagtcttaaaaagttttataaattgtattgaattcaataaaggtttaaatacctatcaagcatcctatttaatatatgatagacatagtgaagatagtgatgtttcaaaatggaaaactcctgcagatattgaacactttttaaagtatgatttcaagcaacattcactccgtaatccaattgtagagcaagtcattacagaaactttacgagtggtaaaagatatttggcaacattatggagggggaaaagaaaatttctttaatgaaatccatattgaattggggcgtgaaatgaaaaacaattctgcagatagaaaaagaattactgataatataaatcaaaacgaaaatacaaacttacgaatcaaagccattttaacggaattgaaaaatgacggtataaatgatgttcgcccctattctccaagccaacaagagattttaaaaatttacgaagaaggagtttatagcagtgaaatcagaaaagaaaaattagaggaagttgataaaatcagaaaaaatgcaaaaccaacaccttctgaaattatcaaatataaactttggatggaacaaggttatatttcgccatatacaggaaaactaataccgttgagtgatttatttacaacaaaatatcaaatcgagcatattattccacaatcaagattatttgatgattccttatccaataaagttatctgcgaatctgaagttaatgaacttaaaagcaatatgactgctctagaattcattcaaaaaaacgaaaatagaatcgtaaccttaaccggcggaaaaacagttaaaatttttactaaagaagcctacaaccaacatatcactagttattacagcaaaaataaaaacaagcaaaaacgattattaagcgaggaaattccagaaaagtttatcgaaagacaattaaatgacactaaatacataagtaaaatagtaaagaatcttttaagcaaaatagttcgagaagaagatgaacgggaagtaacctcaaaacatatcgtttctttgaatgggtcaatcacttcaagaatgaaacaagattggggtttgaatgatgtctggaataacataattacacctcgttttgaacgtttgaatgcgattactaattcaagtgattttggtaaattagaactcaaaaaagacgaatttggaaacactggaaaacaagtttttcaaaccacagtaccagatgcaattgcaaaaggtttttctaaaaaaagaattgaccatcgccatcacgctttagatgctttggtaattgcttgtgtgacaaaagaacatgtcaattatttaaattctatcaattcagaaagaacaaattattcattggtctctaaactacgcctaattgaagaaattcagattaatggaaaaacacaaaaagtagcaaaagaatttcacaaaccttgggagaattttacaaaaaaagtagaagacgagttgaatcaaaccattatcagtttcaaacaaaacactagagttatcaataaaacgataaacaagtatcaagtttggaaagaagaagacggtgcaatgaaaaaaatcacaaccagacaagtaagaggagataactgggcgattagaaaaccaatgcacgcagaaaccgtaagtggaaaagtattcctaaaacgaattaaacaaagtcttattactattaccaatgctattgagcaaatagagttgattgtcgataaggaagttaaaaaacaattgaaggaaaaaactgaaaaatatccaaacaataaagaaggtttgaaaaaataccttaaagctttccctataataattgatggaaaagctatagataaagtacaaatttatgaaactattggaggtgaaaatggagcaactgcgacaagaaaagcacttgatattacttttgatgaaaaaagaatcgagaaaataactgatactggtattcaaaaaattctattaaatcatcttcaacaagaaatttatcaaaatgcaattgatgaaaatggtaaaaaaaacccagcatacgaagttgctttttccgaaaatggtttagatgagttaaataaaaatatcacggctttaaataatggtaaaaaacatcaacccataaaaaaagttagagtttttgaagagggtggcaaatttagtctcggacaaacaggaaacaaagcaagtaaatatgttgaagcggccaaaggaacaaacttatttttcgcaatttatcaggatgaaaacggaaaacggaactataaaaccattcccttcaacgaagtaatcgaaagacaaaaacaaggattaagttctgctctagaaatagatgaaaacggaaatcgtcttttatttactttgtctccaaatgatttagtttatataccaacagaagatgaaaaggataatttaacgctcctaaatttcaataaactatcaaaagagcaatcgcaaagggtatttaaaatggtaagttttactggaaatcaagccttttttgtttcaaacactatagcttcatcaattgtagataaaatggaattttcagccttaaataaaatggaaaaatctattgaaggattaatgataaaatctttatgtctaaaactagaagttgatagacttggaaaaattaaaagaatcattcgatgataaattattattgcaagaatcaataggaatgggttttaacccattcaacaatgtaaaacaatccaaataggctttagccaaaacatttcggctaaagcctaattagagaccaatttaaaatctctccatttgaaaatggaggcaattcagaaaaaataaaaataatcaaatgacaagaggcaacttcctaagaaatttaattggcttttatggcattgcttcccttccactggaaatggtcaagcaataccaaaaagtttatcttttacaatgttttgtaagagggtttcaatattatgaaggaccaaaaatagttaatcaaatcaacagtagtggtttgctcgaaatggttcatgaacccgataatgaatacgatccttgtgcgatagcattgcatttcaacaatcaaaaaattggatttattccaatggagagcaatgaagtgttgagtgttttactcgataccaaattattggatttacaagccgaaataactcatatagaacctaatgcttcggattgggaaagcatatatgttgctatttatgcaatgaccgaaattaaagacaatcaaactcaagaaaatattgaaccttacaccctactggaaactcccaaatactatacgctaaaatcaaatcacaacacctacacaagaatatatcttgatgacgaaaatgaaattttaaacggcgaacagttttatgaaactttagttaataatagttctaccgatatcgtttatgatttaatccattattcctttgacaacggtcaagaaatggaaacggtaataaacgaatccagaatggtaatccaaaagaattccattccaaaagacattgaagtttcagatctggaagctacattaaatgataaaatactaaaaatagaaaatgtttttgacgacgatggctatatcattgccaatgtcaataaagtggcaacaatcccagaccgaatacaaatttttgaaaaattaatgaacaaacatggaaaattattttacgaaattattttcaaaaattaggtgagttcaataggattgggctttagcccattcaacaatgtaaaacaatccaaataagctttagccaaaatatctcggctaaagcctatttaaaaatcaattattatattcctccagctaaagctggaggcaattcaaaaatgagcaattgaaaaataatatgcaatttaaataacctattatgccttttatcaaaacctacatccattttgtttggagcacaaaaaacagaattccttttttggacaataaagaattaagacaaaaagtttggcatcatatcaaagaaaacgccaaagagaaaggaatttttgtagattttgttaatggatattctgatcattgtcattgtctggtttctttgggtgccgatcaaaccattcaaaagacaatacaactgattaaaggagagtcttcattttggattaacaaaaacaaattgtgtttagataaatttaaatggcaagatgaatattttgcggtttctgtctcggaatctatggttaataaagttagaaattacattaaaaaccaagaagagcaccatagcaaacaaacctttcaagaagaatatgatgaatttatggctaaatatcaatttcaaaaagaatagaatttggctaaaaccatttttaaaaatcaattatcatccctccagctaaagctggagggaattctaaagatgtaacgattataaaattggaatgaattcaaaaaatcaaataggattgggctttagcccattcaacaaaatataaaataatcgagatgggctttagccaaaatattatccctccagctaaagctgaaggcaattcaaaacctagaggcaattcaatgtttttttaaatctaaaaaatgataaaacgaactcttttcttcggcaaccccgcttatttgagcaccaaaaatgaacaaatcgtaatctcttaccctgacaaggaacaagagactaaaaccgttgctattgaagatattggcgttatcgttctggaaaaccaacaaattacaattaccagtggtttactcgaaaaactgactaataataatgtggcattgatcaattgtgaccaatatcatttgcctattggattattaatgccactgaacgggcatacggaacaaacggagcgatttaaaaaccaaattaatgcttctgttccactcaaaaaaaacttgtggcaacaaaccattagtgccaaaattataaatcaagcaggactgctcaaagaaaaaggaatcccatgccgaaaaatggaactttgggcaaaagaagttacatcgggagattcactcaatcatgaatccagagcggcagttttttattggcagaacctcatccctatagaaaatttcaccagaggacaaaaaggaattcctcctaataatttattgaattatggctatgccattttacgagccattacggcaagagctattgtcagttctggaatgttacccactttaggcatctttcatcgcaacaaatacaatgcctattgccttgccgatgatattatggagccttatagaccttatgtcgatttgattgtttgtcacattatggaaaccgaagatagttatgacgaattaactatcgaaatcaaaaaacaattgttaagtattgccactattgatgtgtttatagacgggaaaaacagtccattgatggtcgcaatgagcagaaccacacattccttacatgaatgttttgaaggaacagcaaggaaaattttataccctgtttatgtatgacgaacattatacccgtttaaaccaatatagaagtttgtggatattagtcttttttgatctgcccaccgaaacacgcaaagagcgtaaaattgccagtacatttcgcaagaaattattagacgatggttattctatgtttcaattttccatctatatgcgtttttgtgccagtagagaaaatgccgaggttcacaccaaaagaattaaaaacaacctccccgaacacggcaaaattggtgtgatgcaaataaccgataaacaatttggaatgatggagcttttttatggcaaaaaaccggtagaaactgataaaccttcacaacaattggaattattttaacagcaacaggattagaaaaaagactaactagctgtactacaacaaagaaacaccgcttcatttcaatttcaaaacaaactcataactaccaacatatcaaacgattaaatcgcggtatgttgggaattataagctaaaatacaattttgaaagcaattcacaacggaatatcaatggactaaaaaatcaggaggttgggaattataagctaaaatacaattttgaaagcaattcacaactgctttggcgggaggttctgcaatgcagatgttgggaattataagctaaaatacaattttgaaagcaattcacaacagttgcgttactgctcacggctaaagacgagttgggaattataagctaaaatacaattttgaaagcaattcacaacaacggcatagatctagttaacaacgcatctgttgggaattataagctaaaatacaattttgaaagcaattcacaactagtggaggtttatgtattaaacaatgtcagttgggaattataagctaaaatacaattttgaaagcaattcacaacaatgagtcctgctacagcgttgcaggatgggttgggaattataagctaaaatacaattttgaaagcaattcacaaccgcccgaacgcccatctttaccgtaatttgttgggaattataagctaaaatacaattttgaaagcaattcacaactgaaagcggtaaatggctaggaagttcttcgttgggaattataagctaaaatacaattttgaaagcaattcacaactcatactctattatgtggaaattttaaaagttgggaattataagctaaaatacaattttgaaagcaattcacaacctacaatgacttaacagttgccgagtattagttgggaattataagctaaaatacaattttgaaagcaattcacaactagaagttggtgaaatttgactgaataaaagttgggaattataagctaaaatacaattttgaaagcaattcacaacactctctaaaagctttaaataattgctcttgttgggaattataagctaaaatacaattttgaaagcaattcacaactgactcaggcttataacgatttagcggttagttgggaattataagctaaaatacaattttgaaagcaattcacaactttaattgtatcaaagccgatttaggcattgttgggaattataagctaaaatacaattttgaaagcaattcacaacttgcatcaaaacttcaaaaagctaatccataaactagaatcaaatcaaataacgccttaaaagaaagaattttccgcataactagactataaataaaacttttattttgtattctgacgcacctttagtatctttcgcattcgaaaaataaaaaccttatacatttataaaatgttagaagaaaagaacgataacctgtcaattcaagaaaatttgacagatggaaacacaactaatgaattgcaggaaacagttcaatcagacgcgtctgtagcagcagaaaatgtaatcagtgatgctgtagcagaggaaaacacagtagatcctgtttctgaaacagttatttcgaatgaaagcgaaacagacgaaaagcaaaatgcaattgatgccatagcagagacaaatgctgaagaaagtgaagatgaaacgttaaaagaacgccatgatattccgatgcttgattatgaagcattaccaatggatacgcttgtaagcgaactgaagaatttggttaccaatgaaaaagtaatgtctattaaagaacatgttgaggaaatccgaaaagcttttttagccaaatacaatcaccttatcgaagagaaaagagaagaattcaaccaggaaaatcaagatcctaacgaagaatttcaatatcattctcctttaaaatctaagttcgaccaatattacaccatcttcaaagacaataaaaatgttcattttaaaagtctgcagtcaaatctaaaaactaatttagaagttagattagccatcgtagaagaactaaaagaattaatcaatccgcaagcgaacatcaaggacactttaaatcattttaatgaattaagagagcgatggaaaaatgctggctctattccaaaagacaaatacaatcacgtttggaataattaccatttccatgttgagaatttttacgattacctgcacttagacagagaagcaagggatattgatttcaaatacaatctggagcaaaaacaaaaaatcgttgcccgtgttgaagaactgcttaaagaagctgatatcaataaagcttttagagagcttcaggatttacaccgcatctggaaagaggatattggtcccgtttccagagaatatcgtgatgaaatctggaatcaattcagcgaactgacaaaaaaaatgcacgataaacgtgaagttttgtttgagaacttaagaggaaccgaacttgaaaatctagaaaagaaaaaagaaattattgccaaaatcgaagtattggcaaccgaaaaagtgaatgcccactctcaatggctagcccaaatcgaaaaagtggaagccttacgttcagaatttttctctgctggaaaagtaccttcggatgtaaatgaagccacttgggccgctttcaaaacagccgttagaaacttcaacagctttaaaaattctttttacaaagacatcaaaaaagatcaaaacgataacctgaacaaaaaaatcgctttagtaaagaaagccaaagaattacaggaaagtgttgattttgccagtactactcctatcatgaagcagattcaggaagattggaaaaaaataggccacgttccaagaaaatattcagacaaaatctggaacgaatttagagaagcgtgcaaccattatttcgacaaattaaaagaacacaaaagtgttgaaaatgttgacgaagtagaagcttttgataaaaagaaagcctacttggaaacgttgagagaattccaattaacaggagatcacaaaactgatttggatgccatcaaactacatattgaaacttggaaaaattttggtaaagttccgttcccaagaagacatatcgaaggaaaattcaacaaaattctggatgctttatttgaaaaattaagcctgagcaaaaaagataccgaaatgatgcgtttctccaacagaatggaaaatctttctgaaagcaatgacactagaaaactggacaacgagaaaattttcctaatgcgcaaaattgaagaggttcaaaacgaaattttccaactggaaaataacattcagtttttcaccaatacaaaaaatgcgaaaaaagaaaattcaatcgtattggaagttcgaaaaaacattgctattcacaaagaaagccttgatgtttggaaagaaaaactaaaacaattgagaaatttaggtcaagaatagatcctaataaaattcaaaatgacttaatgtctaattttttaatcctttaaagttaacttaattgtcatttaaactcttagtaacttattatccagctaattataatctaaaaaaaccagcctcaaaccttaatccgtttgaggctttttttatttcatataaaaaagaagacgtttattttgtggatttatcaaacattcttctgtgcagcttattggaaacaacttaaagcagattaggtacaatttcaaaagttgaaatagagctgattcataaagacactatgaaaaaaaaatgattccaatttacaatattgataatcattttttagactttaattgtttatttgaagatcataaactggcaaaaaaatgggttgttttaatcaatgaaagtatataacaaatctacgaataggctcaaaagagcctgtttttcagtatatagctacaaaaaaatatgacaattatcattttaatccataaaaagtcagcctaattttgtcatttacattaaatgcgaaattatgaaaacttcactaattcaaaaatacaatgtacctggtcctcgttatacaagctaccctacagttccttattgggatgagtcgggatttaccaatgaaatatggcttcaaacccttaaaaaatcatttctggaaagcaatgacaaagaaggtattagtctatatatccatctgcctttttgcgaaagcttatgcaccttttgcggctgcaacaagcgcatcaccaaaaatcacaatgtcgaaaatccatatattgaggctgttctaaaagaatggacgctttaccgcgatatcttaggcaaaaaacccaaaattaaagaaatccatttgggcggaggaacaccaacatttttctccatagaaagccttgaaaaattaataaacggaatattttcactagccgaaaaagctgagggttatgaattcagttttgaaggccatcccaataacacaactcttgcccatttgcaaaaattatatgatttgggtttcagaagagtgagttttggtgttcaggattattctgaaaaagtacaaaaagccatccatagaatacagccttttcacaatgttgccaaagttactttttgggcaaaaagaataggctacacttccatcggacacgatattatatttggtctgccttttcaggaagtagaagatgtgattgataccatcgaaaaaacaaactctctacagcccgacagattagcgttttacagttatgcccatgtaccgtggataaaaggaaacggacagcgcggttttcatgatgaggatatccctaaagacgatgccaaaagaaaactatacgaaattgggaaagaattactctttgaaaatgaatattatgaaattggcatggatcattttgcattaaaatcagacagtttataccattcgtttgaagacaaaaaactgcaccggaacttcatgggctatagctcatcaaaaactcaattaatgattggcttgggtgtttcagcgataagtgacagctggtacagctttgctcaaaatgtcaaaactctggaagaatattacaaaatattagaatcagataaattaccagtgtatagaggtcatttattatccgctgaagatctgattatcagaagacatattttgaatctaatgtgccaatttgaaaccagttgggatgattccgataattatgttccagagattcctgaaattttacttcagctagaagaaatggaaaaagacggtttactaattataaacgacagcaaaattattgtcaccgaaaaaggaaaaccgtatgtgcgcaacatctgtatggcatttgacttaagactaaaaagaaaaacgcctgaaacgacattgttttcaatgacaatttaaaagaagcgaaggataataccaatcctttaaaataatgacttcttaatttattaattcatctgttttttaaagctctttgggcgtgtccctccgtaaaaactacgggtcgtgctgtacgttcccgctttttttctttcaattgccacgggtttaaagccgtggcaattgaaagaaaaaagagttccactgccatcactcacgcaaaaacagagaacaattaatgtaataccattttagaaatataaaataatccgcttctaactccctgtcctttggagagggttggggggaggaaaaaaaagccaattaatggcaattggctttttcttgtataaacaaactcatattagatggagagacatagggaattccaagtcctaaacccctcagaataaacaatacgcctataataacgccaacatacggaatcactttttgaatcttgtttcggattcgaacggtcagaaatgaattgatgtataccaccaaactcatcaaaggcacggttcccaaaccaaaaagcagcatgtacagcagtccaaagcccgcactctgcatagcaattgctccaaataaagcaacataaaccattccgcagggcaaaaaaccgttgagcaaaccaataataaaaagcgatttgaaacttttgtttttaaaatgactgcctagattttgcttaatttttgaaatccatttataaaccggtttagaaaaattatattgagccaaaatcttttcaggagtcagaatcactaaaatcatggcaataccaataaatatggacaattgttgctgaatccctgccaaaaataagccttttcccaacaggccaaatagcagccctatgcttccatacgccattaagcgtcctaaatgataagtacaaatttggattacctttttggtaggattatttcgctctacaggcagcatcatagcaatgggaccgcacattcctatgcagtgaaaactactgattaatccaaacaaaaaagcagtgtaaagcatgcggattttagattgctgattttagactttagattgcagattttagagtgaaattatttaaaactaattttacttttccctattttctttattctattaactctactctattttctttctatttaatataaatctcttctttagtcaaataggatttaccttcatatttccattccatattgatattccattcgcctccaataaacttattttttggtataaccaatgaagccgaatcagtaaacgaaagtggcacttggaaatcaaattttttattagaagctctataaaacgcaacagtccctttgatagctgaaggagtaaaatcagcaggaaaaacaatagtaataccattagtagcgtcaactgtgattaccggcttggtttttaaatcatgagcgttttgaatacgagccatttcgtcctgaaaatgcacatcatgtttgtaatactcttcaactaccaaatcattatcatacttactgtccgattgtacttttacaacaaaatacataataaagcttatgaataaagcaaaagcaatcacgatataagttccccaattaa

SEQ ID NO: 1082 - DNA, 24599 bp, synthetic construct
  source 1..24599: mol_type = other DNA
  misc_feature 1..24599: note = Synthetic
tatgtgtatgttaatccaccccttacatttcgctgtaaacgttcttcagtggtaatgtttcgtgagagttgttcgttatatgcgtagctaactgcaaagtttgatatactatatacctttggtttactatcggctttgttaattctaacgttggttaggttaatgctctttcttcgcgtataatcctgcgatatttttttaatagtatcacgctctgctctgcttgttgctctttctattgattgtttaagcgtaatatctgggtcaagcggattgtactcagggtttgcaaacgactcggaaaagccaacgaataagggaatattaacgcccgactcttttgggaagaatcggccaagttgaatggttgtatttaggtcgtactgatagaaatcctcaaggctacgatcgttaacttttttctctatcgaaccaaagcctggcttaatggttgttcctgcaatggtaaccatacccaaatcggctagtttagcagctacacgggcattggccgcccagccacccttactgtccgattgggaaagcctaagttcgtttacccatataatacccgcttttgcatatccgtcatcattgggattgctgctgcctttggggtttctaacaccaatcataagtactcttacattgcttagggatgggtttccgcttacccttacctttcggtttccgtcttctactgtatatactgtgctgtaggtaataagcgaacctgctttgcgcatttcatcgttacgctggagtttaacgttagtgaacagctccagatcgatgtccattacgttttcttttggccaaacaatttttctttggctctctttgttggagtatcgtcctgggggcgttagtacaagcggtatttcgtattcgtagaagttgttgctataatcggtacctagtcttatgaataccgaaagttcttcatccctaagtggatatccaagtatctcttcagcgtgaacgtccatcatcattcttcgatactgacggatatcgacactaacgctcttaaatacggctctagcatcgccatcggcgaggtcggtaaccttaatctccatcgattgctcattaagctccgttagctggggttgacttgggtcaataactctatctactccaggggggagaacatagttgacaggtgtacgtgtgttgttctcttcaatgtttacaaccgaaacctcaaagtttccgtcgggcatatcggatacgggcataccttcttgtccttgaattagggagcgattgtactttcgccattcgccacgaacaagttcaagggttgcaaaccttagtatgatggtatcagagaaatcttttaggaacagtcttataaagcgaaccgatttaaaatcttgaatccctccgaaatttccttcgtactcgttaatgggaaccttaaactggtaccagttaacctccgatcgatttccgttagcaagttttgctttataggtaactttatcggttataaagttagacccaacctcaaaatcttgtggtctaagcgatacgcgatactggaagtacatctcatcctcgtttaggtttgtatcggtatttatgtcctcgccatcgggtttgtttccgcttgaggttgtatacgattcaacaatcccatcaggtgtaggctttccgtcgggggttgcgttcccctcggctttgttaaaccgtttataccggtcgagaatccctgtttcgtttgaatcgtagatgctcgattggtagtacctaaagttatcgttcgatggatcttttaatgcatcaatgtacacctgtgatgattctccaaactggatctttaaagcttcaaggtaagcagcaaaatacgattgctcatcaacatcgcgtaagccatcaagtcctatgtcctgaaagcgccgggtgtttggatcggtatcaaacacgttatccagcgatagcactgttggaactctgccccatgcagtagtatctacgtttgtaataacctctgatgtgggtagcccgctctcgaatgccctttttccatcctttagtacatcttccgatatttcgccaaggttaatgtaaagatctccaccaacatgaagcgaatcgtaaacaaaaggatccattaaccagaattcgatgtactcgatatttgccgtttcaaagtcgggtgatgttatcggacgggtaataccagcccacatctgctcagggttttgaaagaaaccatctgcatttatatcagttgaattaaagttgtagggccctctttcgttaggatagtatgcaaggtttagcacggggatattggttggcattccctggggtgtattccggtttgggaaaatttctcgttcatatatttcccgcacaaaatggctactctgactttccggatcgcgacggatatggccaggggtaagtgagttgttgcgtaagaatagaggatcgatggtataccatgccaataacgctctatcaaaaccgtattgaagatcgtttgacaggtgtgcattgggaaataaactgggttgatgttgtggtgcactggctattgaccaagcataccatgagcgaagatcaatagatgttttgcttccctcaaaatcgtcgatgtaaacagtaccgcctttaccaactacccttgaatggccaggaataaaatgggcaaattctgcatcaaccgtaatggtggacttttctttcgtttcgataaagggtaaaaagtcaacagccttcgtcagaaaactcgactctgtttggtaagaggtgttcaatccccaaatagtgttgctaatcgcctcgttgccatagctaagtttttgggttaatggacgttcagttaagttaagaacggtggcacctacgttgaatttatcggagaatttataatcgaagtgtgaacctaccagcgtttttgattggagattaaacatatcctggctttcgagcgagatctgtattggagtgttcgactccaaaattgaaaaattcacaatcttaacagttcccataatgtagtccacagtatagtcggagccctccacaagtttagcccccccagcggtaaccacaactgagcctcgaggtacattgactgcatttagcgatatctcggagctcgaagaggattggtaggttccggttatgctaaacttattcttctcagccatctgccgggctttagtttgtgtagagtcgtatagctcttggtaaacgtatcgttcaaccaagttgggatcgccaatttttttggccaaatccttaccaaatggctcaagtacaggaaaaattattcgaccgttggatgcattgattgtaatgccctcaataaagtcgaacataccatcggaacctggatcgagattggagtttaggttatcgaggttcagaaccgataggagaggtttattggcaacatttccctctggaaggtaattgattgaagtgcctgtttgatcgttttggaaaagaatatttaggttaaagtcggttttatcaatctgatatgagttcatggagtagatattcttcatcatcaaatcccatgttgggagtcggggcgataggtttgtaccctttagtaactttacgattagcgcactgggcgaggttattccatcggtagagaattcgcccacttggtaggtttttccgcctagggtgtactcataggctacggcaagaatctcatcgccatttagcgaggtgtttatggagatatatcctagctgagcgttgagtgtgtactcggatttactaagtcttcgggcgttactcaactttgcataatcaacccctccgctaaagtttgctaaaccagaaagtatttgtgttgcattggatatatttctaataccactgtatgagccagtcatttgggcgtataaattgtttaccgcgttgccagggctttggttgtaaccacctattagctgatcaaaaagatgacttgcattaatattttgctgattttcacccagatcatgaaaggcaatcacatcccttgtctcctcaaaatcgtttcgcttgttggtcatccacacctcaatgcgggtaatgcttactccactatttatgataggcaggttttccagtgattggttgtatgtatcgcggaagtagtgcgacaggaaaaagtgcttattggcttcgtatgcatcggcttgtatatcaaattctttggattgtgctccgccccgaacctccatcacctgactttggctattctgttttgagaagatactggttacggttaaccgtccgaatctgagctgagtttttaaaccaaaaaggctatgactgcctgtgattagagtgcccggtaggggtagtgatacgttacctgcctcaattttttggattatttcatcctcaaaaccggtgtactcgagcttaacgttattctcaaaatcaaaggtggcctcggtgttgtaatttacctccatgcgcaacttttcgcccacagtaccgctaacgttcatctgtattttcgactgaaagtcgaaggtggtattcttccttaagtcttcagatatttgggggttttgggtatctgaactggtaatgccaaaaataagctcagccgatccctgcgggataatctcaataacattgctcccaaaaatacgatcaaaagtttcgccgccaacctgtaatcttggtaatatacctgagccacgtgagcccgtttcgcccctttgcctttgttgccagtagttgcgcatcgattgttcaaactgaaactcgcgatactcgctttcgctcattacctttggtgtgcgaatgttcacgttccccaccttatagtaaattgtgtactgcttagttaccggatcgtatgtaacctcggtggtgatattctgtggtgacgacatgaaaagcggagaattctcctgtaaatcttcgttgcctggtattggaaagggtaaagtggttgtatctggggtaagaatttcagtataacaggcaatattgcctgttgcaaagctattagccttaactgtagcagtgaaaagcaatagcaaaccaagaggaataatcggaaggtttagtaaaccttttatgagtgaactttcagagtatctcaaggtaaaaacattaataaattacggtgctataaaccttttaacgcattcttaacaattccctctactgtttggctagggttactcttcagaatttggttaatagttttttcggcaacagttttagaaaaacctaacataactaatgcagataacgcttcctggtggatggtattgtttgctgaagcaaaaatatctagttcgctgcttccctttgcaattttatcctttaagtcaataacaatgcgctgggctgtttttaacccaatgcccttaacctgtttaagcatattaacatcgccttgggcaattgcctgaattatttctgttggtgcgagcgacgataaaattatgcgagccgtatttgcacctacccccgaaacgcttattaaattccgaaaaagttcacgttcttctttgcttgagaatccgaatagcaaatgtgcatcatccctcactacgagatgaaggtataacgttgcctccctttttccctcgagttgtgcaaatgtattgagcgatatatttatttgataaccaataccaacggtttcaataacagcatacgctggcgttaggtcggctaagtttccgctaataaattcgtacatagtttaaggttttaaaagttactcttgtttcgaaattttaagcggatctttggttagctcggcataggtttgcctgtttttgaaaatatcgagcgcaaggaatagggcatttcgaaacgagttttcggatgcgataccctgtccagtaatttcgaatgcagtaccgtgtgcgggcgatgttcttacaatgggaaggccagccgtaaagttaactccgttttcgaatgagagcgccttaaatggtgttagtccctgatcgtgatacattgccagaatggcatcgaatcgcataaaactctccgagccaaaaaagccatcggaggagtatggaccaagtgcaagaatatcctcgctattagcctgcttaatggctgggataataatatcttgttcctctttacccaaaacgcctccatcgcctgcatgagggttaagaccaagtactgcaatgcgggggcttctaatgccaaaatcctttaataggctagtgtttagtagcctaagtttttttatgataagttcctgagtaatgctttttgatacttctgatatggggatatggcctgtaaccacgccaactctcattaaatcgcttaccaaaagcataagcacttcacttgcaccgaaggagtttgccaagtattccgtgtgcccaggaaattgaaaattagccagctttacattttgcttgctaataggcgaagtgattagaacatcaattctcccttttttcaggtcggctatggcagcttctatcgattttattgaaccctcgccgccaaactctgtgcttttgcccagttctaccctaacgttatcgtccatgcagtttatgatgttcgatcgtttggtatttatctcactaacatccttaatctgggtaaagttaaagttctcaaagttaatagccttgcgatggtatgctgccactttaggtgaaccgtaaaccacaggtatgcaaatttcgttaattcgggtatccgatagtgttttaataatcacctcgtagcttatgctatttatatcgccttgggttatgcctacaacaaccttattgtcaatcatttgttattgagttattatgtacaggggttaaatctgctattatgctcattgttaaacaggcaaagatagtaaattggcgttaagtttaaataggttacgccaaaagtttgtttggcattggttggggctaatggtaacgtttttttacctttgtgtgatttttgcaattaaaatatggagttaaataatatttattcaaaagcccttaaaggccaatttttatcaaaccaggagggtgtttccctctactgtaatgcgcctttagcaaatttgatgcttgtggcaaacgagctaagaaaaactcaaatcccagggaataaggttacttggcaaatcgataggaatgtaaatattaccaatgtttgtattgcagggtgcaagttttgcaactttcactgtggcctaaacgatgatagggtatatattacaagcttagatgaatatagaattaagattaacgagatgctgagcatggggggtgagcagttgctattgcagggagggctccatccaaaactgggtttaggcttttataaagatcttttttctgctctaaaaaaagaatatcctcaggtaaagcttcatgcccttggaccacccgagattgcgcatattgctaggttagagaagatgacaaccctagaagtacttaatgagcttaggagcgctggcttggagagtttgcccggagggggagccgaaatattggttgatagggtaagaaaaaaactctcaccaggtaaaccaagtgccaagcaatggctcgatgttatggctgaggctcaccaaatggggctgctaacaactgctaccatgatgtatgggcatattgagacgattgaggaacgaattgagcatttagttaaaatccgcgatttacagagccaaaaacccaataatgcaattggtttttcggcatttatttgctggccataccagtcgaaaggtacaaagttggagcaaatgggtgtaacctcatccacatcaatcgatgagcacatacgcatggttgctttaagtcgcattatgttgccaaatgtaaagcacattcaggcgtcgtggttaaccgttggagttgatgcagcgcagctgtgcctaaatgctggggcagacgatatgggctcaataatgattgaggagaacgtagtatcatcggcaggtgcaactaactggcttgatgcgtacagcatgcaaagaactattgtcgatgccggttttgagccccaactccgtaaccaggcgtatgagcaaattgcattgcccggggtttatttgaggtaaggtgagtaaaaaaatagaatttatgtccaatactcagtacttaactcctggggattactttcacatctacaataaaggtgtgaatgggataaatcttttttataattctggaaattatgaatatttcctgaggttgtacgaacagcatattaacccagtagccgatacgtttgcctggtgtttgctggggaatcattttcatttgttagtgaggataaaggaggttgaggaggtggattttgaggggataattaatcggggagggaaaaccctgtcagggtttcagaccctgacagggatagaacaggaagaaaagttagcccaatttgcttcaaaaagtttttccaaccttttcaatgcatacgcacagggcctaaacaagcagcgcggccgcagaggaacactctttgaacgaccctttcgccgtaagctggttgacagcgaaagatactttaggcagcttgtggtttatattcactccaacccagttcaccatgggtttaccgataattataaggattatccatggtcgtcgtatggtacaatagtatcagcaaaacccactaatttgcagcggaatcagctgctggactggtttgacgggcagggtaactttgtagctacacataaacaaatagttgactttaattttattgaccatttgattattgagtagtttatatcttactgcgaggttgtgagcatgcaccacaagccattgaggttttaaaaaaaacaatatatattgcttgcttataacgttaaacagaaacgctttacgattagggcatagtggaattgaaataagggtgtacttcgagaacctcagccaccgactttaaatcagcccatagtggtattgaaattttaaaagcataacagtgagaaatttttgaattttgacaagccatggtactatgccaaagttgtaaatgtgtcccttgtactgtaatgttttacagaaatatttgattattagctgttgccgccgtatatttgtagtcaaatgtcgaacctgcgggttgggcgaacccaaaagcgaatattgtgaaagcggtactcgcttttgccttatataagttctccactcgtgtttattctaatttaatacttcaactatttcaatccctccagaactaagtggcatgatacctacagcatgcaaaaaacaattaccgatgcaggttttgaacctcaactccgcaaccaggcgtatgagcatattgcactgcctggggtttaagttagggtatgggttagatatagagttagttttacattcaactttttgatgttcatgtagctatttactattctcatggaaaagtatccattcaaagtatcttgggatggtagttgatgctaatattagatatctttatattttagtagatttttactttatcatatatagccatatcttattagggtagatgctttttgataaataatgtgtcctaaaaaatcttatatagtatccgttctattttttaaataaaggagctaattacatttagacatatttgttttgtctaactttaaaaacagaaaactaaactgttttcaatggatgagcagaagccgcatattacagttaatatctcgcttgcgttcgccttttggagtgatgcttaccaagttatatgcacttgccgacattgacgacctctcagaaatgctctacaatcagttactcatatgatggattgagggagtgtataagaaggaaactattgcaatgtgggagtaataagaaaaagggggacgcgtgccaatagtaaacgatttaaaacatggcactaattttatataaggggattacaaaacttttaggcaaaaaaatacccccgtattgtaagacgagggcggcttaaatgttttcacaacggaataatccttattgtgaattgcttcaaattgtaatacaaatatataaccttaaaatctaaaaagcaacaagctatgaaaaaaatattaggattggatttgggaaccaacagtattggttgggcattagtaagtgcaaatgaagataagcaacccaaaacaattgaagggattggaagcagaattattccaatgagccaggatgtgttagggaaatttgatagcggaacatcagtttcacaaactgccgaaagaacaggctatcgcggaatgcgtaggcttagagaaagaaacttactgagaagagaacggctgcatagggtgcttaatattcttgattttctacccgaacactacaaaaaatccattggttgggataaggataattataaaacatttgggaagttcattgatgacactgaaccaaaaattccttggaagaaaaatggtaatggagattatgagtttattttccaatcctcatttaatgaaatgcttaatgagttttcactacatcacgccggcattctaacaaacaacaaaaaaataccatacgattgggttatatattttttacgcaagaaagcactgtcagataagatttcaaaagaggagttggcatggattattctaaactttaaccaaaaaagaggatattatcaacttcgaggtgaggatgaggagagtgggaataagaaagagtatgtagttcaattgttagttaatgagattattgaaagagaggttgacaagaaaaatcctaaaagaaagtggtacgatgtaaaacttgaaaatgggtggacttattcttcaaccttttttacgaaacctgagtgggctggtttgagcaaagagtttcttgtaaccgaagaggttgatgaaaacaatgaggtggcaaaaactaaggacggtaccccaaaacgtaaattgagtatactgccaacctttgatgaaattgacttaatgtcccaagccgataaggataaaatttacaagaagattaaggctaaaactgaagcaaccattagcaatagcggtaaaacagttggttgttatatttatgatagtttactggctaatcctagtcagaagatacgcggtaaactgattagaacaatagagcgtaaattttataaggatgagttaaaggctatccttgaaaagcagaaggagtttcattccgaactaaaaaatacaaaactttacagtgattgtctaaatgaactatatccgagcaacaaggcgtatgttaatactataagttctcgtaatttcacttacttatttgttgatgatattattttctatcagcgacctctgaaaagcaaaaaatcattaataagtgattgtccatacgaggagagagtttaccttgataaagagggcaacacgcaaaaatcatcgttaaagtgtatagcaaaatcacaccctctatttcaggagtttcgcctttggcagtttattggaaatttgagaatttacgaaaaggaaaaaaacatcaatggagtccttaaaaatgacgttgatgtaacccctgagtttttaaaagatgaagacgactatgttgccctgttcgattggttaaacaataaaaaagagattaaacaggatacacttttaaaatatcccgcatttggtttaaaaaaagatgctgtgaagtatcgatggaactatgttgaggataagccttacccatgcaacgagacaagggctctaattatgagcagattagagaaacttagcatagcatcagattttttaacaaaagaaatagagttaatgctttggcatattctttactctgttgaagataagcatgagattgaaaaggcattacgaacattttctaaaaaaaatggattagatgaaggttttgttgacctttttaaacgattcccaaactttaaaaaagaatatggtgcatactcggcaaaagcaataaaaaaacttttgcccctaatgcggaagggtaaatactgggatgagcaagcgatagacgagaagactaagactaggataaatagaataattgacggagagtttgatgaaaaaataagcagtagggttcgagataacgctattagtttaacagatataaatagttttagaggtttacctgtttggttatcgtgctatatagtttataatcgacattctgaggtaaaggatattgccaaatgggaaaaaccagaagatatagataattacttaaagctatttaaacaacattcattacgtaacccaatagtagagcaagttataactgaaacactcagagttgttagggatatttgggtgaaatttgaaacgattgatgaaatacatattgagcttgggcgtgagatgaaaaaccccgctgataagcgaaagcagatgacccagcaaatgtcagataatgaaaattcaaaccttaggataaaaagacttttaatggagtttattaatcctgaatttgaaatcgaaaatgtacggccatattcacctagccaacaggaaatactacgaatatatgaggatggggttttgagtagcgtagctgaaataccaagcgatgttgacgctataatcaaaaaatttaaagagtccgaagcaaaaaagcaacccacacgcagtgaaattttaagatataaactatggcttgagcaaaaatatcgttcgccctatacaggggaaatgattccgctatcaaaactgtttacagcagcgtacgagattgagcatataattccacaatctcgttattttgataattcgttaagcaataaagttatttgcgaagctgttgttaatgccaatccatacaaagacagggagttgggttacgagtttataaaaaataacgagaacaggattgttcccgaactttcaacgccaacaaaaactgtaaggatttttactgcacaggagtatgagcagtttgttaaagataactactcaaagaaccctgcaaagaaacgcaaattattgatggacgatattcccgatgattttatacaaaggcaactcaacgatactcgatatataagcaaggttattaagggcttactatcaaatatagttagagaaaaagttgatggagagtatgagcaagaagctatttcgaaaaatgtaattacttgcacagggggtgttaccgataggctaaaaagggactgggggctaaacgatgtttggaataatattgtttatcatcgttttgaacgattaaatgagttaaccaaaagcaatcagtttggtgagtgggataataaggacggcaaaagagtttttcaaacaaacgttcccattgaatttcagaaagggtttagtaagaaacggattgaccataggcatcatgcgctagatgcgctggtaattgcttgtgccaatcggaatattgttaactatcttaataacgagtcggctagcaaaaaatccaaaatatcgcgttacaatttgcaagtactagtttgtaataaaaccaaaactgatgacaggggaaactacaggtgggttgttaaaaaaccttgggaaactttaacgcaagattcgcaaaaggctctggagggtattattgttagctttaagcaaaaccttagggttattaataaaacaaccaaccgctaccagcattttgagaacggcaaaaaaattgttagcaaccaagtaaaaggggatagttgggctattcgaaagccaatgcataaggatacagtttttggcagagttaacctaagaaagataaaacaggtaaacctaaaaactgccattgaaacccccgaaaggatagttgataaaaatcttaagaaaaagataaaggagcttattagtgttggttacgacgagaagaaaattttaaagtattttaaagacaacgtaaagcaatggcccgatattgatttcaagaaaattggtatttacttttttaccgacgaaacaaaagagcctttagcagctacgcggaaagttgttgacaagagttttacaataaagaaaattgaagagggtgtaaccgacacaggtatccaaaagattcttttaaaccatttagagtataagggtggcgatgccgaattagcattttcgcccgagggcttagaggagatgaacaaaaatatagccgaactgaataacggaaaaccacataagcctattgttaaggtaagagtgtatgagcctatgggtaataagtttaacgttggagtgcaagggagtaaaacaaagaaatttgttgaggcggctaaaggtacaaacctgttttttgcaatttaccaaaccaacgaagggaaacgaacttacgaaacgattccgctaaatgttgtaatagagaggcagaagcaagggctaatacctgtccccgaagtaaatgagaatggggataagcttttattttggctttcaccaaatgatttggtgtatgtgccaattgcagagaaaacaggagattatagttttataggcgatgtggatgattttaacaatatatataagatagtatcatttacagggaatagactatatgcaataccctattgtgtagcaaatgttattgttgacaaacttgagtatacattattgaataaagtagaatttactgataataaagaatcaattaaagggagttgtattccaataaaaattgataggttagggagtatcacaagtgttggcaactcaaaagttgcattacagtagttttaaatgctggcagaataaatgtattgctatgatttttgaacagggcaacctatatcacatatttaatcagggcaacaaccggcagcgtatcttctttaacagggcaaactatttgttctttttagaaaagataaaacggcatgttttgccctttgccgatatgttggcgtggtgccttatgcccaaccattttcaccttatggtgcatgtaaatgagttggaattaccaatagttgatggaggtttaggtctttgtccgggcgcgactttgagtcgcactcggacaaagactagttcaaggctacctcaaagtcgcactcggactactactaccattaaaacccaatcgttacagcactcaatcggagttatgctagcatcctatacccgagccataaataaggaaaacgattggacagggtctctttttaggagcgaaaccaaagccaactgcctaaccaaaaacgaaaagattacccgagcatggtttgttgcacagggggttactagtattaacattcaagagccccagcgacagtatcctaatatatgttttaattacatcaacctaaaccctgttaaacatggtttggtaaagcattgcgagagttgggatttctcatcgtaccgtgaaataaatagaacaacaaaaccttttttgataaacagggatagaatcagtgagtttgggctgaaacttttggaatagtttgtaggtgtgcatttgagtaaaaggataacttgtttcagtacgacatggttttgctgtggtaatatttgtgtgtccacttcatttttaacctaaagaataacctcatgataaaacaaaccctttactttggcaatcctgcctatttaagcgtaaaaaatgggcagatggttataaacaaatcatcaaaaaaaactgtgagtgcagatgatggtgctgagacagaggacgagcccctaaccgaaaaaataactttgcccattgaggatattggtttggttgttttagattgcttgcaaattaccgtttcgcaacccctactaaatgccttgcttgccaataacacatcggttgtaacctgcaacgaaaaacatatgcctacagggcttcttcttcccttagaggggaataccctacaaagcgaaaggtataaacagcaaattgctgcaagcgtgccccttaaaaagcagctgtggcagcaaaccattcaggcaaaaattgccaatcaggcagctttgctaaaaactcttggaacagatatagaacccatgctctactttgagcgtagtgttaaaagtggcgaccccgataactacgagggtagagcagccgcttactattggaaaaatatttttaatggcattattaccaatgattttgtgagagggcgctttgaggaaaatccgaataaccttttgaactatggatatgccgtgcttagggcaactgtagcccgcagtttggttggttcggggttgctgcccacgctgggtatacatcatcgcaacaagtacaatgccttttgcttagccgatgatattatggagccctaccggccgtttgttgataagttggtggtggatattctaaaggattttgatgatgttagcgaattaaccaccgagttaaaggctcgcttacttgttattcctgcgttggatgttgtaattgagggtaaaaatagcccattaatgattgccacccagcgaacaacctcatcgcttaacgagtgttttgaggggataagcagaaagattttatatccgtcgctatgaaattcactgacttatagcatattgtgaagcctatactatttgcttaatgagcttaacagagcggttaaatcaatacagggttatgtgggtattagtttttttcgaccttcctactgacagtaaaaaggataggaagaattctgccaagtttcgaaaagatattatgaaggatggcttcactatgtttcagttctcaatttacacacgatgctgcccaagccgagagaacgctgatgtccatataaagcgagtaaagtcgttattaccgcccctagggtatattggtataatgtgcgtaaccgataaacagtttggggcaatggaactttttcattcaaaaaaattaattaaggctagccccgacccgcaacagttacaactattttagtatgaggccttaattggcttaatggctagtttttggataagaatattgcccaagttaccattgggctacacaataaaaaatccccccaaacggttgggggggatttctaattgagcacattttttaatcctaatttccgacctattaaattgacgaacaaccttttaatctggggtatgttgtgttcaataagtcaaagatacaatctgaaagcaattcacaacgactgctgctttatttgcatcatgtaccccgttgtgttcaataagtcaaagatacaatctgaaagcaattcacaacatcattgtattatctattggatagcgtgtcgttgtgttcaataagtcaaagatacaatctgaaagcaattcacaactgttacaaacctatgaaaaaaaaaacagcgttgtgttcaataagtcaaagatacaatctgaaagcaattcacaacgataccattgttccttatttgaacatagaagttgtgttcaataagtcaaagatacaatctgaaagcaattcacaacacagcttgctataatgcaggaagaagctggttgtgttcaataagtcaaagatacaatctgaaagcaattcacaacgaatattccgctaggggttacgcaaggtatgttgtgttcaataagtcaaagatacaatctgaaagcaattcacaactatttttctgatgtaccgatttacaaaatagttgtgttcaataagtcaaagatacaatctgaaagcaattcacaacctttatgcttatcgagccttttacgattctgttgtgttcaataagtcaaagatacaatctgaaagcaattcacaacttgtttcctctatgtacgttaaaggataatgttgtgttcaataagtcaaagatacaatctgaaagcaattcacaacgttcaaattcactattgttaactctgtaccgttgtgttcaataagtcaaagatacaatctgaaagcaattcacaacttgtaagtattttttttacagaactcaaccgttgtgttcaataagtcaaagatacaatctgaaagcaattcacaacgttactacctatacttggtaacatattattgttgtgttcaataagtcaaagatacaatctgaaagcaattcacaacgtaatcttctttacgatcagctcactatacgttgtgttcaataagtcaaagatacaatctgaaagcaattcacaacgtgattgctgttatatccatatcctacaaggttgtgttcaataagtcaaagatacaatctgaaagcaattcacaactagcgtcctcgtcaaggtcggcaatataccgttgtgttcaataagtcaaagatacaatctgaaagcaattcacaacaccccttgattgcataatcaatattgaaaggttgtgttcaataagtcaaagatacaatctgaaagcaattcacaacataattttgttcttttaattaagtttatctgttgtgttcaataagtcaaagatacaatctgaaagcaattcacaaccctcttttatctcaacccaccacttgccgagttgtgttcaataagtcaaagatacaatctgaaagcaattcacaacatgatagccgtctgcgagtggaatcatatagttgtgttcaataagtcaaagatacaatctgaaagcaattcacaacgcggcaggcacaacttcacaaccaagcaatgttgtgttcaataagtcaaagatacaatctgaaagcaattcacaacaacctcaccactaacatcataagtaatagagttgtgttcaataagtcaaagatacaatctgaaagcaattcacaactattcgattaatgacattccctttgcgaaagttgtgttcaataagtcaaagatacaatctgaatcgagcgtactatgcgagatcggcgaagccaaagcaattcacaaccttcttacttaggtacttattgtagatatagttgtgttcaataagtcaaagatacaatctgaaagcaattcacaaccccttgaagacgacgtggcgtattgtgttcgttgtgttcaataagtcaaagatacaatctgaatcgagcgtactatgcgagatcggcgaagccaaagcaattcacaacgcttgttctaatgcggctttattggtatcggttgtgttcaataagtcaaagatacaatctgaatcgagcgtactatgcgagatcggcgaagccaaagcaattcacaactaaaaaaaggaacattgattgaagcattggttgtgttcaataagtcaaagatacaatctgaaagcaattcacaacaataaataagtattccttaatcctgaattagttgtgttcaataagtcaaagatacaatctgaaagcaattcacaacctgccctgcatcactagtgaaagaaaaagtgttgtgttcaataagtcaaagatacaatctgaaagcaattcacaacactaggctagaccatccgaataagcggtaggttgtgttcaataagtcaaagatactattttaggctaattcacaacaatatcaacaaatttataacagtgaagagctatataatcagtgggttaaacctgtcagtgaggtgcaatttacttgcacggggtagggtagggtaacagtttaccagtatacggaaaacacagtgaagccatagcaatcaatgggtgatgctatgaacattggggattatgaaactacatcactatcaaggcagaaaagtccttgatgctataataaaaacatatatatcaagcaatcttaggtattgctactgaataacaattttttttgtgtaaattttcgctccaccataaatttttataacatatattccattcgcaagtccatagaggtctatttctttagttgataagggtataatatctgttgagtaaaaaactttggcccccatcagattgtagatttcaattgtatttatgctactgttttcagctgtaaccatgagttttccgttagatgggtttggaaaaacagatacaactggcgaattttgttcgcccgttgaaatacctgtaccttgattccagccagcaatgcttgcccataaccaccatgcagcatatgcttttaggttgccatttaatgcttggctatgcgctgcgtagcattcgtaccaatcagtatcaacagcatgcgaattttgccattctgttgcccaatttttatcaagcgagccattatcatccgaatcataatcacagttatcatttgccattaatgccatgtaatctgtttcaccgtcgggatcgtaactttcaatatctgcaaaatcgtacagaattttattgttatcgttacaataggcccgaatttgctcattgcggagattgagattcccacttgctccagaaccatccaaatggccggtcatgtaaacaaatttaattccaggataatcagcttctaattcggtcatcggagctaagtaattactaatcatagaactttcagactgtgacgcaacttgaccgcaccacgaccagataattacatttacatcttcattttcacctgttcctctgccggtttcgggatcgggatccccaagatagctgcgtgtgttatttacccaatccggataataccctacatcaccactcatagcttcgtcgtgtaaatctaaagccccatcggttccgccattattccatgcgtacagattgtttgtatatccattcccattcataaaggcaattaaatcattcatgccaaaaattaactggctaccatgagatgtatgcccatatgcgatatgcagattttgctttgccgtttcaattgctgcttcaggtatttgcaatattttagtactgttatggttaataataaaagcttgcgaaaaagtttgaaaaccccatagcattgcaagcgaaaaaacagtaataatttttttcatggcttttagttttaggtttttctactcgtatggttttcaggtctattctgctttattgtaagatttttatactccattttagctgtcgaattgtgtggttagtccttacgttttcacaaaccggattttgttgttttaatttggaacgaaccacggtatatgtgcattatcggtattctaatcggtttatgttagtttttaggtcaaggctaatttaataattttttcgttatcatattaagttcaacatactgtatgttagcggttcgatgtttttcatgtatcagttacatttggcttttatagtctgtttgctccttgcagaaagaacaagttgcttgatgtcaatcgataaatttttgtcttgaaaatttcgttcaatatcaattgacttgtctgcaagttttactggtttaaagcgtattctaaagttctcaaagagtggtcagccatatgtgccgttgcgactgcgtagccaactgaacgagcaactgcaatttttttggggtcagtcacttcgtttgcaaatgcgatacagtcaaatgaggcatttcttgcatcgccaacggaagcctttccttctgaccatttttttgctgtattagttgcgttagtcagtccactgtcaatctggttgggaagtaatgtgaatacattttcagcacattgacaagcccacagtattaactgtttatgttctttttttgccaaaggtactccacgatgttctgctacaaatcgtttgtctcttattttattcgggtcgccttaaaattaccgcaacgggttggagtgtgtcgatgctgtatgggatttataaccgttgaaaagttaaattgaaactaaaagtaacccaaaaagccaaaaagaggggcgtaaaatataccgtgtgttagcaattggctttattccgttcttcttggttttcagtgttggcaaagacagactcttttgcaatttttggtgtggcgttggctggtgagaattgcaaatgtgtatggctttatgcgttggatttttcgtagtactttctccgtaaccaaaaagaaactctgaccaataaaatcaatgcaggaacttcaactaaagggccaattactcccgcaaacgcttgtcctgaatttagtccaaaaactgcaattgcaacagcaatagccaattcaaaattatttcctgctgctgtaaatgctactgaagctgttttgtcatattctgctcctgatgctttggtaaagaaaaaaccgatgatgaacattagcgtaaaataaattagtaaaggaattgcaattatcagaacgtccattggaatttctacaatcaattctccttttagcgagaacataactacgattgtaaataaaagtgctattaaagttattggcgaaattgtcggaatgaatttatttgtgtaccaatcttcgccttttaatttgactaagataagtctgcttaaaattcccatcacgaatggagtacctaaataaatagctacactttctgcaattgttccgattgaaatatccacaatcgctccttcaaatccaaaatatggcggaagaaccgttataaaaatccaagcgtaaaaactgtacgcaaacacttgaaaaatactatttaaagccactaaacctgcaccatattcgctacttccttctgcgaggtcgttccaaaccaagaccattgcaatgcaacgagctaaaccaattaatattaatccgaccatgtattcgggataatctcgtaaaaatgtaactgccaaaacaaacattaaaacaggaccaattatccaattaagaataattgaaatagagaggatttttgtatttctaaaaacctttggcaataatgaataatcgacctttgccaaagggggatacatcattaaaatcaaaccgattgcaatcggaatgtttgtagttccgctactaaacgagtttataatgtttggaaatgttggaataaaaaacccaagtccaacaccaaaagccattgctacaaatatccaaagcgttagatttctgtcaagaaaacttaatttttttgaagccattttttatgaatttatttgagaaaaacgtagaataattcagttgcaatttgcagacttctttcattgtacttttctgcttgttgtggtgtgttgtcaagtacttttgggtcttcaaaagttatgggaatgcgtttttctgcacctgcaataaaaggacaaccaccatcagcttgtgagcttaaaattgcagctaacggttagtatatgaaaagtaggcgatttcgaagcacgaaactttcggttaagcacaaactttaatacgagccacatgccttgaatttagcactatttcgcctattttttatatacattgttacaagctgcctttcttatatttcgctcaatcgtcacaagaattataaatttcgtttattactttcaatcgcaatgaattcaggcaaatattctggtgtacatccttttgataccattttacctttgtaaagccctgttttttcaccaagtgctacacagcgttctcgatattctttttcataaacacctatccaacctgctaaaaaattcattgcccattgcacttcgggttgctctttttcgatttcattttcaattttagaaagtaatttttcactgtcaggttgtggttgtcctgtccaacgcaaacgaccttgataataccaaaagattcgccttttaagtgaagattggttgtcttcccaactttctattaaagcaagtgtctttttgtctttggtaagttggtttgccattaaccaatcaataagttgaagtttttctttttcgttgtgttggttaatgtcagcaactaatttattaatcacttcttcggtaagaagttttttgtccataatcaagattgctaattgtcgggcaaaaaaatgttcagctgaccaaagctcaatagccaattggtggtcttttcttatctctttcgcaattttccgcaagtcgccaagtttggtgttcttgtcgctaatttgtttcagtatattttctgattttgttgaaagtttcatttcaatattgttatttgtttaactgtggtcttttaggttgcttgtaactagtgagtaaatttgagagttcaaattttgtgtttaataaattaaaggtacaatttaaattaactcactatgcacttaatttattaaataatgaatacaaagttgtgctaaaagatcaaaactgtctgcttatagagtttctcaactttatggcatacaagcgtatagcgcatttgtctattgataatatttgagtctaaaactcaccaagcattaaagattctatcagttttgctatatcttctgggtccatttttaatttgagataagagtgatttgaatttataccttcaacccatatattcccgccggtatcatcaggcaaacaaattccattctcaattttatcccaaaaaactcctattccctttctcacagcataaagaactgctgcttggtcgtatgtcgaactatccaatattttgcctttatagtattctttaatccacggagcatttttgctaaaatgcatgaagccgatataaagtggtgttttaggatcgatagtattaaagacttcgccagtttttatcgccaaacctaattcaaatcctataaaagtaataggtgtgctaatgttttcaataacaaactttgttaccccaggcattccgccgtcaaaattccattcgttagctccttgggggaattgcccccccattattacaaattcttttaccttttgatcaataagctctttgccgcttaaatctgaaatggaatcaccctgagattcaataaggtttttaatgtttttaagaggcccaacaacaataatggtaatacttttatcttggcttttgctaagtattttccgatagagcagtgttg

SEQ ID NO: 1083 - DNA, 24596 bp, synthetic construct
  source 1..24596: mol_type = other DNA
  misc_feature 1..24596: note = Synthetic
ctacgagattcacatgggtagtaccgtaccggtggagggagcgtccgcttctccactaaaccggttggaaagcgggcaatgtgacgggtatatcgtggaccgtacgtgcatggggacttacattcacggcattctcgacaatccggagtttatcgacttcctgctcgaaccgtttgccggtaaattgtcggaagcagcggaaacgttcaactaccggcagtttaaggaagagcagtacgacaaactcgccgaccatgtgcggcagcatgtcaatctgccgcttatttacaagatattgacggacaacaattaaaatcggatagaatatgattgacggacacggagacgattcctataaatacagccgcccgataacggcaaatttcagttccaacgtgtacaacaaagtgaatctttcccgtttgaaagctcatctttgcgaatgtatcggggagataggcaattaccccgaacccgaaccctatacgttggaagcccgtatagcttcccgctgtcagctgccgtccggagctgtttgcgtaacgaatggcgcaacggaggccatataccttattgcacagactttccggggtacgaatacagctatcctgcaacccactttcagcgaatatgcggatgcctgccgtatgcacggacaccgggtgagtttgctttatcaactgccgaaggagcaggacgggtatcgcctgccggacgatgtgcggatgctgtggctctgtaatcccaacaatcccacgggaacggtggccgataaagaatatatgcgcggattgattgaacataatccgcaggtttgttttattatagaccagtcttatgagttctttacgctgtgtccgcttttctctccggcagaggcggcggagtatccgaatgtactgctgctgcattccatgacgaaaaggtatgcgattcccggtttgcggcttggatatgtaacgggcagctccggtttactggagcggctgcgcaccaaccgtatgccgtggtcggtcaaccggcttgccattgaagcaggacttttcctgttggagaacgatgtgcccgaaccggtggatgtggctgcttatctgcaggagacggcgcgtctgggcaaagcgctcaaagccgtaggcggattggacgtttgggatacgcagacgcattttatgctggtgcagcttcgcatgggcaaagcatctgccttgaaagagtatcttgccggggagcatggcatacttattcgggatgcgtccaactttgcgggactggacgagcgctttttccgcatagccacacagacaccggaagagaacgacagactggtggcggcgatagaggaatttatggcggggtagagccggcgtaatagtagaacctgagtgataaatattttatggaagatataatcatatttttaggcattgctttcaatctgaacctgccgctgcttacggcatggctgctcgaccattggttgggcgatcctgtctggctgccgcatcctgtggtggctttcggaaaggccatctcgttctgtgagcatcgtctgaataagggaaatgcccgtttcctgaaaggggctgtcatgtcgttggtactggtggcaggcgtttatctgcttacattgtttctgctgcgtcgggcagcgcattattctcccggtctgcttttgactttgcaggtactgctcatcttttattgccttgcgggtactacgctggtgcgcgaagtttgcggggtgtttaaggctgtagaccgttcgttggaagagggaaggaagcaggtagcctgtattgtggggcgcgacacttccggactttcggcgcaggaagtacgtacggcggcattagagacgttggcagagaacctgagcgacggcgtaatcgctccgctgttctggtatatgttgctgggtgtgccggggatgcttgcctataagatgataaatacactcgactccatgataggatataggaatgaacgctatcgtcggttcggctgttttgcggcacgtctggacgatgtagccaactatatccccgcccgtctgacggcttttctcatggtggcggtttccggcagattcccgttactgctttttgtggggaaatacggcagcaagcatgccagtcccaattccggctatccggaagcggcgcttgccggaatattggactgccgcttcggtggttctcacaactattttggcgaggaagtgtggaaaccttatatcggcgacaatgaacggcctttgacaaccgaagacatgaggattgccgtgcgcatcaaccgcagtgtggaatggataatggtaatcatcgttgttgctaccgctacctgcatgtacgttattccctcattcttctgagtgctaaagggtaatcctgacgataccgccatagggtgtcagtgcgctgaatgcctcttcgggtttgatgatgccggcatatatctgtgcgcaaatcaggacgccgccgtgggcaaaaatggctacccgctggtagggctttcctttcagctcattgagaaagtcgctgacacgccggtactgcatggcgaacgactcgccgcccgtagccgctacattcaaatagtcggcataccactcttgtaggcgtgggtcgtcgttgcggtcgaaaggtttcatttcccaactgccgaagtttatttccataatccgtttgtcacgttccgcatccggatagccgcaataggtggcaaggcgtacgcagcgcgtaagcggactggtatatacatggtcgaaaggcagaaaggctttcaggttctcttgggtaacggccgcttcctgttcgaatgtcggtttcaggggaacatccgtttgtccgtagcatacgccgggcggtacatcgacggatgtgtgacgaataagtataacttccataatttttcagattaaatgtttagtgaaaataaaagggaaccgagagaaagtccgtaaggaaatcgattccaaaacctgcatagacatataccaatacaaggctgcctatgtagaatgccagttcgcaaagcaggaaagccgctccgcagcaatcacccgtatatccttgcaggcggcgtttcataaggcggcacagcagtacgaatgcgagcagcgggaagagggtggcaggccacatctttaccggcaggagtaagacgaaaggaagcaatccgcagatgaaggcggatatcaattcctggcgactcatgcggttgtacacgactttagccttgctgtcttcttcttttcgggcgtatggcaggcagttaatgagttgggatgcgcagaacttgcaccagcagtcgccgcagaagacaaggatacaaaggaaattcagaggcagattgcgcatctgtaacagcagcaggaaatagaatatcagtccgataactccgtagcttcctatatgggaatctttcatgatggcaagcgtacgctcgcgggtggtgccgccgccgaacccatccagaaagtccgctaacccgtcttcgtgcaggcatcccgtaacaaacaggcggacgatgatggctataatccaggcaagggatacgggcagtatctgtccggtcagccagagagtgcctgccatgatgccgcccgtcagccagccggttagcggccagtagggtactacatgcttgaaacatttggcgggtacttccctgattttccaaaagggcagtcgggtgaagaagataaatgcagccagtatgttcattatatataggtattgtctataaaattaaaatatgggtactatcaacaaagttatatatgttatctataaaatggttctctgcttaaagatgccgtttgaggggcttctcaaaagtatttggtgatggaagcgtgtgcgaagttatccatttcattaatcatgcggacagccgattctataatgggatatgcacagatagctcccgtgccttctccgagtcttaatcctaaatgcagcaacggtttggcatttaatgaatcaagcacaagtttatgcccgcattcatctccgcaatgtccgaatacggcataatgcagcacttcgggatacagcttggcggcggcaaggatacagtttgtcatgatgaagccgtctaccagaataatcattttcagctcggcggcttgcagcatggcgcctactgccataaccatttccaacccgccgaagtagcggatgatgtcacgcggcgaaccgtctcctttgtagttgtccaacgactgtttcaagacttcgtacttatggcggatgcctgcatcgtccagtccgcttcccgcaccgacgcattcttttagcggaatgccggtgaagcagctcatccatagggaagaagaggatgtgttgcctattcccatttccccgaaactgagtatgttactgccttcttcgcggcaacggcgcaccacttccgcaccccgttccaggcaaagttccatttccgtttcggtcattgcagcttcgtgcagatagttgcgtgtgcctttgcgcactttcatattgatgattcctttttcataaggcaggtcataatcaactcccgcatccactatctttaatgtaaatccgtgctgacggcacagaaaattgacgccggcacccccatgaaggaaattactgatttgttgccaggtaatttctttgggtgagaggctgacaccttcctctacaataccatgatcggcagcaaagatgatattctgaggatgttgcagaatgggagtcatgctttgctggatgagccctacctgaagtgcaaggctttccagcattcccaaagaccctttcggcttggtcaggttattgattttctcaaccagtgccggtcgtatagcttcatccggtcctattatatcaaatgtcttcataattttataccttatacttcattcttatattccgtacttattcacacttaatttttgttgcaatccccgacaccattaaaatcacttcatctgcccgtgaagccacatactggttcatccagccttgcatatccgtaaacttccgttgtatttcgttttcggatgtgccgcccatacctatctcgttggtgacaaatataaatgtggcatcctgtgccgtaaagcagtcgaattcggctttggctgcggcaagggaacggtctgtatcggcatccaggtcgaaaaagaagttggtgcaccacaacgttatgcagtctatcagtacggtgcgtccggacagcgagtggcggctcagctctttatcttcttctatgtttgtccattccggtccgcgcctttcctggtggtgtatcacccgtttgcggaattcttcatcccatatacgtgccgtagcgaggtagacggggttgggcgagaggctgagcgccagcttttccgcataggtacttttgcccgaacgtgctccaccggtaataagtatgattcgtctcattggtttgcttgaagtttttatgaaagcaaatgtacatgatttctgcggcagtggcaagaatagagtatttttttagcggtttcgttttttcttttttaaaagatttcattacctttgccgatgttttcagaataaagggaaaaacatctgcggaagtagctcagttggtagagcatcagcttcccaagctgagggtcgcgggttcgagtcccgttttccgctcctatgggaatcaggtagttatcgcaaggcttctatctgatttttgtttttaggcaatggcagttgaactcccagttgaccctatgagctcaactaaaatcttatgaatgcaacgattaatgtagtatgctacaagtggaaaaccttagcaaatggtgaatacccatctgtataagtgttgcaattttagtggtatgctacaaatcaaagacattatctgtcccaataaagagtatattcagaaaatcttcttgataagcaaacagagttacagcaacgaatcatttgctgttttttttaaatgttacagctaaatcattgtgatttaaaagggaataattacctttgtattatggatggtaaagtaacttattggattgaaatgtcagattatgacttggaaacagcagatgcgatgttgcttacaggtcgttatctctatgtgggcttcatgtgccaccaaacgatagaaaaaatactcaaggcatattgggctaatcgtttggtggaagtacctttaaagatacattcgctatccagattagcagagagaacagaattagataaagaactatcagaagaacagttggatttcattgatacacttgagccacttaatattgaagcccgttatccctcttataaagagagattgatgaaaagtctgactaaggaatattgtataggacttttaagccaaactaaagaattacagtcatggataaagaacaagctatagtcctcgccaagcgatataaagaaatggtagcagaaagattaccattaaaggctctctatctctatggctcgtatagcaaggggaattacagagaggatagcgatatagacattgcagtagtagtagagcatttggatgacaactattttgaagatacccctctattatggaaacttagacgtaagataagtaaccttatagaacccgtcttgcttatagaggatatgagtaatcctctttactgcgacatcgcaagaacgggcattcttatctaaaaaaatgatacagaataagaaaagctgtatttgaagttggttatttttaattcttggcatcatcctaaagttaaatcacagaaagaggatatgtctaaactaaaattcgcttgccatttgtttctttttaggcacgggattacacggaaaacatagattttctttgttctttttccgtgcaatcctttagatttgcactgtgaaatattggggttgaaatattaccttcgtagtgaataaaagttaaccaagggaagcaggtgacctatcgtgaattccgtgcctaaaagaaatctcaagtgtattttttgacaccctcacaagttcgaatctcgcttgccgcttatacagagaatcagatagtcatcacaagatttctatctgatttttgttttataggaatatgtcaagccaccccttcacctttcacaactccctgctcatgcagtatagcgggtgaacccctgtttttgtaaacgactgattatgataactcgcaataggaaaaaaagttctcatttataaagtatgcaaaaaatagtgtttacacaataaacacttttcgcacagaaatttgtacttttgcactccgtttaatgaacccgaatagaaaactttaaaaacgaaatagaatggcagtagaattgaaagaccttaccaaacgtagcgagaattattctcagtggtacaacgagttggtggtgaaggccgatttggcagagcagtcggctgtgcgcggatgtatggtaatcaagccttacggatacgcaatctgggagaagatgcagcgtcagttggacgatatgttcaaggaaacaggacacgtaaacgcttatttccccttacttattccgaaatcattcctcagtcgcgaagcggaacacgtggaaggctttgccaaagagtgtgccgtagtgacgcactatcgtttgaagaacgacccgaatggcggcggcgtagtggtggaccccgctgcaaagctggaagaagaacttatcatccgccctacttcggaaaccatcatttggaatacctataagaactggattaactcttaccgcgacctgcctatcctgtgcaaccaatgggcaaacgtattccgttgggaaatgcgtacccgtctgttcctgcgtaccgcagagttcttgtggcaggaaggccacacggctcacgccactcgcgaagaagccgaagaggaagcagtgcgtatgctgaacgtgtacagcgaatttgccgagaaatacatggcagtgcccgttgtcaaaggtgtgaagtcggccaacgaacgctttgccggcgctctcaacacctataccattgaagcgatgatgcaggatggtaaagctttgcagagtggtacttcacacttcttgggacagaacttcgccaaagctttcgacgtgcagttcgtaaacaaggaaaacaaactggaatacgtatgggccacttcttggggagtatctacccgcttgatgggtgcgcttatcatgacacattccgatgacaacggtctggtgcttccgccgcacttggctccgatacaggtggttatcgtacctatctacaagaatgccgaaatgcttgccaagattgacgagaaggtggcaggcatcgtagccaaactgaaagcgatgggtatttctgtgaagtacgacaatgccgacaacaaacgtccgggcttcaagtttgccgattacgaggtgaaaggtgtacctgtccgtctggttatgggtggccgcgacttggagaacaatacaatggaagtgatgcgccgcgatacgctggagaaagaaacccgctcttgcgacggtatcgaggaatacgtaaaagacctgcttgaggaaatccaggcgaatatttataagaaagcattggattatcgcaacagccgtatcactacggtggacagctatgacgagttcaaggaaaagattgaagaaggcggctttattttggctcattgggacggaacgaccgaaaccgaggagaagattaaggaagagaccaaagccactatccgctgtattccgttcgattctttcgtaccgggcgacaaggagccgggcaaatgtatggttacgggcaagccgtctgcttgccgcgtgatatttgcacgttcctattaataaggatatttttcactttgctggatgaagcttttttcatagtaacctgtgacgaagtttctttccttttgtattcggcagatgttctaaaaaatggaggtgtgctaaaatttagcatgccttctttcttatgcacaaagaaagtgcatcattatgaggtgccccaaaaaagttaaacgttcaaaacagccaaggctatcgaagtggtttatatatacaacaattcattcttcatcaggccggagaaattttccatcatagagttattcagatagtttccttggcgggatatattttgtatgatgccattattcttcagcatgctgataatactatccttgatctgagcgcaataacagggtatggaggctcttgtgtttcttaaatgcctatttaagcatatctgttaccattttcaggttagggctgcgggagagtgtattgttattatctccccattgtatatgtcgcgtattgtttcctatcaaacctttataaaagtgatagtgatgtttcttttgctttgctttcaatctcatctgagacatcagtttctgcatagtcttatgattgatattgtagcttttaatcgcgtaaagacaaacagcttcttctatattcatagcggcctttgctgtcatcatatattgtcttgatacattttcttatatcattataaccatcattatctctcagacgcaacagatggtaataaaatacggagcgagcatctttaccattttgagaatactctcaagagggaatcctttcagtcttagttcttcgacggcccgtgcccaatcgcgtagctgggcataggagcctgctgttcccataggggagtgacgcatacaagacagaaatggctatggctgtcccaatagagtatcaggaatgcttttcctactgcctgataatctgctaatggcaggtagtcgtaagaagcatgcaaatttttgctttatttccgtcggtcagagttacttcgtgcattttgcatcccgctgcgggtttcgtagctaatcgaactaatatttaattaattgttcggtagctattagcagataaagatatagtttttagtaatgtgttggggagaaatttactaagaataaaaaatcccccgttaaggacgagggaacctaatgttttcacaacggaataatccttattgtgatttgcttcattttagtttggcaaaactataaaataaaaatgaaaaaaacaatgcttgtattaataaaaaaaataactttgaatagcgtattaaaaaataatattatgaaaacgatacttggacttgatttagggagtaatagcataggatgggctgtaataaattctgtaatagaaaaacagtccgaacgaatttggataaaaatggcagggagtagaattattccgatggattccgctgtattgggagattttgacaaaggaagttctatatcacagactgctgaaagaactcattttagaggggtacgtcgtttgagggaacgacaattgctacgccgtgaacgattgcatagagttttgaagattcttggcttcttgccggaacattatttaaaagaaatagattttgaaaagcatcccggacagtttttgacaaactgtgaacctaaactgccgtggcttatagatgaacgaggaaaatatacttttttatttcaagcagcatttaatgagatgctagcagattttgcaaaacatcagccttcattagtgtctgatggtaaaaaagtaccttatgactggacaatttactatctccgtaagaaagctttaacagaaatgataagtaaagaagagttggcatggattcttttgaattttaatcagaaacgtggttattatcagcttagaggagaagaagaggaagatgctgcaggaaaatctgttgaattttatgcattgaaagtattgtcggtagaagcgactgatgaaaagaaaggtcgggacatatggtataatgtgcacttggaaaatgggtggatatatcgtagaagcagtaatgttccattggattgggagaatcaggtaaaagagtttatcgtaactactgatttgaatccggacggtactcccaagtttgataaatatggtgaggtgaagcgttctttcagagttcctaaagaggatgattggatgttgataaagaaaagaacagaggcagacatagccaatactcgtaaaacggttggaagttatatttatgatactttgttacagaaaccgcaacaaaaaataatagggaaactggtgaagacagtggaacgaaagctttacaaggaggaactgaatttgattttgcagaaacaatgtgcttttcatgcagagttacgggatagagatttatatatgagatgtattgaagcattatatccgggtaatgagatgcgacggaaaaatatagttaacagggattttatttatctgttaatagatgatattttgttttatcaaagaccattgaaaactaaaaaaacattgatttctaattgtccttatgaagaaaatgaatatgtaaaccgagaaactggcgagatcaaaaaagctcctttaaagtgcatagccaagtcacaccctctttttcaggagttccgtttatggcattttctttcaaatattcgggtatatcaaaaagaaaaaaaagtaaatggaactttacatttagatgtggatgtgacagcggaatttttgagaacagaagatgattatgtagctttatttgattggttgaattctcgaaaggaaatagatcagaaagcttttctgaaatatccaaaatttggattgaaaaaggaaatcgataattatcgttggaattatgttgaggataagttgtatccatgtaatgagacgagatatgcgattctttcccgtttggagaaagtcggcgttagtattgattttttgtcagatgagaaagaaacagtcttgtggcatattttatattctgtaagtgataagcaggaaatagagaaagccttacgaacctttgcagttaagaacggattaaatgaatcttttgtagaagtattcaaaaaatttcctccttttaaatctgaatatggagcatattctgccaaggcaataaagaaattgttgcctttgatgagatgtggaaagtattgggatacatctttgattgatgatgcgacgagagataggatagaaaggataataacaggtgagtatgataggaatatagctgctaaggttagagaaaaggcgataaacttgtcggatatatattgttttaagagacttccgctatggttggcttgctatgttgtatataatcgtcattctgaaaataaagaaattgctaaatgggaaactccggcggatattgatgcttatttggcttctttcaaacaacattcactacgcaatcctattgtagaacaggtgataacagaaacactgagggttgttagggatatttggaaacaggttgggaaaattgatgaaattcatattgaattaggacgtgagatgaagagtcctgcggacaaacgaaaaagaatgactgcacaaattcaagagaatgaaaaagctaatctacgtataaagacattacttgttgaatttatgaatccggaatatgaggttgagaatattcgtccctattcaccaagtcagcaagaaatattgcgaatttatgaggatacggttttgaaaagagaagaaccgattccggaagatatagatgcaatattgaaaaaattcaataatagcaaattaccgacaaaatcagagtttttacgttataaattatggctggagcagaagtatcgttcgccttataccggtgagttgatacctttaggaaaattgttcacgactgcgtatgagatagaacatataattcctcagtctcgctattttgatgattctttttctaacaaagtgatatgtgaatctgctgtgaataaactgaaagataatcaattggggtatgagtttattaagaatcatcatgggcagaaagttgaagtgggttttgggaaaaaggtagaaattctttctgtggatagttacgaacgatttgtaaaagaacaatatgctaaatcaagcgtgaaaatgaagaaattgttgatggatgatattcccgaacaatttattgaacgccaattgaacgatagtcggtatatcagtaaggttgtcaaagggcttttatcgaatattgttcgtgaaaagaatgataatgatggatatgaaccagaggctgtttcaagaaatgtgttagtttgtacgggaaacgtgacggacaggttgaaaaaggattggggaatgaatgatgtttggaactgtgttgtatatcctcgttttgaacgtttaaacgctttgactggaacacagtgctttggacattgggagaataaagatggaaaaaaagtttttcagacggaattaccccttgaatatcagaaagggtttagcaagaagcgtattgaccataggcatcatgctatggatgcaatagtgatagcttgcgctacgcggaatcatgtgaattatttgagtaatgagtctgcaagccggaataccaatatttcccgttatgatttgcagagattgttgtgtgataagaatagagtagatggtggtggtaattatagatgggttataaagaagccatggaatacttttacgcaagatacaagggaggcattggataaaatagtgattagtttaaagcagaatttacgtataataaataaaacaactaatatttatcaacattttgatataacaggaaatcgtatttataaaaaacaggaaattggtgataattgggctgttcgtaagccaatgcataaggatacagtttttggggcggtgaatttgcgaaaagtaaaaagggtacggttgtctgtagctttggatactcctactatgattgttgataagagagtgaaaggtaaggttcttgaattgttatcatataaatatgataagaagaaaattgaaaaatatttcaaagagaatgttttcttttggaaagatttggacatagctgaagttgcagtctattattttacagaaaatacttctgaacctttggtcgcagtacgtaaatcacttgattcaactttcaatgagaagaaaataaaagaatcagtaacggacactggcatacagaaaattcttttgaatcatttatctgtaaaggggggaaaagcggattgggctttttctgcagaaggaatagaagaaatgaatcgtaatattttacagttgaatgatggaaaaaagcatcagccaatatataaggtgagagtgtatgaatcacgtggaaataaatttagcgttggtgtatcaggtaataaaggaactaaatgggtaggagctgctaaaggtactaatttattttttgctatttatgtaacagaaaatggaaaaaggacgtatgtgactgtccctttagacgtggctatagaacgtgagaaacaagggcttattcctgttcctgatagaaacgataaaggggataaactattgttttggttatctcctaatgatttggtgtatctgccaactgaagaagaacgggagttgggtaggataaatgaaccaatagatagggggaggatttataaaattgtaagttttacaggaaatcgtctgtatggagtcccttgtaatgttgctaatgtaatagttgataaattagaatattcttcattaaataaagtggaattgacagatgctaaagagtcaataaaagaaatatgtattcctataagagttgatagattggggcatataatagaagttaagtatagaataaatgaatagtataaagttatttcaagaaaagaaaatccgttctatgtggaatgaagaagaacaacagtggtacttttcagttgtttatgtagttggtgtgttggctgatatcgtgaattctacggactatttgaagaagatgcgaaaatgggatgaagaattggctacttatctggggacaaattgtccccaagtagaaatgttgacagatacagaaaaaaagaaaaactttggtaacaaatgtataggaaatagaaaattcggaattagttcaggagtgtatgaaagaactgtatgagcagaaaggttatccaaaggattggattgacaaacgtttgagaggacctaccattcatcagaatttgacggatgagtggaaagaaaggggagctatggaaaagtgactatgctattcttacgccagaaatatctaaggcaacgttgggattaagcccttcggattaaaatatataaaggactgacaaagaagaattagaacctttgtgactatatgctcgatttagaattgatattcgcgatgcttggcgaacacgtcactacggaaatttctcagaaagaaaaaccatatacatttactattgaaaagtaagttgtacagtgtggtggaaatgttgttgaagtagtgcgtgaacaagctgaaaaagaactaggtagaagtattattttttccgacaatttttgttggattcagataatcatgatgataccttaaaacttccttttgaggaaaacaacgaatgaataactttaaaatctgtatactatgattaagaaaacattttattttggaagtccagtttatctctctttgaaaaatgctcagttagtgattaaattaccagaggtcataaaaaacggtgctttgtccgagggtttcaagcaaatatctgaggtgactaagccgatagaggatattgggatagtggtattggataacaagcagataaccattacttcgggagtgttggaggctttacttgaaaagaattgtgcagttataacttgcgattctaaaagtatgccggttggtttgatgcttcctttgtatggaaatacgacacaaaatgagaggttccgacagcaaattggtgcttctttgccattaatgaaacaactttggcaacaaacggtaaaagctaaaatagaaaatcaggcagcggtattgaataaatgtgttggagaggaaataaagtgtatgaagatatgggctactgatgtgaaaagtggagatccggacaatttggaggctcgtgcagctgcttattattggaaaaaattgtttaagatagaaggttttacaagggatagggaaggtattccacctaataatctgttgaattatgggtatgctattttgcgggcagtcgttgcccgtggtttggttgcaagtggacttttgcccactttgggaatacatcatcacaaccgttataatgcttattgcctggcagatgatataatggagccttatcgcccctatgtggataggttggtatatgatatgattaagggaggagaaataaattgtagagaattggctaaagaacaaaaagtacaactgcttactattcctacgttggatactattatttcgggaaaacgtagtccgttgatggtagctgttgggcaaactacagcttctctgtataaatgtttcagcggtgagttgcgcagaatatcttatcctgagatgtaatggaacggtttagcgaatatcgtgttatgtgggtacttgtactatttgatttgcctaccgaaacaaagaaagataaaaaggcatatgcagattttagaaaaaatctgcaaaaagatggatttacaatgtttcaattttctatatatgttcgtcattgtgcaagtagtgaaaatgcggaggtacatataaaaagagtcaaatcgattttacctgaacatggaaatgttggaataatgtgtattacagacaaacaatttgggagtatagaacttttctatgggaaaaagactatagatgtgaatactcccggacaacagttagaattattctgaaaagaaaatcccgctatatggcaggatttttttgggggaaactacatctttttttaattctaatatttaatataaatctttgtatattaggttactattaataatgagctgtttccaatggttcaaagatactaaaatgaaagcaaatcacaacgatgttgacagtcgtatttgggaacgtcatgctgtttccaatggttcaaagatactaaaatgaaagcaaatcacaacccacaacttgcgccaggtcctctttactgagctgtttccaatggttcaaacttacataaaaaccttggatttttatgccagtccaataaaaaacaagaccacctccctctctttcgccttattcgtactcttggtacacaattttttgttatctttaggtctccagttattaacctataaattggcttattatgagacgagtatgtggtcttgatgttcacaaagatagcatttatatgtgtatcttgtatgaaaacggttcaaaaatcgaatctgtttttggtgtattgactcctgagctggataagttacgtgatttgcttgtttctcatcatgtttgtgaagttgctcttgagagtacaagtatctattggattccaatttggaatattttgtctgttgactttagtctgaaacttgtcaatccttatttcatcaaacagcttcccggtcgtaaaagtgacgtcaaggatgctgagtggatagctatagttctgcagaaaggtttgattcgtggtagttacgttccggatcgtatgattcaatgtttgcgccaatatgagcgtcgcaatcatgaactctccaaaaacatcgttcatgcggaacaacgtatggatatgattcttcaacgctgtaatatccgtattagcaactatgtctcctgcatctcctgtaaaggttatcaaaaggttgtcaacgccattatatcgggagagagtaatccgaaagtattggtaactttaattcataaacgtaccttgaacaagcacgggcgacaggttgtcgaagattctcttaatggttttgtatctgatacggatcgtgatatactccgtcagtatcgtgacgaacgtatgcagatggaacaacacaaaagtgaaaataaagccaaaatgcaggctatttgcgaagcgcattattgcgaagaattagaattgcttcaaactcttccgggtataaaggaagagagtgctgccaatatcattgctgaaatcggagtggatatgaagatgttcctaaccgcatccgcaattgtaggttgggcaggccttaaaccgcgtaatgaccagagtgcaggaaaaattaaatcccgaaaaatcacccatgggaataaataccttcgtaaaatattggtggaagcagcctggagtgcggctagaacagaagacagtaggttcatgaaaatgtatcaacgattattggcacgaggaaaaagcaaacaaaaagcactaattgcagttgcaaggaagttacttgttctgatttggaatatgttatcaaaaaaagaggctttcaatccagaatataaaagaagaatgcaagcagcataaacttaaactttattgatgaaaaggaccgtatctttgtggtagagtaaactccgttttgcaaactgtctgagaaatcaataaagaattgaaagccagtctgaactttgagttcgaagaggaaagtaatataaaacaggagactaaacagagtagtctcccataacaacacatgccaaaaagaatgatacatctgccaagccgaaagagagggaggtggtcttatttgttttttagaggaaagatactaaaatgaaagcaaatcacaacgatgttgacagtcgtatttgggaacgtcatgctgtttccaatggttcaaagatactaaaatgaaagcaaatcacaacccacaacttgcgccaggtcctctttactgagctgtttccaatggttcaaacttacataaaaaccttggatttttatgccagtccaataaaaaacaagaccacctccctctctttcgccttattcgtactcttggtacacaattttttgttatctttaggtctccagttattaacctataaattggcttattatgagacgagtatgtggtcttgatgttcacaaagatagcatttatatgtgtatcttgtatgaaaacggttcaaaaatcgaatctgtttttggtgtattgactcctgagctggataagttacgtgatttgcttgtttctcatcatgtttgtgaagttgctcttgagagtacaagtatctattggattccaatttggaatattttgtctgttgactttagtctgaaacttgtcaatccttatttcatcaaacagcttcccggtcgtaaaagtgacgtcaaggatgctgagtggatagctatagttctgcagaaaggtttgattcgtggtagttacgttccggatcgtatgattcaatgtttgcgccaatatgagcgtcgcaatcatgaactctccaaaaacatcgttcatgcggaacaacgtatggatatgattcttcaacgctgtaatatccgtattagcaactatgtctcctgcatctcctgtaaaggttatcaaaaggttgtcaacgccattatatcgggagagagtaatccgaaagtattggtaactttaattcataaacgtaccttgaacaagcacgggcgacaggttgtcgaagattctcttaatggttttgtatctgatacggatcgtgatatactccgtcagtatcgtgacgaacgtatgcagatggaacaacacaaaagtgaaaataaagccaaaatgcaggctatttgcgaagcgcattattgcgaagaattagaattgcttcaaactcttccgggtataaaggaagagagtgctgccaatatcattgctgaaatcggagtggatatgaagatgttcctaaccgcatccgcaattgtaggttgggcaggccttaaaccgcgtaatgaccagagtgcaggaaaaattaaatcccgaaaaatcacccatgggaataaataccttcgtaaaatattggtggaagcagcctggagtgcggctagaacagaagacagtaggttcatgaaaatgtatcaacgattattggcacgaggaaaaagcaaacaaaaagcactaattgcagttgcaaggaagttacttgttctgatttggaatatgttatcaaaaaaagaggctttcaatccagaatataaaagaagaatgcaagcagcataaacttaaactttattgatgaaaaggaccgtatctttgtggtagagtaaactccgttttgcaaactgtctgagaaatcaataaagaattgaaagccagtctgaactttgagttcgaagaggaaagtaatataaaacaggagactaaacagagtagtctcccataacaacacatgccaaaaagaatgatacatctgccaagccgaaagagagggaggtggtcttatttgttttttagaggaaagatactaaaatgaaagcaaatcacaacttttctcgtagaacaccaataccagttatcgctgtttccaatggttcaaagatactaaaatgaaagcaaatcacaacaatgttagctatggttactctatctttggcgctgtttccaatggttcaaagatactaaaataagaaataactcacaactatatgcaagatttcaaactacggtagaaaactgtttttgatggtgtaaaatataaaagatattgacataagaactaattatagtgcattcaaatgtgtttttggaaacaaatatttccttctgaaaaatcttcttaatgattgtgtagttgtctaagtttgactacttttgctctcctataaatggaggcggctatgaaagacacattaattattgagcatttacgtaggggggatgaagaagcatttaagtacatttatgaacatcattatgttctgctttgccgctttgccaatcagatattgaatgatgcagctctttcggaagaggtggtggacgatgctatattttatttatgggagcatcgtcgggagatagaaatcacgtattctgtccgtgcttatctgatgcgcgctgtacgtaatcgttgtctgaatgaattgcaatccttgcgtcatcgtgaggaactgcatttctcatcttttatgttaccggaaaatatggattttcttgattctgtttttgtggaagagaatcagcccttgggtgtattgctcgaacgggagttggaagatgagttgacccacagtatagaagaactgcctgtggaatgtcgtaccgtatttaagaaaagtcgttttgaacaaaaaaagtacgaagagattgctttagagttgggaatctccatcaatacggttaagtatcatataaagaatgctttatctcttcttcaaaagcgtttggacaactatttgcatttattgattatttatatttttatggatatttgaaaaaatataaaatttcgactaccctcattcttgatttttttgtcttatatataaagcaacggaattatgcaactggaagaacatactgatatagatttattgataactcgatatctttcgggaaaaatggataaagaatcttttgccgaactgaaaagttggagtttggagtctgagtctaatcggaaatatgtacggaataagttagaggtttggttttcttcaggagttgctgatactgctgtgcagtttgataaagacaaggcattttctttattcaagcaacgtattgtcggggctgagaagaaacaaaaacagatgttccgcttctcatggaagacatttatgcgggcggcggcagttgtattgattctgatgattccatttgctgcgtattggcagggaaagcaggctgtaaaacaaagctttgcagatatggttgtagaggcgcctatgggagcgcatacaaaactctatttaccggatgggacattggtatggttgaacgcaggatcgaaaattgtatattcgcaaggctttggagtagacgaccgtcggttgcgcttggaaggagaaggctattttgaggtgatgaagaacggagaagtaccttttgagatagacacgaaagagttggatttgagagtattgggtacaaagttcaatttcaggaactatccggatgatgaagaggtgacggtaaatctgatggaaggaaaagttgctttgaggaacggtatcagggaaatgcctgaactttatctgactccggacgagaaaatggttcttaataaggcgaacggacaaatggtaaaaagcagtacgaaagctgccaaagccaatgtttggattaacgacgaacttttctttgatgaagagctgctggaagatatagccaagaagctgatgcgtagctataatgtcaaggtggaagttgccgattctttacgtaacaagcgtttttatggaagcttcggtatttcgggcaatacgattgataagattctggatgtgatggcttcgacccagcaaatgaattataaatacgaaaacggtgtatatatactatattaatgttgaacttaaaaaataaaacatgagaaacaggagttatatgaaatttactttttcctgctgacgttggcattttgcttcccggacaatagtctggaagtcagctttacttggtaatttattaccaaaccttatttctattcattaattaaaaattcaaaaagtttatgggaaacttcagtaaggctattttaatagcctcagtagctctttgtcttcatatttccgctttttctcaaggtatatcgttgaaaaatagggaaataactgtaaaagaggcaatggaactattgaaagaaaaatctggttactcgtttgtgttttcatctgcggatgtaaatacgaataagcgaatttcaatatctacggacaaagcgacaattgatgatgtcgttaagcaaattctccagggacaaaataatctgacttatgaaattcagaataagcgaataatagtaaagaagatacaatcgggggacaagactaagaataaacgaattaaagccattggtaaggttgtagatgatgcgggggagccgatcattggtgcaactataagagaacaaggaacaactaacggaacagttacaggcattgacggtggtttttcgttggatgttgcagataacgtaaatttggaaatatcctatattggttatgagacacgtaaaataagggctcaacagggtaagaagctggatataactatgcgtgaggatgcaaatgtattggatgaaattgttgtattgggttatggtaacatacgtcgtagtgatgtaacggggtccattgcatctgtttcatccgagtctatatccaaagttgcttcggcttctgtggctgatgctttagccggaaagatggccggtgtacagattactactgccgatggtgcgctggatgctgaaatcagtgttcgcgtgcgtggcggtggttccataacccaagataattcaccattatttttggtggatggttttccggtagatgatttaagcggtattccgccaacggatattgaatctattgatgttttgaaagaggcgtcaatgacagctatctacggtgcaagaggtgcaaacggtgttgttatcgtgactaccaaaaaccctaaaatgggtaaaacaaccgtacagtttaatagctatttgcagatgcgtacattggcgcgtaaaataccggtaatgaacaactatgagtttgtaatggccgaatatgaatatcagatgattcgtaaaggttcggatgagggttttatcaaaaatttcggctactatgatgatattgatttatacaaatacacgaacactactgattggcaggatgaaattctaggcggtaatcctatttcgcagtattataatataaccgttaatggcggtaatgaaaaaaccaaattcaatttgagttatacccgcaataaagacgagggacagttgattggttcgggactgacacgtaataacattaatctgaaattgaatcatcagttgttcaagaatctgaaactggaaacaaatgcaacttatcgtacgcgtactatcgatggtgccggaacttcggggacaaatatcgttactgcgcttcgttttcgtcctaccaatgggttgtcggcaggagttgccgtcgaccctgatgatgacgaggaaaacctggatggagatggaaattccctgaaccagaaatatactccggtggaagagaataaacagaattacagaaaacgtgacgaacaggctctcagcctgaaagcagctttggtgtgggatgtgataaaaggattgcaatttcgttccgagtatggaataagcacgactcatgcaaatgacaatcagttttacggtccattgtccagtacggcttctgctgccggtatgaataatatgccttctgctaaacgtaccaaaacccataaggaatcatatcgtttggcaaatacgctgacctatcgtaactcgtttaataagtctcacaatgtcaatgtaatgctgggacaggaaattaaccatgcgcagaacgataatacgtttatgagtgcaaagctctttccggtttctgtaacggcagaggcagcgttggagaattttgctttgggaactcccaatcagagtaccagttataaaagtgctcccgacagaaccgcttctttcttcggacgtgcattgtatgattacaaaaatcgttattatgctactctgacggttcgtgccgacgggtctaccaagtttgctcccggtaagcagtggggatattttccggcaggttccatcgcctggagaatttccaatgaaaagtggatgaagcctataaagttcatctctgatttgaagttgagagccagctacggtttggctggtaataaccgtattggtaatgatttgtggcataatatctatcgtgtatacagtggaacaagtgctcccgctttcggtaat

SEQ ID NO: 1084 - DNA, 24593 bp, synthetic construct
  source 1..24593: mol_type = other DNA
  misc_feature 1..24593: note = Synthetic
  variation 16771..18701: note = n is a, c, g, or t
taagggaattcttctaaagaaataaaataggatgatgaaattcttcacaatgtacctgtcaaaccaaaattattgaaagtcctttttactaggcgggaatcaataaggttataaatcactcgtgatcagaggaagggtttattttaaagtagattcacgaataattaaatccgtttcaattttgtaagtctcatgatttccttgggagttttcttttagcaaattgagcagaatttccgccgattttgcaccaattttaaagccatgctgatcgactgtgctgaggctcgggcacatcacttcggaaattttccagttgctgaatcccatcacgcctacttgctccggcaccttgattcctgcgcttttgaggtaattcatgacacccaatgcaaccaagtcggtaatacaaaaaatcgcatccggccgctggggtaaattcatcaattgctttgcaaattcaagcccttctccttcactgattgatttgcaatgcggtacccattcttcccggtattctagaccatgatcttccagggcttttttgtatcccttgaatcggtcgatggaattctgtacagccatcaagccattgatatgcgcgatttttcgatacccttgatctataagatgtttgacagctgaataggcactttcgaaatcatcggtaatcactttgggcgtgtcaagcagttctgaaaacttatcaaactggattactggtttgccttcatccaaaaactcctgaatatgatcaatattggtggtttcattggcaatggaaatcagcagaccatctacattaccacctatcatactttggcaggcaaggatttcattttttgctttctcgtcagtttgactaatcagtaagcggtaacctgcggcatttgcccgactaatagcgccactaatcactgccgaaaaaaaagggtgcaccaattcagggacgatcatcccgatggtctgcgttttgtttttccgaaagtttacagcaatcgaatttggaacgtaatggtgtttttccgcgtaatccttcaccaatttaatggtgtccgccgaaattccagaataagaattgagtgcccgtgaagcagtggaaacagaaatacccaattcccgggcaatgtctttaagggtaatgcggcgtttgtctgacatggattttgggtctattggattgaatataagtcagattctacccaaaatccaaagaattgatcaatttgtcagcttgtcgacttcttgacctgttttgtccaaaattacctctttctcatcttcgtctttttgtaagcggacttgataccggaatccatttttgtcctctatgaaacttactcttcccaattgatatcctgggtattttttgagcaagcttgaggcgatttcttccggtagctgatcttcatatggtatggtgttttcaaatcgaaattccggaccgagttctccctttttctccacgaattgattgcggccatcctcagatttgatcaattcaaatgcatcataaagctctccgatagccgtataagcttcaaactggagcttgtttccttccactgaaatcacctgaaaaagctgggtgttttccgctgctcgatcccgttccgcttccaggtcttcccagccattggggcgtagtccgtacattttgcccccactgacggataccacgtaaacggttccggtctgatctcgcatattaagtccattgagtacattttcaccgggagctacccgccctctggcatagctgtgatcatggccctgaagggctaaatccactgaatattcatcaaaaatcggtttccaaagtttgcgcaaatcttcattatcgcgtcctgcagaggctgaaaacaaggggtgatggtagctgacaatggtccattttttatcattttgcgcaagcaccgatttcaaccattcggcctgaacctcatgctctcgattgctatccagaaaaataaatttcacctggggataatcgatgaaataaaccgtttcttccaatccctccggtccattttcgggaaaactgaattgaggtttccactgtgcggatagactacgttttcgatctattcgatcctggtcgttgaggtagttatattcatgatttcctggtacagctaaagtcggtagcatactatggataaaacctcctgcggtaaaccattcgtgccattcttgttcacggtgggcatagttaatcaaatcacctgcatggatgataaaatcggcattgggtgctttgcgatagccttctcgaatgagtcttgaccaaagttcaagaatgaagttttgcgcatctcctacgtagagaaaggagaatttagcttccgggtccgaatccggagtgttgaactgaaaccattctgaccagcgatctccatctcccacgcgataagcataggtcgttgccggttggagttcatcgaattgtacactgtggtagttggctaaaacctctgctcgggggacatcaagtgcgttgaacctttcggtttttgctttttggcttatcgcatttctccaaaacttgggtgcggcagtggcaatggctatttctgcgtaggcttctgtaatggtactgtctgttctccagttgattcgaatttcttccgtggcattttgaccaaaagtcaatactattcggtcagggtgttcggaaggtttactccagtcctgaccaaactggggcgctttgtacactcgtggcttctgggcaagtacttgaaaagtgaaaagaaaaatcagggatagggacaggatagatttcatgagtttgtcttttctgaaaaatacccattttttgggtggaattaaaaagagataggctgacttttaaaaattaaccaaaagctaatgtcgcgttgatttgtaattaatatgaaagcgaagttttgaaattaattggacaaggattgttttttcctaaaaattcaaagaccaaattcctgcccgttcggctttctgagcatccaaatgctgcccgttgaaataggccatggcctgcccgtccgaacccaaatcccatagatttcccctcaaaaatacattcagcgccactttagctttggtattgttgattttagcgggtagggcatatttattccatgcttcccattcgctgattttttcaatgtcatttaagtcagtgccgacaggagcagatgccccggtataacccatccataggcggtccattcctctatcttcggccaaaaaagagggaacgaggacaatttcgacttcttcttcatccattagctggaagaattcaggataccagctgtcagcacaaattaacagggaggtttttcccatgggaaggttgaaaatgggaaaatcatctgtagtggcagagcctaaaaatgatttttctgattcgattggaaaagctttgagcacgggctgtcctattattttgccatcaggtccgaaaataaaggaggcattataaaggggtttggaattgtctatgatcaattccccatccgcgacaccgggacccggcaaaatgatggatcctgcagcgatatagcatttttgctcttgggccattcggctgaaggcatagtagtattcccgggccattttactggatttcattcggaaaagggcgcccatctttcgattttcttccctagccttgaaatagctcaatccaaaatccaccaaattggaaataatcagggtggacatggcatcttccaatttctccttttcggcgattgcatgtttttctccggatatcaccaaccaggtaccgatgtattctgggaataaaatgagtgaatttcgcttgactaatccctcctgatcggctgctgttaaatatccgttcaatttggaataaaatacatcttgattgagataatcacgggtttccatatagggctgaatacccagaatatttcgattcaaggtatccgaaggattcaactcctgaaccaaatccaagtacatttcagggggaggaaggggataacctcttccggtgtttgaccagataagccaaataaaaatcaatagaaggactgctgaaatgataaacctcttcatgtctgggtgaatttgatttaagaatggactgacatggtgaagtgtttccgagtatattccaatgctacttgattgtcaacttgaaaaggcaaaatgtaaaaaaattctgattaattggttttattccaaaatcaatgcgaggggtttttcaaagtggatttttaatttaatgattatcaatggctaataatctggcttttcccagttaaaactcaaattccattttttcacccgcttttaagttcagttccatttctgatccttctgcaaatacagttaccggttttcccagtgaagaatggatttttaaccagctgagttttccgtctttccattcgaaatctagcgtaaatccccctcttgctttgataccatgcacttttcccgttttccaagctttaggcaaagcaggtaatactcgaataatgccctcttcatgactttgaatgagcatttcggctacccctgctgtaaagccaaaattcccgtcaatctgaaaaggcggatgagcgtcaaataagttgggataaagtgactgactgatgagtttttgaatgtgatcgtgggtagcttccccgtcaagaagtctcgccgagaaattgatcagccatgcccgggaccaaccggtaccagccccaccgttggcaagtcggaaatccaaggtctttttgaccgcttccattagagggggagtttggctgggagtgatttgattggcagggtgaaaggcatacaaatgggaaaggtggcgatgtcccttttcagactcttcatattctctgtcccattctaggatccgcccgtcttttcccagtatcacgccggatctcaaactaggcattagcttttctattcggttacctagttcagatttagtaggatttacatctttgattttaagataaatagtaaatatatcttcaattaattgttgatccatagcagcacccatggtggaggctgattttattccttttggattgataaactgattttcgggagaggtcgaaggagccgatacccagcttccatcccgtggatctttcatcagccagtctgcataaaaaaggcataattgttcgattgccggaagtgcccgctcgcgaagaaaaacctcatcgccggtaaataaatagtgttcccaataatgccgggccagccaagcacccgaacccatccaactgccccagtaagctgtagctgcctgtaaaaatgggattttccatagatcggtggtatgcggcaaaacggatccttgcataccgaaatttacccgtgcgacttcttttccgttttcgattaattcatctgtgaaatcaaatagcggcatatgcaattcactcaagccagtcacttccgccggccaataattcatttgcaaattgatattcaaatgataatccgcattccagggagcggcgatgtgttggttccaaagtccttggaggttggctggattggtgcccggccgactggaggaaatcaacaaatatcggccatagtcgaaaagcagtttttcgagccagagatcggtttttccttcttttactagctggatccgacgatctgtggggatttcatcttgcttattttcccctagttggagatccattcgatcaaaccaggccttatattctttttcgtgcgcaaacagcaattctccaaagcttttgaatgcgattcgatccagttgactttgggctacctgctcatgattttgatgataataggaggtagcggtgaccaatttcaacgtgatttctgaggcgccattaaccagaagtttttcctcctcgctttctaaaggaatatccgcatcaacttgtaaaatactgcgaaaacgaactccatggtaaatgggagcaggcttggaatcaatttgacctccgcgctgggtgacttctccattcatttccaataattgattatgaatggccttggtctccgcagtgggtacgccttcgtcttcgggtctgtttaatcggatttttccccggaatcctttgggatgattggttattaatcggataatcaaggcttgatctggggacgaagaaaaaacctcctgacttacctcatatccctcactttcaaacctggaaaaagccactgcccgctctaaatccaactcgcggtaaatatcgctcacctccttccactcgaaatctaaaaaaaggtcgcctagcgtctgatgggatcgggtaattccttttctggagaattttaaaaccaacagtgagtctgctttttgatgctcaccggcaataaggaaagctctaatttgtgccaaatcctccggtcttccctcggcaagcccccaatcttttggtcctcccggccagagagagtcttcattcaactggattcgttcatttcccggaataccaaagaccatggcgcctaatcggccatttccaagcggtaaggcctcttcccatatttcagcggcctgctgataccacaatttcgattgctgggcttgactatcaaaaaatacagcaataaagactcctaagaggataatagcatttttcatcggctagattgggtttgcatccgaagaatactacaaatcttttgtgccagcaaaccgaaattaaaaaagcgccgaaaccaggatttggatttattgggaaatgagaaaatctcgaaattcatccgtgttgaaattgctcattccttcctgataaaaaacgatttttccctctgaattgacgactaaggtggtgggaatcgattcgctttgaagacttttattaatcccaaagctggcatgtacggccgggaaagcccaagtcttggattcaatcagacctttgcttttctcaaagtcattatccaatccaatcatgagaaattcaatgtctttctcatcttccaaggatttatagagttcggaaatatgcggcatctcagctctacacgggccacaccaagaggcccacagattgatgaagaccgttttacctttataatcggagagatttattcgatttccatcaaaatcctgaaactgacctgaataatcaaaattttgatcggtcagatccactcgttccagtttgggttggatcaaacctgtggaaagtaagacggactgaatggctccctggaccacgggcaataatccggtgaaatagagaaaggcaaaaaatgcgagaatcagtccccaagacttgatttcttttttccaatccatttttttcttttcctccatttttatccttgatttttagcagctgataattgatcaatttattttcaaaattaatccatcagcttcagccatttagtgacaagtcttacacatcagcctttttgtctgactcaggacacgtatcttgcagcctcaagttggaaaaatcaccagtaaatatgaattacgaagtaaaaatttcttccgaactgcaggttcgaccggcccaggtaaaagcgacgatcgagcttttggacggaggagcgacagtaccttttatttcccgctatcgaaaggaagtcaccggaagcttggatgaagtgcaagttgctgcggtccgggatcgcctgcaacaactgcgggatttggataagcgaaaggaagcggtaatcaagtcaatcgaggagcaagggaaaatgacagatgtccttctacagtccatcgccactgctgagacgatggcaaaactcgaagatatttatcttccttataaacctaaacgacgaaccaaggcgaccattgcgcgggagaaaggcttggagccgcttgctaaacagatttttaagcaagaatctttggatatcgagcagactgcggctgaatatgtggatgcagctcaagaagtcaatagcatcgaggaggcccttcagggtgcacgggatatcattgcggagtggatcaacgaaaatgtgattttacgtgaaaagatgcgaaagctttttttagagcatggatcctttacttcccgagtcatccccggaaaagagcaggaagcgataaaatacaaggattattttgactggtccgaacccattaaaacagcaccctctcaccgagtattggcgatgagaagaggggaaaaggaattgtttttgatgctggattcttgtccggaggaagccgatgctttggcgttgatggagcgggaaattttagaaaatgccgctaacgcttcggtagagcaagttcacttggcgatcaaagatgcgtataagcgattgcttaagcccagtatggagacggaggttcgtctgatgactaaaaagaaagccgatgaggaagctatccgtgtatttgcggagaatttgagacagctgcttttgggtgcgcctctaggcgaaaaagcagtgatggcaattgatccgggtttccgaacaggctgtaaattggtgtgtttggggcctcagggacaatttttacattatgaggcaatctatccccatgaaccgcaacggagaacagccgaatcgggcatgactgttaaaggacttgcggaaaagttttctatccaagcgattgcgataggaaacgggactgccggtcgggaaacggaggcttttgtcaaaaatttgggattacccaaatctgttatcgtcaccatggtcaatgagtctggagcatcgatttattcggcttcggatgtggctcgggaggaatttcctgatttggatttgactgtgagaggagcagtaagtatcggaaggcgtttgatggatccattggccgagttggtcaaaatcgatcccaaatccatcggggtcgggcaatatcaacacgatgtcgatcaaagtgcgcttaaaaatgcgctggatgataccgtgatgtcggctgtaaatggagtgggagtggaggtaaatactgcttccaagcagctgttgacctacgtctctggactggggcctgtcttggcgcaaaacattgtagaatatcgaaatcaaaatggtccattctcaagtcggtcccaattgctgaaagtgccaagattgggcgaaaaagcctacgaacaggcagcgggatttttacggattcgtcaggccaagcatcccctggacagttcgggagttcacccggagcgctacgaactcgtcgagcaaatggccaaggatttgggtgcgactgttaccgatttgatgagttcggaggaactccgacagcggatcaacttaaaaaattacgtttctgagcgagtagggattccgactctagaggacattttacaagaattggccaaaccggggcgagatccgcgggagagttttgaggtcttccagtttgaggaaggggtcaatagcatttctgatctgaaaacaggaatgaaacttcccggtgtggtaaccaatatcacggcttttggcgcatttgtggatataggagttcatcaggatggcttggtgcatttgagtcatttggctgatcgatttgtcaaagatcccaatgaagtgatccaagtcaatcaaaaagttcaggtgacggtaatggaagtcgatgctgcccgaaagcgaattggcttgagtatgaagtcggatcccttcgctgagcgtgggaaaaagatggccaagcctgaagaaaatcgatcagcaaagcccaaccaaaaagaacctagcatggccgagaagctggcgatgctgaaggggaagtttgggggttgacttttatgaaataaattcaaaattatatgaaatgcagaatatattgttcgaaaatatctaaataattctacgacaatctctgtcaaattattaaaaacttaaaaaataccctgtactgggtatttttttttggattgaagttcctattttgctcctgaaactaaggagtaaaaaaagacgaccccgaaagaatgaatctatcggggccctcttaaatgttttcacaacggaataatccttattgtgaattgcttcaaattgataatgctaatatagattttaaactttaaacttttataaaaccatgaaaaagattttgggattggatttggggactaactcgattggatgggctttgatagagcaagactttaaagaaagagaaggaagaattcttggtatgggatctagaattatccctatgagccaagatattttaggtgaatttgaaaaaggtaattctatttcacaaactgctgaaagaacgaggttaagaggagtcagaagactaagagaaagacatttgctgagaagggaaaggttgttaagggttttaaatgttttaaactttctacctaaacatttttcagatcaaattgattttgagaagaatctaggaaagtttattgaagagtctgaacctaaaatagcctacaatacggaagggttcatttttaagaattccttcgaagaaatgctaaatgaatttaagtcaagtcatccagaattagttaagggtggaagaaaaattccttatgattggacgatatattttttaaggaaaaaggctattacagaaaaagttgaaaaagaggaattggcttggttaattctgaactttaatcaaaagagaggatattatcaattgagaggtgaggaagatgatgagaaggcaaataaactcgaagaattttattctttgaaagtaattgaaattacagcagacgaaagtcctaataaaaaaggagaaacttggtattctttgatattggaaaatgggtgggtttatcgaagatcaagcaaagtcccaatggatgattggcttggaaaaacaaaggatttcattgtaaccactgatattgatgaagaaggaaatgtcaaacttgataaagaaggaaatgaaaaaaggagttttcgagctcctagcgaagatgattggggactaagaaagaaaaaaaccgaaaaggaaataaaagactccaacaagacggttggagagtttatctatgataatcttctttcaaatccctctcagaaaattaaaggagacttaattaggacaattgaaaggaagttttataaaaaagaattaaagtcgatattaatttcccaaaaacgttttcattctgagctgaatgatgaaggggttttgtcagactgtatcagagaattgtataaaaacaattattcccatcaaagccttcttcaaaaccaggatttgattcatcttttggttgaagatattatattttaccaaagacccttaaggagccaaaaatcaacaatttccaattgtccattggagagcagagtttttatgaaggatggaatagaaaatgtttcaccaataaaggttgtttcgaaatcccatccattataccaagaatttaggttgttgcaatggattaataaccttaggattattggaattaaagatgaaaaatatgtgaccgaaaaatttcttggagatatagaccagtatgaagaactcttggattttttgatgaatcagaaagaaattgattgcaaaaatttaatgaagttctttcttattaaggaagggcttaaagggaaagaattaaattcagaaatcctaaattataaatggaactatgtttatgatgtagagaaaggcgagtcaaaagtatacccttgtaacccgacaaggtttgagattttgaagagacttgagaaagttgaaggttttgatttcaagaactttacaagcgaatttgaagaagcattatggcatgtaatttattcagtaactgataaagttgaatttgagaaagcattaaaatcatttgccagaaagaaggatctcgatgttcaatcttttgttgattcgtttaaaaaaattccgccttataagagtgattacggtgcctactctctcaaagcaattaaaaggttgattccattgatgaggtttggttctaattggagtgcagaaaaaattgagctatctaccttagaaagaattgataaaatactaaatggcgagtatgatccagaaatcaaggataaagtgagagatctttcaaaagaattcacctctgttgaagatttccagggattacctatatggtttgtaaattacttggtttatggtagacattctgaggcttcggaaatcaccaaatggaattcaagtgagggcttggagtcatttattaaaggtttcaaacaacattcattaagaaaccctattgttgagcaggtaatagttgaaaccctgagagtggtaaaagatatatggcttcagtatgggaatggaaataaagacttttttgatgaaatccatgtagaattaggtagggatatgaaaaatcctgctggcgaaagggaaagactttcaaaagtgatttcagaaaatgaaagcacaaatcttagagtaaaagcattgttagttgagcttttagaagatcctgatgttgataatgtcaggcctttttcgcccatgcagcaggaaattcttaaaatctacgaggaaggaattttaaaatcaagtattgatgttccagatgaaattttgaaaatcagtaaaactgcccaaccatcaagatcggatttacagaggtataaattatggctggaacaaaaatacatgtcaccttacacaggtaaagtaatccctttaaataaacttttcacctcagcttatgaaattgagcatgtgattccacaatcaagattttttgatgacagcctaagcaataaagttatttgtgaatcggctgtgaacaaacttaaagacaaaatgatggggttagaattcattaaaaattttcatggacaacgggtttctttgggaatgggagaagaggtcgagattttttcagaaagtgctttcaagtcatttgttcaagataattattcaaaaaatccagctaagaagcgaaagttattgatggatgaattaccagagaaaatggtagaaagacaaatgaacgatactaagtatataagcaagtatgttacctccattttgtccaatattgtgaggtcaaatcaagatgattctggattcaattcaaaaaatgtaattcctggtaatggtaaaattactaacgaattaaaaaatgattggggacttaatgatatatggaacgacttaatacttccaagatttgaaagaatgaatcagatcaccgcgagtaatagttttacatcatggaataaaaaacatcagaaatttttacctactgttccaatagagtattcgaaagggtttcaaaagaagagaatagaccacaggcatcatgccttggatgctttagtcattgcctgtgctactagagatcacgtgaattatttaaacaatgaacatgctttaggtaagaaatatagaggtaaggaggaaaagcaacaaagaagatttgaccttaaacacaagctttgctacaaaaaaactaattccaacaatgccaaggattttgattgggtttttcataaaccttgggaatcatttacgtccgacgcaaaagaaaatttgggaaaaattactgtgagcttcaaacaaaacttaagagttatcaacaggactacaaataaatatcagagctattatgacgaggaagggaatattagaaaagataaaaatggaaatcctataaaaggactaaccgcccagataaaaggtgattcatgggctattagaaaggcaatacataaggatactgtttcaggtctggtagaattaagaaaggtgaaaacagttccattgagattagcattagatatccattcggatctattagataaaaagctcaagaagaaaatcgtagaactaaaaaatctaaactatgacaataaattgcttttaaagtattttaaagacagaggttttaagtttgaagaaaaggatatttcaaaggtggatgtttatttctttgataaagatttagcagcatctagagttagcttagacacttcattttcagagaaaaagcttcattcagttactgatacaggaatacagaaaattctacttaatcatttagagaattataaaggggttaagaatgacaaaggagaggttatagatcccgaaacattggcatttacacccgaaggcattgaggaaatgaataataatataataagccttaatagagggaaattccataaaccaatttataaagtaaggacttatgaaccaaaagggaataaatttccagtaggttatataggcaacaaaaagtccaaatttgtagaagctgctaaaggcaccaaccttttctttggaatttatgtgaatgatgaagggaaaagaagttatgaaacaattccattcaatattgtaatggaaaggcttaagcagggagaggaaccagttcctccattgaatgaaaaagaagatagacttttgttttatttatctccaaatgatttggtttatgttcctgataaagaggaaagtatagatacaatcgattttaataacctttcaaaaaatcaggtttgtagaatttataaaatggttagctgtactgggccagaatgccattttgtaagagctgatatcgcagcattaataaaaaattatgattccaaatcaaaaattggtgagctcggaagtttaaataagcaagaattaacaatcgaatcggacaaaagaattaaggagtgttgcataaaaataaaagtaaatagattaggaaagataaataaataggaaaaacataaatgggaccatctaaatacttcgatacctataatgacgctattagcatggaggatggttaccaaaaaaggatttttataagtgctttcttcaactcatccaaagttctaaaactttggatgagtttacccttaagctagtcgttataaaattaaatttatggagctaggacgatcctatcatatctacaatcacgcaaacggaatggagaatatctttcgtgacgaagagaattataggttctttcttcagcaatatgtcaagtatttgagtggtgtggtagatacttatgcctattgcctgatgccgaatcatttccatttgctggtgggtgtgatggatgaagagcaattgatgtcaacttttccaaagttcgaaactttagaaaagttaatctctaagcaattcgctaaattctttagttcttacactcagtcgtttaataaagtttataatagaaaaggaagtttgtttattaagaacttcaaaagaacccccattattgacgaacaccaatggcaggagacttttatatatattcatctcaatccagttaaacatggttttgtcaaagatcatcctgattggaaatggtcgagttggcatgcttaccaaaatttaaataagacttcaaatttacaaagagcctattttacaaatttctatgacggttgggaacatgtggagaatatgatgaaaatgaaaaaggaatggttaatgaataaaaatttggaatagtggatcaggtaacttttccaaagttctaaaactttggaaaagttgactcctgccaaaatttaaaaacatgatcaaaagaacccttttcttcggtaatccagcctacctaagtaccaaaaatgagcagctgcaaatttcttttcccgaaggggataaaccggaccgtactgtccctatcgaggacttaggtatgattgtattggaaaatcaacagatcacgatcaccaatggccttttggccaaactcactgatcgtaaagttgcggtggtatcctgtaatgcccaacatcttccagaaggactgcttctcccgatgcaaggacacaccgagcaaaccgagcggattcgatatcaattagaagcatcacagcctttgaaaaaaaatctctggcagcagaccatcacagcaaaaatcaaaaatcaatattcccttttacgggaaaaaggaaaggaatcgaagcggatggaatacctctataaaaatgtcaattcgggagattcaggaaatcacgaggcccaagcagcggctatctattggcaaaaattatttgagattccagattttaatcgaacacaggctggagttcctcctaataatttattgaattatggctatgccgttttgagggctgttgttgcgagggcattagtttcatcgggaatgcttccgggagttgggatttggcaccgaaataaatacaatgcctattgcttggcagatgatatcatggagccttaccgtccatatgtggatttggtagtttctcatgtggtagaaacgcaagatgattttgccgaattgaccaccgatttgaaaaaggaactgttaagtattcccgctttggatgtcaaaatcgatgggcaaaaaagcccacttatggtagcagcttccagaactacctcttctctgtttgagtgttttgcaggaatcagtagaaagatcatttacccggaatatggatgaaaagtacttttcaagacttaatcagtacaggagtttgtgggttttagtcttctttgacctgcccaccgaaactcgcaaggatagaaaaatcgccacttctttccggaagaagttattggacgatggttttgggatgtttcaattctccatttacatgcgtttctgtgcaagcagagaaaatgctgatgtgcatatcaaacgaaccaaaaaaaatctcccacccaaaggaaaagtgggaattatgtcgattaccgataagcagtttgggatgatggaggtgttttttggaactagtaagcaggagaccgaagcacctacgcagcaattggaattgttttgaacctaaacttttccaaagtttaaaactttggaaaagttaaaacttgcccattcttaatatgggacttcccaaatccaataattttttaaatcctagaatagtacataaaaaacagcataccagccannnnnnnnnnnnnnnnnnnnnnnnnnnnnnnnnnnnnnnnnnnnnnnnnnnnnnnnnnnnnnnnnnnnnnnnnnnnnnnnnnnnnnnnnnnnnnnnnnnnnnnnnnnnnnnnnnnnnnnnnnnnnnnnnnnnnnnnnnnnnnnnnnnnnnnnnnnnnnnnnnnnnnnnnnnnnnnnnnnnnnnnnnnnnnnnnnnnnnnnnnnnnnnnnnnnnnnnnnnnnnnnnnnnnnnnnnnnnnnnnnnnnnnnnnnnnnnnnnnnnnnnnnnnnnnnnnnnnnnnnnnnnnnnnnnnnnnnnnnnnnnnnnnnnnnnnnnnnnnnnnnnnnnnnnnnnnnnnnnnnnnnnnnnnnnnnnnnnnnnnnnnnnnnnnnnnnnnnnnnnnnnnnnnnnnnnnnnnnnnnnnnnnnnnnnnnnnnnnnnnnnnnnnnnnnnnnnnnnnnnnnnnnnnnnnnnnnnnnnnnnnnnnnnnnnnnnnnnnnnnnnnnnnnnnnnnnnnnnnnnnnnnnnnnnnnnnnnnnnnnnnnnnnnnnnnnnnnnnnnnnnnnnnnnnnnnnnnnnnnnnnnnnnnnnnnnnnnnnnnnnnnnnnnnnnnnnnnnnnnnnnnnnnnnnnnnnnnnnnnnnnnnnnnnnnnnnnnnnnnnnnnnnnnnnnnnnnnnnnnnnnnnnnnnnnnnnnnnnnnnnnnnnnnnnnnnnnnnnnnnnnnnnnnnnnnnnnnnnnnnnnnnnnnnnnnnnnnnnnnnnnnnnnnnnnnnnnnnnnnnnnnnnnnnnnnnnnnnnnnnnnnnnnnnnnnnnnnnnnnnnnnnnnnnnnnnnnnnnnnnnnnnnnnnnnnnnnnnnnnnnnnnnnnnnnnnnnnnnnnnnnnnnnnnnnnnnnnnnnnnnnnnnnnnnnnnnnnnnnnnnnnnnnnnnnnnnnnnnnnnnnnnnnnnnnnnnnnnnnnnnnnnnnnnnnnnnnnnnnnnnnnnnnnnnnnnnnnnnnnnnnnnnnnnnnnnnnnnnnnnnnnnnnnnnnnnnnnnnnnnnnnnnnnnnnnnnnnnnnnnnnnnnnnnnnnnnnnnnnnnnnnnnnnnnnnnnnnnnnnnnnnnnnnnnnnnnnnnnnnnnnnnnnnnnnnnnnnnnnnnnnnnnnnnnnnnnnnnnnnnnnnnnnnnnnnnnnnnnnnnnnnnnnnnnnnnnnnnnnnnnnnnnnnnnnnnnnnnnnnnnnnnnnnnnnnnnnnnnnnnnnnnnnnnnnnnnnnnnnnnnnnnnnnnnnnnnnnnnnnnnnnnnnnnnnnnnnnnnnnnnnnnnnnnnnnnnnnnnnnnnnnnnnnnnnnnnnnnnnnnnnnnnnnnnnnnnnnnnnnnnnnnnnnnnnnnnnnnnnnnnnnnnnnnnnnnnnnnnnnnnnnnnnnnnnnnnnnnnnnnnnnnnnnnnnnnnnnnnnnnnnnnnnnnnnnnnnnnnnnnnnnnnnnnnnnnnnnnnnnnnnnnnnnnnnnnnnnnnnnnnnnnnnnnnnnnnnnnnnnnnnnnnnnnnnnnnnnnnnnnnnnnnnnnnnnnnnnnnnnnnnnnnnnnnnnnnnnnnnnnnnnnnnnnnnnnnnnnnnnnnnnnnnnnnnnnnnnnnnnnnnnnnnnnnnnnnnnnnnnnnnnnnnnnnnnnnnnnnnnnnnnnnnnnnnnnnnnnnnnnnnnnnnnnnnnnnnnnnnnnnnnnnnnnnnnnnnnnnnnnnnnnnnnnnnnnnnnnnnnnnnnnnnnnnnnnnnnnnnnnnnnnnnnnnnnnnnnnnnnnnnnnnnnnnnnnnnnnnnnnnnnnnnnnnnnnnnnnnnnnnnnnnnnnnnnnnnnnnnnnnnnnnnnnnnnnnnnnnnnnnnnnnnnnnnnnnnnnnnnnnnnnnnnnnnnnnnnnnnnnnnnnnnnnnnnnnnnnnnnnnnnnnnnnnnnnnnnnnnnnnnnnnnnnnngtgctcatgaatctccctttggtcgatttgaaagcaattcacaaccggctcctaaattgccgattgttcccgatttctgtgatttccctagaaagatttaaatttagtttgcagtttatcaatttctaaattagctcataaattcaccttcggtcaatttgatgattttatgatattggaataaaaataaaaaccagccaggtttcagaatcctagctggtttaactccttagatttattcttttaattattatatcttctgccgcctctgcggtcatcgccggaatccatcagatcgcgataatcttcttcgctggttcctttggcaaatcgacggatattgtaagagaaggtaagcataaaatagcgctgcagtacatttgactgaatatcttcgatataagtatcggtaatgtttctacggatattgttgttttgacggaataggtcatagacattaaccgaaatctctccgcgctgattgttgaagatctttttacccaaactcatattcaccaaggtaaagctttggtcaaatccctcggaaagacctttgttgacctggtggttgatatcagttcggaaaataaaaccttcccaaatgatccagttgaaattgattctcgcccgctgattgaagaagttattatccaaatttgggttgagcgtattttctacattgttgaaagacatccgcgtccaaaggttgaagtctatctgatcactgatattgctgcttagtgagattccggtgctgagtcttctcgagttgttaaatccatattcgttgtttaccagagtcggacgcttggtatatcccgcaccggcgttgatgtttagattggacttgatgaagtccaaaggcatcccgtaactggaccatgatctgaaatcccaatatccatccaagttgaccgggctgaaaagctgagatccgggctccaagataattccagactggatttcagtagcttcatctgcgataaaggaactgtttgctacggtgttgttgacaaaagatgaaaacgcataaaggaaccaagattggtcagtctcagggttattgcttcggaatctcattctgaatcggtgtgcaaaagactggttcaaccccggattaccgacgtaaagttggagtgggttagaattatccactaccggctgcaactcccgaagtcccggttcattggcccgagtatcgtagtcgaagtttaggcttgtgttttcggtgatttgataatttaatctaaatgaaggctgaatgctttcgaatcttctgttgagctcaaaaggatcaggaaatccctgggtattgtccagcttggcattttgatattgtacctcagcctgcattcgaactttttcggtctgatattggtagccgagttcggtttcctgagtcaggaatttgctttcaaaggtattactcaaggtagtatcaagtacaaactccggctgggtaggatcttcttcaaacacatcaaaaatcaattgatccgaatcattcaaccgattcccgatttcgtactcgagttccaactgacttttttcgcttaatgcctcggtaaatgaaactccggtttcccaagaagaaccacttctatcccggttgatttgctggttgatgatttcggttcgtgaatcaggaacaaaatactgatttgttgccaatcggtttgcccggtcttcattccagttttcactgattctacctcggaaagtaaatgttcttcctggtttatcaaatttgtgactgtagaaaatccggttgaaaatatcaaaatcacgattttctgctgtccgcatattttctactgaattgatcaggttagttccatcggtagtttctccgaaaaagtctgaattttccgtttcgaatcgtgcagaaaatctcgggataaatacgattcggtttttctcatcgatatcgtattccaaacgcatatcaaactgatgcctgttgttaagtcgtacatcattggccacctcatcgtaaagctgatcagaatcgtcgctggtcaaaaactcacgaaagcggatttcctggccgatattttctcttgaagagtataaataacttcccgtcacctgaattttgtcaccccaagtgtcagtataattcattcctagaatattggtattaatgactccgttttgcgggcgtgcattatcttgtgcatttgggtcggaagaaaaatccgttacgttgacattgttggaaagaccagtgatggtaattcttcgatcatcattgaaatcgttgatacttgctcctgccaaatagcggtcatcggtaccgtagcccgccgatactctaccaaactgaccttttctacggttaggtttggtgatgatatttactgtcttgagtcgctctccatcatcaaatccgctcagtctggctttttcacttaactgatcaaaaatttcgatcccttggatcacttcagcaggtaggttttgaagggcagtccgaacatcagttccgaaaaatggctttccatctactaaaatctgaccgatattttcaccctgagcttgaagcgctccatcttgtgaggtgacccccgggattttctccaataaggtttgtgcacttgcatccttcatggttttgaacgcgtcggcattgaatagggtagtgtctgatttattttgactggttgatcttcgagcctggattgtaacttcctcgagatcggtatcttcttggcggatattgattgtccccaggtctacatcttgcgtcatgttgagcgacttgaaataactttcatagcccaaatactgaatttttaaaatgtattctccctctctaatatccttgatttcgaatttgccatccaaatccgagatgattccatcgacttggctggagtctccatcattgagcaggagaacggtggcattggggatagtactggaagttccggcctcttggattcttcccacgatcgaataacgctgcgagaaggccgatatgcttagcgttaaaagaaaaactaaggttaaataaattttcatgtagttggttttttttcatttggcgcaactgagttttttttccgtttcgccaccacaaaacaagcaagttgtaagtaaaatgttttcgctttttggctaaacggttaatagagcaaatgaatagtagaccgatcatgtaaaagatgctgaatatcattgagttatagaattttgaaggaattctgaagttttatgacaattcttgtcagaaaataatgtttatttaagcatcatcaatatgtttattaaaacaacatttttatcttagtgtcctgaatgatagatgatatgaaaacaactgaaaaaattaacatcacgaccaaaaatctggcttccggaaattgccaggttaaatttttcgtagaagatgaacagaagccacaatatggttatttgttgatttctgagcccaagccggtgggagagattattttggagatccaaaatagattggcgcagaggcaagcggcgaaacagaatatcaacccgctttttccgatcgaaccggtatctgaagatcataacttttatctcttttcggcatgagttacttagcttcaaaccttcgctttttgcgaaagcagaaaggcatcactcaaaatgaactagctgagcagctggatgtacagcgaacgatgatttcagcctatgaagacgggcgatccgaacccaaactggcaactttgaagcggatcggtgagctattggaaatcgggattgaggagctactggagcatgatatcgaaaagcttgggagaaaagcactccaaaatcggggaattaatattcttactatcgccgctgatgaaaatgataatgaaaatatcacgctagtcgggcaaaaagcttctgcgggttatctcaatggttttgctgatccagaatatatggaacagttgccgcagtttcatttgcccaatctatccaaacaaactacttatcgggcctttgaattagccggcgattccatgctgccactgatatctgggacgatagtcatcggtgcatacgtggatcagctcagatcggtaaaaagtggacgaacctatatccttgtgacccaaaccgaaggagtcgtgtataaacgggtatttaattatttggaggaaaacggaaagctttttttggtttcagacaatgagcactacaaaccttacgaagtgagaggagaagatgtcttggaagtctgggaagccaaagctttcatcagcactgactttcccaatccgggagacaaaaagaaagccttgagtctggaggatctgggtgaaatgatccgggatattcagatcgatttgaagaagctgaggaaatagatgttcggttggttcctggggagctcggccaacttgaatttggccaaattcagcctctaaccgagtaacatatcttcaaagcgctgttggatttttcctactgcatcaaaggccggatcgatattgaccactcctttgcctaactcatgccatagcccatccccgcagtcgatgtatgcacccggtttcgttccaggtgcttcttttgcaatttcataatgataatccggcgtaaaaatcagtttcatcaactgaattgaataatcccagttgagcgcctgacttttttctccctgatctaaaatcacagttcggttggaaaaatgcacggtgatcgtacaatccagcgtattttcttctgtaactagtcggtaattaatatgaagtggggcttcttttttggtggattcgtagatcgcctgaattagatcttgtgccatcagctgccaaacctcctgacttagtggtgttttcggaacagaatcctcattgaggtaaagaattatcccgccttcgtccagttgtcgaggtgaccatttggtttcagtcagtaactcctgtatgggttcgatccaaatggagttcaattctccctcataatgataatcgtcagaaagggtaaagccctcatccaaaatttcctgctcgctcaattcgtcccgatccgtataatgcagatccagtttgactttcaggatggactcactccagtccaattccatgtggaaaacatggctgtaaggtggagggataattcctgaatcgtattcgagtgtgagtttttggatatcttctttagagaacttcattttttaagctttgcacaaaagtatattttttcaagcaattaagatcttactttgcagtctaaacccattttcatggaagataatctcgatcgtatagtcagtggaatttatgaaaattcatttgcagtcattgatgactttgttgacgaaattttccgaaaggcactttttgacgagcagacggatctgttggagagtgggaaatttcgaaaagcagctatcggtacgggagatcaaaaacaggtgaaacctgaaattcgcagtgatgaggtgctttggatggagcctgacaatctgagtattctccagtcggaatattggcatcgagtggatgcaatcaaattggcactaaatcgaagatgttttttaggacttcagtcttttgaagcacattttgcccgctatccgatcggatctttttacaagcggcatttggatcagtttcagcaggtttcctatcgggcggtgaccgtcattctctacgtcaacgatatatggacagcccaagacgagggagcattgagaatgtatctgcctaaagaaaatggtaaggaagatgtgctggatattttgccgatgccaggcagattggttgtttttctgagcggagagatccctcatgaagtcctgccgaccaaaaaggaacggaacagcattaccggatggcttaggacgatttcctagcgaagtttgatttctacttttttgacctgattggaagaaagcgaaaccgcacagcgatc

SEQ ID NO: 1085 - DNA, 24593 bp, synthetic construct
  source 1..24593: mol_type = other DNA
  misc_feature 1..24593: note = Synthetic
tgcattgctggctccgtatagttcgtacggacggatcgcccagaaccttttgactccgttctgggcttggggaaacaatctgtttgcatatatcgccgaacgtgccgacagttatgctttttacgaaaaagaggtatggtttaaatctttgccgacctttatcattgcacttgtcactgtggtatgcctggcgatattggcttggcgtaacggacgtacttattgcaatacgatttgccccgtaggtacggtgttgggattcttttctcgcttttcatggatgaaaccggtaatagataccgataaatgtgtcaattgcggactgtgtggacgtaattgtaaagcggcatgtatagatacgaaaaatcatacgatcgattattcccgttgtgtttcctgtatggactgtctggaaaagtgccatacgcatgcaattcgttacggtagaatgaaaaaggcggagcctgttacgtcggaaagcaaaacggtggatacttcgcggcgtacattcctcacgggggtaggtgtattggcggctacggcagctgtgcaggcacaggaaaaaacggtcgatggcggtttggctgcgattactgataaaaagatacccgatcgggctacgcctatcgttccgccgggagcgcaaagtttacgccatatggcacagcattgcaccggatgtcagttgtgtgtttctgtttgcccgaatgatgtcttgcgcccttcgacgaaattgacaaccctgatgcagcccgaagcctcttacgaacgggggtattgtcgtcccgaatgtgtcagatgctcggaagtgtgtcctgcgggagcaattctgagaattacccctgccgataaatcggcgatacagatcggacatgctgtttgggtgaaagacaactgtgtgccattgaccgatggtgtggagtgcggcaattgtgcccgtcactgtccgaccggagcgattactatggtggcgtccgatctggaagatccttattctccgaagatcccggcagtgaataccgagttgtgcataggttgcggtgcgtgtgaaaatttgtgcccggcacgaccgttcagcgcgatttatgtagaggggcatactcatcacagaacgatttaatttgaaatgacgatgaagacgaataaagatagaaacgatggattgaaccgtcgggaattcttgaaacggctgggtgccggagccgcagtctctacggttgtattggctggatgtgattcgaagaataattccatatcgggcgatcgttcggttcagggcgagattccgaccgaccgaatgacttaccgcacgaatccttcgacaggcgaccgtgtatcgttgctcggcttcggtatgatgcgtttgccgtcggttggaggacgtagtgcgcgggaggggaacgaggaaatagaccaggagttggtgaacgaactggttgattatgcgattgcccacggtgtaaactatttcgatacgtcgccggcatattgtcggggaatgtcggaacgggctaccggtatcgcgcttagccgttatccgcgcgataaatattttatcgctaccaaactctccaactttgcgcctgcgacatggagccgtgaggcttccattgccatgtatcgcaattcgttgaatgagttgcaggtcgattatattgattatctcctgttgcatggagtcggtatgggcaacgggatgaaagatatggaagcacgttatatcgacaacggtgtcctcgaatttctgatggaagagcgtcgtgccggacgcatccgcaacctcggcttttcataccacggcgatgtgaaagttttcgattacctgctttcgcgtcacgattattataaatgggattttgtacagatccagttgaattatctcgattggaaatatgccaaacagatcaatgtgcgcaataccgatgctgagtatctttacggcgaactggcgaagcgcaacattccggctgtgatcatggaaccgcttttgggcggacggttgtcgaatgttcccaatcggatcgttgcccgtcttaaacagcgtgaacccgaaaagagtgtcgcttcgtgggcattccggtttgccggaagttttcccgatgtcctcaccgtattgagcggcatgacccgtatggagcatttgcaggataatcttcgcacctatgcaccgttggaaagtctgaccgacgatgaatttgatttccttcaacgtatggcggcgcagatgatggagttcgatacgataccgtgtaacgattgcaaatattgtatgccttgcccttacgggctcgacattccggcaatattgttgcattacaataaatgtatcaatgacggaaatgtaccggtatcgtcgaaagatgaaaactatcgggaagcccgccgggcgtatctgatcggttatgaccgcagtgtgccgaagttacgtcaggcaaaccattgcatcgtctgcggacaatgttcaccccactgtccgcaacgtatcgatatccccaaggaactgagacgtatcgacaaatttgtcgaggatttgaaacagggaaaagatctttaattgggatgaacgttttcgataagccgagagcagaggcgaacttgttcgggctatgccgaggcgagaaaaggtgcatgataatgaacgttttcgataagccgagagcagaggcgaacttgttcgggctatgccgaggcgagaaaaggggcatgaaaaagaacatttattccgataaaaacgttaaaatatatcgggatttgtatctcgtgagaaccgttgaggcgaaataagaatatgacacaggaatcgaaacagcaaattataaacttgcttcaatccgaacagtgttcgtgcgtgattcgaaaaggtgatacgatccgtatctttcggaagcgtggagtacaggatctttatcgtttgttgaaagatgatcccgattttctgaaaggggcttttgtcgccgacaaagtggtgggcaaggcagctgcggcattgatgatcttggggggcgtagaagaagtctttacatttaccgtaagccgattggcgcgtgatttgttcgagcggtcggctgtaaaactcggtttcgctcaggaagtgccgcatatcatcaaccgtgcaggaacgggctggtgtccgatggagagccggtgccgagatctggatacaccggaaacctgtttcggacaagtagaagaatttttgaatacaatgaaagaaaataaatgagaatcagatccttatttttacttttgttgctatcggaatgtgcatgggcgcaaaccgacactacgggaatatccggcaagaaaatgccgcttcccgatcggcaggaggaacgtgcttatgcgataaatgaagtggtcgttaccggtacacgtaatgaaacggacatacgtcatctgcctatgaccattacgatcgtaacccgtaaaaccatcgaggaaagtttacagccctcgttgctgccgatcctttcggaacaggtaccggggttgtttgtgacttctcgcggtattatgggatatggtgtttcgggaggtgcagccggtacgatcagcctacgcggattgagcggcggtgccgggcgattgatggtgttgatcgacgggcatccgcaatatatgggcatcatgggacatcccatatccgacgcttaccaatcgtttttggctgagcaggtagaagtcgtgcgaggtccggcatccatgctttatggatcgaatgcgatgggtggagtggtgaatatcgttacacggcagatacgcgaagatggtgtgaatacgaatatcggtttaggttcggggtcgttcgggacattgcagaccgaagctacgaaccagacccgtttcggacggttttcgagcaccgtaagcgcatcgtataaccgtaccgatggacaccggaagaatatgggattcgagcaatatgggggatatgccaaagtgggctatgaaatatcggacaactggaatctgagggcggatgtgaatgtaacccatttcaacgcttcgcagccgggcagcctctctacaccgttggttgatgccgatcagagtattacgcgcggaatgacttcgtttgccatagagaacgattatgaatatacgtcgggggctgtgagctttttttacaactggggcgatcattggatcaacgacggttatacagccgatcctgacgaccagaacgatccgaagatgtatcgtttcgactcgaatgacgaaatgatgggcgtttcgctctatcaaagcggacagttgtttaagggtaaccgcttgacggtgggcatggattatttccatttcggcggtacggcatacaatcgtttcgtcgagggagcacgtaagggagagaaagtcttgcaggtcgataaacgacaggacgaactggcagggtatatcgattttcggcagcatataggatcgtggcttacgttcgatgccggagtacgggtcgatcaccatttcgatatcggtacggaatgggtgccgatggcagggctttcgtttcatctgccttatgcaatcgagatgaaggcttcggcaggaaagggtttccgttatccggtgatccgcgaaatgtatatgtgggggacggcgaatcccgatctgaaaccggagtcgatgtggacctacgaaatagctctttcgcaaaagctgctcgggggacgattgacctatggggtgaatctgttttatatcgacggcgaaaatctgatcgtgaccgtacctcgggagaacggcggtggctcggtcaatgtcaattccgggaaaatcgacaatgccggtgtcgaacttcaatccgcatatcgtatcgatagccattggtcggtagatgccaattacagtttcctgcacatgaaaaatccggttgtcgctgctcccgaacataaattgtatgtcggtggggcttttacctatggcgactggatgctttcgaccgggattcagtacatcgacggactatatacgtcggtcgatccgatagaaacggaaaacttcgtattgtggaatctgcaatgccgctatcgggcgaacaaacacctctccgtatgggcacggggtgaaaacctgttggcgcaacgttacgaaataaatgccggttatccgatgccgaaggcaacggttatggcaggtttgaatattcacttttaaaatcaatttatatggaatcaaccgtaaaactttattctttggaatataaggcagccaagacctattgggtggcagcactttttgttttaggaaatatcgctttgccgcagttgtgccatttggtgcatttgggcgggcctacttggttgcctatttatttcttcactctgattgccgcctataaatacggatggcgggtaggattgctgacggctgtcgcatcgcctcttattaactcggcattgttcagtatgcccgcagcagccgtcttgccggcaattctgttgaaatcagtactgttggctactgccgccgggtatgctgccgcacattttcgtaaagcttctttgtggctgttggcttcggttgtgctggcgtatcaggttgtaggctcgttgggcgagtgggcgatgaccggttctttctatgctgctatgcaggacttccgtcttggagtgccgggcatgttgttgcaaatattcggaggatgggcggtaatccattgggtgatccgacaataaagcacggaaaatattcttgccggaaacgaatatcggcgggatatcagtgttgagtgggcaaagagacggaacgacatccgtcgccgataaaagaacatttgatagaaacgacaatgaaaaaatatagatatatgctattactttctctcctcccgttgtcggcaataagttgcgcgaatgcgggaaagaaaacgaatacggaatccggacttccgaaagtgtatatgtactccgaaatatcctccgaaaatctggtgaagatttacgaggcattgggacgcaaagccgaagggaaggtggctgtgaaactgtctactggcgaaccgggtaacaacaattatctgaatccggatttgataaaagatcttgtacggaaagtgaacggaaccatcgtcgagtgcaatacggcatacggtggtggtcgggcagataccgaaaatcatttgaaagctgctgccgatcatggatttacggcgattgcgccggtcgagatcatggatgcggagggggaaacgtcgctgccggtaaaaggtggaaggcatttgcaggaagattttgtcgggaaaacttatcccggttacgatttcaccgtagtgttgtcgcattttaagggccatccgatgggcggtttcggcggagcgatcaaaaacatcgctatcggcattgcctcttcgcagggaaaggcgtggattcattctgccggtaaaaccaaaagccagacggaagtgtggaataatctgcctccgcaagacgactttctggaatctatggcagaggcggcaaaggccattaccgatcattgcggcgaccgtattctctatatcagtgtggcaaacaacctgtcggtggactgcgattgcgtggcggaacccgaagacccgaaaatgggcgatatagggattctggcttcactcgatccggtagcattggataaagcctgtaccgatatggtacgcgcgtccgaagatcatggaaaaatccatttgatcgaacgaatcgactcgcgcaacggtatgcacacgctcgattatgccgaacagctgggtatgggtagccagcaatatgaactggtaaaactcgattgacggaacgccccggatttattccgtcgctcagacttgttcgggtgggcattatttggaaaataaagacagattgattacattcgtcactctgtccgccttttcaataagccgagagcagagccgaacggggttcgggctatgccgaggcgggaaaaggtgcataaaatgaacattataaaccattaaacaagcaaaaatatggcgacactattattcatcggaggcattggtatgcaagaagtcattctgattgcgttggtcgtattgcttttcttcggaggacgtaaaatacccgaactgatgaaaggcataggcaaaggcgtccggtcttttaaagaaggaataaacggtatagaaaacgacttgaacgatgccggatcgcaaaaagacgaaaagaaagacgataaataagaaatgcggctcatggacatatccgacgaaaagcagaccttttgggatcacttggatatattgcgggcttcgttaataaagattgttgtcgttacattggtgttcggtatcgtggcattcttctttaaggaggagttgtttgccattgttttggcaccgaaagaatccgacttcatcacgtaccgtttgctctcccgaatgagcggttgggtgacggagcaggagtcgcttggttttttcgtacaattgatcaataccggattggcgcaacaattcatcatacacatgaagactgcattatgtgcgggcgtgttgtgtgcttcgccatatatcctgtaccaactgttccgttttgtttcccccgcactctataccaacgaacgcgaatatgcggtgaaagtggcgggtgggggatacctgcttttcataatcggagtgctcgtcagctattttcttgttttcccgctgacattccgttttttggggacatatcaggttagcggagaagtcgaaaacatgattaccttgcaatcctacatcagtacgttgatgatgatgtgtctggcaatgggtatcgttttcgaaattcccatactttcgtggctctttgccaagctgggctttatcacttccgactttatgcggcattatcgcaggcatgcgattgttatcattctgatcattgccgctgtcattacccctacgtccgatatatttacactctcgttggtggcacttcccatgtggctgctttacgaaatcagcatttggattgtgcaccgggtaaaggtgaagtagatttcatccggtgcacaatctgcgaagatcagattttgaaataagccttgatatcccggagcaatgttctgcctttgtagtaggcaggccagtttgtttcaatcgtttttacccccgtgtttttatcgaaaatctctttgaaataaaatttcttattggtattgtcattccggattgtctgttcgaaatcgctccatttcccgatgatgtccgatagttcctgatggatagaagcatcgaattcatccactttcaactcttctttaaaccgatgcgacaggacgcaggtaatggcgaaccgggcgtaggtacggacattcgacgaaggactattgtatttgtttatattttcgaaagccttgtaggcatatatcagacgtctgtaattggaggcatcgggcagaatcgtgtcgaatttcgattttttaaaaaggttgtttacattgctcgaccggacacggatgaggtcgttctgtaccgctaaacaaatacgaatgaactgttcccggtcgataatctttttccgatcgatatatccgtttctgataccgtcaccgaattctccgcgctttcgttcgtaaaacagtccgaaatcctgataaatcaggcgttgcagttcgatttgaactttatcgtttgctcggcggtctgcctccgaaacgggagactgttggttggtcgcaatagaaatcttttcgatcaaacgtaacttgtcagccgaatcctcctcgttctcttccgtgttgaatgagatgattttcaacaggacctctttcccctcgaacagatccaatcgcccgtttgctgtgaagcggtcgtacaatatgctcaatgtgtaagccgtctgtcctccgtttataatctggggattcgtaaccaatatttcagctttattcttcttgcccactttgtcgctgtatatggtttcatccgaaagcattgtgattccattgttgaacaaagcgaattcattggtctggaaatcgatgatcgacgaagctatttgggcattgacgcttccggaagccaggtctaaataacttctgggattgaatttcagtatggcattcttgtatttcgacaagatacgggctatctcgatcgtaggaacgaacaatgcgtttaccgtacaatcgccgtattgtgtcgatggataatattgaatgcggtgtccggcgctgtcccgatcgacgttgatggtgattttcacctctttggggttgtaatagctgcccgagatcaaaggaaataccagttcggaatatactttggcatggttgtagatctgtacggcatatcccccggtcaattttttgagtttcggttcgatcttcgatttcaggttggcaagtagaataatgttatattcgtatttcggcaagtcggagatctcttgcaggctctttatgaagtgcaatatctttccgttataacgttctcctgcttcattctcttcctctccctcgacaatccgttgaatatccatagcaagcaaatcctccatggctatctctttattttcgaaattcttgtccgtgttccggaatttggattggatgaagaataattttttattttccttgtcgataaaataggcatcgataccgccatcaccgggatcgtcggtaataagttcctctcgttgtttaaactccgtcaatccgaatttgactttcagaaacagatggataaaagctctcgaccgtgcattttctattcccgacatattctccgcgtccgggtgataccgtttatgttctgccggggcttcattcctaaacgtgtctattatcttaattaaatcatcgtatttactcatggcacttatttattggttataattgatgaatctttttagaaaaaaaggatgcctcatcacgaaatgaggcacctaaatgttttcacaacggaataatccttattgtgatttgcttcaattagtatactgcaaatataagatcttttacgaactattcaaaatattacaggggttatttttattttgcgatatttttctatctttgaaaaaaataaatgaatattaattttttgattatgaaaaaagtattaggtctggatttgggaccgaacagcactggttgggctgtcgtaaataaagaagaggatgagaacggaggtctgggtcgattaacgggtatagaggcagccggaagccgtattattcctatggatgcggctactttgggcgattttggcaagggaaaaagtatctctccgacgaaagaaacgacacgcttgcgaggcatacgccggttacgggaacggtttttgttgcgtagggagcggttacatcgggtattggctttactgaaatttcttccggctcattatgcaaacagtttagatcgctatggtcatttcttaaaaggaacagaacccaaacttgaatggtataaaaatgaggctggtgaatgggagtttttgttccaagaggcttttgacgagatgctggctgattttaaacgcttttcgtcggcattcgtaggaggttcgaagaagattccgtatgattggactatttattatttgcgtaaaaaagcgctgaccgaaaaaatatcgaaagaggaattggcttggattcttctgaattttaatcagaaacgggggtattatcaacgggatgaggaagaagataccgataatgaaactgtcgaaaggttgaaagtagtttctgtaaccaaaggcgaaaaggagaaaaaaggggggtattggtataatgtgttgttagaaaatggaataacatatcgggcagcatttgctaatgatatatcttgttgggtaggctctgaaaaagagtttcttgtaaaacggttcgaaaaaaaagataaagcacctcagttgtctgttttgccttcgtttgaagagatagacaaaatgagtgatgctcagaaaaacaggctgtatgcgaagataaaattgaagacagaaaagacgatagcggattcgggcaagactgtcggatcttatatatatgatgcgcttttacagaagccgtgtcaaaaaattcgtgggaaattagttcgtacgattgaccgggagttttataaggaagagttgctacggattttggaaaagcaatgcgaatttcatgccgagttacaagatccggaccgttacaaggcttgtatagaagaactgtatccgcagaatggggcgcatcgggacagtattgtcaagcgaggttttgtttatctgtttatagaggatattctgttttatcagagacctttaaaacgcaagaaatcattgatcgccgattgcccttacgaatccgtttgttgtgaggataaggaaacgggtgagaaaaaacattatccgattaagtgtattgcgaaatcgaatccattgtttcaggaattccgcctgtggcagtttatcattaatttgcgtatttataaaaaagaagagtcgcaagatagggatgttacgaacgagttgatcaagacggaggaggattatgttgccttattcgattggctgagcgaaaaggagtcgataaagcaaggtgatttgttgaaattttctcatttcggattgaagaaaaaagagatcggatcttaccgttggaactacgtggaagataaaaattatccatgcaatgaaacacggtcgaagatagtgagccgtttgaagaaatgcgacggaattccggaaaattttccgacccaagaggacgaaatggctttgtggcatattttgtattctgtgtctaagtcggaacttgaaaaagccttgaattcatttgcttcgaagcatggcttgaattctacctttgtggacaactttaaaaagttcccttcgttcaagaatgaatatggaccttattctgccaaggcgatcagaaaactattgtcgttgatgcggattggaagatattggaatgaaacggatatcgacctggcaactcgtttacgcatcgataagatcgtatccggagaatatgatgagacgataagggcgcgggtgcgggaaaaaaccatacacctttccggtatttccgattttaaggggctaccggtttggctggcttgctatgtcgtttacgaccggcattcggaagtcaagtacatcactaagtggaactcgcccgacgacatagatgcttatttgaaagcgtttaaacagcactctctgcgcaatccgattgtagagcaggccgtcttggaaacgctgagaacggttcgtgatatttggaagaaagtggggcggatcgatgaaatacatgtggagttgggacgggaaatgaaagcgccagccgataaacgagctcaaatgacggcgcaaatcgccgaaaacgaggctgccaacatgcggatcaaatatttattgacggaatttctgaatccggatttggagattgaaaatgtccgtccctattcgccgagccaacaggagattttgcgtatttatgaggatggggcattgaacagtgtagcagaaaaaccaaccgagatagaggatatattgaaaaaattgaatgaacgggacgttcagaaacgtccgacaaaatccgaaatcgaaaaatataaactttggttggagcagcattatcgttctccttatacgggggtattgattccgttggcgaagttatttacgtcggcgtatcagatagaacatgtgattcctcaatctcggtatttcgatgactcattgagtaataaagtgatttgtgaagcagaggtgaatactctcaaaggcaatatgctcggacatgagtttattgaggcgcatcatggcgaaaaagtgtcgatctcggatggaaaaacagtgacaatcttatcggtggaagcgtacgagacacaggtaaaggaaacctacgagcggaaccggggaaagatgaaaaaattgatgatgaacgatattcccgacgactttattgcccgtcagttgaatgatagccggtatatcagcaaactggtcaaatctcttttatcgaatattgtccgggaagagggtgaacaggaggcgatttctaagaatgtaattccctgtacgggtggtataacggatcgtttgaagaaagattggggagtcaatgatatttggaatgcaataatcttgcctcgctttcggcgaatgaacgaattgaccgaaagaaccgattttacagcgattaaccaacagggacatgaaattccggctatgccgctcgaattgcaaatgggattcaataagaagcggatcgatcatcgccatcatgctatggatgccattgtcatcgcatgcgccgaccgaaatatttgcaattacctgaataatgaatcggcaagggctggatcggctatatcgcgtcacgatttacagcgattgttgtgcgacaaagtgaaaacggatgataacggaaaatacaagtggctgttgaaaaaaccgtgggatacattcacgcaagatacgaaatcggttttggagcagattttagtaagtttcaaacaaaatagtcgtattatcaataaatcgggcaatcgttattggcattatgtagatggtaaaaaacggttggttgaacaggaaaaaggggagcgttgggtaatccggaaatcgttacatgaggcaacggtttatggggaagtggatttgcgtagagtgaaaactgtttcattgaatgcggcgataaaaaatccgcaggcgattgtcgataaggaattgaaaaaggaaatcttgtcgttattggctgttggatatgacgtagaaaagatcgaaaaatattttgacgaacattgtgatgtttggcaagatgtaaatctgtcgaagatagaggtctattattttacccaagatgcgaatgagcgtttctttgctacacgaaaatcattggatgtcggttttgataaaaagaagatagaaaatattaccgatacagggattcagaagatcctgctgcggcatttggcggaaaaaggagatgatccgaaaatcgcattttctccggaaggtattgaagagatgaaccggaatatcgtccggttgaataatgggaaatcccatcaaccgattctgaaagtgcggatatttaaaaatgccgataaatttgaggtggggcaatcgggaaataaacgttcgaaatttgtagaagcagatcaatggaccaatttattttttgcagtgtacgaatcgaagtctgtggatgaaaaaacaggagcggtcgaacgaaatcggagctttgtcacaataccgttaaaagaagcaatagaaagaataaaagcaggattgccggttgctaaggaagatgaaaacggcaaatcccctatatttgttttgtctccgaacgacttggtgtatttgccgacaaaagaggaattagaaaaaggagaaattggaatacctattgacagaagccggatttacaaattagtagattcaagcgataagactgcgaattttgtaccatatataattgcaaatgttatttattctttaaaaaaggatgttgcaaaagatttttgtaagggggaagatcttatccaaaatgaattgggattaggtagctctcaatctaaaaatcagcgggcatggacatcggattgtgaaatgatcaaaaaaatatgtgtccctgtaaaagtcgatcgcttaggacaaattgtggaaataggtaagttgagttgagccgcgagcagaagaggctattgacttctatttcttattttatcgataatagcaaaaatttaccgatgcgacgatatgtattgtcgtcgtatcggtttgtaattgtgaaaaaatactatgatcaagaaaacactttatttcggtaatccggtgtatttgtcattgcggaacgcacagttggtgataagacttccggaggtagagaagaatgatactcttcccgacttttttaagaaagagattgaagtgactaaaccggttgaagatttaggtgtcgtggtgctggatcataaacagattacgatcacttctggtgtgcttgaagcattattggaaaacaattgtgctgtaatcacgtgcgatagcaagagcatgccggttggattgatgttgcctttgtatgggaatactactcaaaacgagcgatttagaaaacagttggaagcatcattaccgctcaaaaaacaattatggcagcaaactgttcaggcaaaaattaataatcaagccgcggttttgcaatgttgtacccatgaggaggtgaaatgtatgagagtgtgggctgccgatgtccgtagtggagatccggataatatggaagctcgagctgccgtgtactactggaagtatttgtttcaagatatatccggctttacgagggagcggtcaggtatttctcccaatcatctgcttaattatggctatgccatattgcgtgccgtggtggcacgagggctggtcacgagtggtctgttacccactttggggatacaccatcacaatcggtataatgcgtattgcttagcggatgatattatggaaccctatcgtccgtatgtagacgaattggttttcggtattgtacaagaaatcgggcataatgttgtcgaattgacgaaagagattaaagctcggttgttgtctattccggtattggatgtacagatagccgggaagcgtagtccgttgatgattgccgtggggcagacgaccgcctctttatataagtgttttgatggcgaattgcgtcggatatcatatcccgaacggtaatggatcggtttagtgaatatcggatcatgtgggttcttgtattcttcgatttgccgacagagacgaaaaaggacaaaagggcttatgccgattttcgaaaaaatctgcaacgggacggctttacaatgtttcaattctccatatatgttcgacattgtgcaagtgccgaaaatgcggatgtgcatataaaaagggtaaaatcgtttcttccggaatacggaaaagtcggtataatgtgtattaccgataaacaatttgggaatatcgaactcttttatggtaagaagcaacaaggtatttcatctcccggtcagcagttggaacttttttagaacgttttcgataagccgagagcagatccgaacttgttcggggtatgccgaggcgagaaaaggtgcattaggatgaacgttttcgataagctgagggcagagtcgaacagggttcggactatgtcgaggcgagaaaggtgtatggatataaacaataaaacccactatttagtgggctttattgttttgagaacaggactttttttaattctattttgtgatctattttgttgaattatagatagtaacacagatcgcgctgttctctataatgcaaagatactaatttgaaagcaaatcacaactaacgtttgtgcgaacaacagggcattgtgctgttctctataatgcaaagatactaatttgaaagcaaatcacaacccgtggctgcttcatcgatcgccgtgtcgtgctgttctctataatgcaaagatactaatttgaaagcaaatcacaacataattttttcgattgccttttttgattgtgctgttctctataatgcaaagatactaatttgaaagcaaatcacaacatacttggcaatttctactattgtagatatgctgttctctataatgcaaagatactaatttgaaagcaaatcacaaccaaaacttgcatatttggtaaaaaccacagctgttctctataatgcaaagatactaatttgaaagcaaatcacaacgtcgagcagttccttttgccggtctacttgctgttctctataatgcaaagatactaatttgaaagcaaatcacaaccttattcactacacgaaggtggtcgctgcgctgttctctataatgcaaagatactaatttgaaagcaaatcacaacctgacagagaagatacacatactactacgtgctgttctctataatgcaaagatactaatttgaaagcaaatcacaactagcatttcattctcttttttcagcgcgcgctgttctctataatgcaaagatactaatttgaaagcaaatcacaacacgaaataggaatgcattcgtcatcatttgctgttctctataatgcaaagatactaatttgaaagcaaatcacaaccaatagatgttttcattataattcttttttgctgttctctataatgcaaagatactaatttgaaagcaaatcacaacttatgacaaagttttttgcgagtttttttgctgttctctataatgcaaagatactaatttgaaagcaaatcacaacaaccgaagaacttaaagaaatgcaacaatggctgttctctataatgcaaagatactaatttgaaagcaaatcacaaccgttttggtttacttctactttaatctgagctgttctctataatgcaaagatactaatttgaaagcaaatcacaactcctgcgcttgcttctttctcttttgcacgctgttctctataatgcaaagatactaatttgaaagcaaatcacaacaatttagaatttacctttaaaacccgcaagctgttctctataatgcaaagatactaatttgaaagcaaatcacaactgttagtttctgtgttttcggaaaatatacgctgttctctataatgcaaagatactaatttgaaagcaaatcacaactaccacacaacagaacccttataccggtacgctgttctctataatgcaaagatactaatttgaaagcaaatcacaaccatttcaaacgatcggttcatgtactccaagctgttctctataatgcaaagatactaatttgaaagcaaatcacaacagccgagcttccattatcttcttattagaagctgttctctataatgcaaagatactaatttgaaagcaaatcacaaccttctccggctttgacattccatgtaagtgctgttctctataatgcaaagatactaatttgaaagcaaatcacaaccctcaaatctatatacgacggtgaatttgggctgttctctataatgcaaagatactaatttgaaagcaaatcacaacatactatgcgagaatgacagactattcccatataaaagatgcgacacgataccctttgtcgctcttgacaacatcaataatagcgatacgagaattatcaattttgtatcgtagacgtgttattggagttgctttactcttttctacgatggcatcttctgagaaatacactaactctttaccgttgtattctccgcctatgctatcatataatagagtgatatgttctttatgctcattccaccaatcggggatttctacgaatagtgctgcgtcttcgtggaacatggcaaaatgcaaatccatagggaactcaatcttatcaaccaatttccattctccaaaaacgcatgaagtttggaagaacaaatttttatatccatttaggacttttttgccttgcaaaaaatcttcagcttcggcgttgtggactaaaaccatactgaaaatatcgtcattagaccccataaaacacttatccaagtcaaagcggtatttcccatttccaatttcttcaagggctttctcggcaacactttcgggcgagttgcatgatgcaagacatagcatcaatgcgatgattgtaatgagtttgattttcatattaatgcttttaggtatgcaaaggtacgtatttcagtcgatagctgttctctataatgcaaagatactaatttgaaagcaaatcacaacgattcgtcgatcgccacggcatacacatggctgttctctataatgcaaatatagaatttttgaaaacaagttacaactttgggaatgtatcttcgatacgaagcgatgagggaattttgtggttaagcgattagaggagcggactcttccggcattagtcagacaatgccggaagagagttattgattcgagccgctctttgctgtctgattctacttttcgtgcaacggatcatattctccttctgccacaccgcagttgtggaaataaaattctgagcgggctttttcttgggagaaaaggaagtaggtgcagacagcttcgctacacaatatctcttgttcgttgtaaatcccgactgcgacttctacgaggttgcggcattctcgtttgagacgggctcgcaatactattttgctgtcggtcgtataaatcggtttcagatagcgtatctccattttagacgtgactccggatgtttggtatttgcgaaatacgaaccatccgctgatttcgtcggcgagtgtcgcttgaatgcctccatgcaatgtatttatccatccttgatagggagaagacggtttccagacacttacgatttcatctccgttttcgtaaaattccatgcgtagtccgtattcattatcgggggcacaaccgaaacaacggtagccctccattccttgccacggattcaatatctttttcatatttgaataggtattaagcgtttgtaatataataagattttcgatattccataggggtaactcctgtcatttttttgaaaagccgcgtgaaataggagtgatcgtcataccccaattggtaggcgatctcttttgctgtgcaactttcggtgattaatttcagttgtgccttttctattttcttttggttgatatagtgtaaaggcgtgacccgcatctcctgtttgaacaaccggatgaagtgatctttcgacagacaggctatttcggcaagctggtgcagttcgatcgttgtaaatatttcgtttcgaatgtattcgatacatcgggctatgcgttcgtcgcggatatatcgtttgggttgtgcaaagcggaggaactcgctgacgagcagatagagcaacccgcgcgattctactttggcgtacagatcgcgttgtttgttcttgatgatgtattgttccagtgtatggcggttgtcgtagacttgcggggcatattgcggcagttccatgccggggcatagttcgtataatcttttcacctgctccaacgtgtgtttaccggcttcgacttcgtagggaagttcgaaatcttccagcacatcgttgcccgaatcgttgtagatatgaatgtagtagtggctgaaactgtcgtggcagatataactatgggcggtaaatgccggaatgatgtataaatggtgcggtttcagatctattattcggtcgggcaattctatctgtgcatagccggaatggatataatatatgcgcgagaacgggctgcatacgttccgatagttccagttcccttgaatttgagccaaaccgatgttcagcaccaagaagtgcatttggtcgagtgcggtattgttcatgataggcaacgaggtttctataataatgaaatcagtggcgtttgggttcgcgatgtgtttagccgggaactcttttcctttcggcgaagatacgaataatatcgataatgtcctatgatatgccacaattgtgcgattaaactgtaatgcctcgcacctacctttgtttccagatttttataattcgtaacgacttaattataatccttaaaaataatgaaaaagtatcctaaaatcggtattcgcccgacgatcgacggtcgtcagggcggtgttcgtgagagcttggaagaaaagaccatgaacttggcaaaagctgtggcagagttgattacctcaaatcttagaaatggcgacggctcgccggtagagtgtgtgattgcggatggcacgatcggccgtgtagccgagagcgcggcatgcgccgagaagttcgaacgcgaaggtgtcggggctactatctctgttacttcctgttggtgctatggcgcggaaacgatggatatgaacccgtattatcctaaggctgtatggggctttaacgggacggaacgccccggagccgtttatctggcagctgtattggctggacatgcccagaaagggctgccggcgttcggtatttacggtcgggatgtgcaggacttgaatgataatacgattccggcggatgtcgctgaaaaaatcttacgcttcgcccgtgcagcccaagcagtggcgacgatgcgcggaaagtcctacctttctatgggaggtgtttcgatgggtattgccggctctattgtcaatcccgatttctttcaggaatatttgggcatgcgaaacgagtcgatagacttgaccgaaatcattcgtcgtatgacggagggtatttacgatcatgccgagtttgaaaaagcaatggcttggaccgaaaaatattgcaagccgaacgaaggaaaagacttcaacatggccgctaagaccaaaacccgtgaacagaaggatgccgattgggagttcattgtgaagatgacgataatcatgcgtgatttgatgcaaggcaatccgaagttgctcgaaatgggatttaaagaggaggctttggggcataatgccattgctgccggttttcagggacaacgccaatggacagacttctatccgaacggcgactattcggaggcgcttttgaatacatctttcgattggaacggcatccgcgaagcctatgtggtagcaaccgagaacgatgcctgtaacggtgttgccatgttgttcggacatttgctgaccaaccgggcacagatattttcggatgtacgcacctattggagtccggaagccgtgaagcgggttaccggtaaagagctgaccggtatggcggcaaatggaatcattcacctgatcaactcgggggcgacgactttggacggaacaggacaacaaaccgacgggaacggaaatccggcgatgaaaccttattgggagatttccgaaacggaagttgaaaaatgtctggaagctacgacatggtatcctgccaacagggattacttccggggcggcggattctcttccaatttcctgtcgaaaggcggaatgccggtgaccatgtcgcgtctgaacttgattaaagggttaggtccggtgctccaaattgccgagggatggacggtggagatagatccggaaatccataagatactggatgaacgtaccgaccatacatggcctactacttggttcgttccgcgtctttgcgacaaaccggcgtttaaggatgtgtattccgtcatgaacaactggggcgcaaaccacggggcgatcagttacggtcatatcggacaggatctgattacgatggcttctattctgcgtattccggtatgtatgcacaatgtcgaggatgacaagattttccgtccggcagcatggaatgcgttcggtatggataaagagggtgccgactatcgtgcttgtatgaattatggtccgatctacaaataataaaaagagagaacgatgatagaagaaaaatatttcgaccggtttatcgccgaggcgcatcgggtaggcgatgccgggctgacgatatgcagtagcggcaatctgtcgtggcggataggcgaggaggtattggtttcgggcaccggatcgtgggtaccgaacctccgacgcgaaaatatttcggtatgtcgtttggcaacgggcgaagtgctgaatggtgtcaaaccctcaatggagagcggattccatttgggggtattgagagaacgtccggatgtggatgtcgttttgcatttccaatcgacctatgccacggctgtcgcatgtatgaaagagattccgtccgattttaatgtgacggcagagattccttgccacgtaggcagcgatatacctgttgtcccttatttccggccgggctcgaaagagctggcagaacaggtgattgccggattgaaaaaccacaattcgctgctgttgagaaagcacggacaggtcgtttgcgggaaaacattcgacgaggtgttcgagcgtgccatgttttttgaaatggcatgccgcatactgattctgtcgggaggtcgcaacgatgtgcttacgaaggcggagattgaggacttggaaatctatgttttgggcaagaaaacccgataacggttggaattatggttacacatttagcggtagatttcggcggcggcagcggtcgggtgatagcgggcagtgtgtcgggcgataagttggaaatggtggagatccaccgtttcccgaatcgtcagatacgtttgggaaaccatttgtattgggattttccctatctgttcgaggagatgaaaaccggaatcaaaaaggctgtccggcatggatttaacgtgtgcagtatcggtatcgatacatggggggtggattatgggttgatcgatgcgaatggtaatctgttgggcaatcccctctgttatcgggacgaggcgtttgccgctccgttccgggactggatgcgacaagccgatatccctgcgcattaccggacggcaggcatccagatgatgccgatcaataccttgtttcagttgtactcccgtaaacaggaacgggatgttttgctcgatgtggcggataaacttctgttcatgccatgtctgttcgggtattacctgaccggagtagcggcgaacgaatatagcatcgcttccacctccgaactgttggatgcacgttcccgcgattggaacagaccgttgttgcggcagttggattttccggagcggcttttcggtacgatcgtaccgccggggcatgtcttgggaacgcttaggccggaaatagccgaagaaacaggcataagccccgatgtcaagatcgtggctgtcgcatcgcacgataccgcaagtgccgtatatgccattccgtatatatccggtaaagaatcggtgagtgcgtttctgagttccggcacatggtcgttgctcggtatcgaattggacgaacctctattgacggagcaggctcggcaagccggttttaccaacgaaggcgggacggatggcaaaatccgtttcctgcaaaatataacggggctttggatcttgcaatgcctgattgcccgttggcaggaaaaagggttgccggtagattacgattatctgatcgaagaagcggaacgggcggagattgcatcggtgatcgatgtcgatcacgaggcatttgttcaccctgtcgatatggaacgggctatcgaagagtattgtcgggaacgaggtctggcagttccttccggacagggcgagatggtgcgttgcgtattgcattcgttggctgtgcgatataaacgaggtatagaacagttgaaccggattttgggcagggatgtggaggtgcttcatgttatcggcgggagccgcaaccggttgctgaaccggctcacagaggcggagtgcggtataccggtgattgccggaccgtcggaagctaccgctatcggaaacatgctgatgcaggcggtatcgtgtggtgtgattcggaatcgtaaggagataaaaacagccgaatggaaataactgcactttacgataaccgccggaaatccggtctgccgccggtcggtagaaaagaagtgtactatcataacaaacaaaatctatgaaaaatacgaaaaaaatatccatactcggagacaaacgtacatatctgattccctttatattgattaccagctgttttgctttgtggggatttgccaacgacattaccaatccgatggtgaaggctttctccaagatattcagaatgagcgtgaccgaaggctctttggtgcaggtggcattttacgggggctattttgccatggcttttccg

SEQ ID NO: 1086 - DNA, 24590 bp, synthetic construct
  misc_feature 1..24590: note = Synthetic
  source 1..24590: mol_type = other DNA
attccttttctaaatatgtctatttaataggatacatcattcttccttttattattatcactaaaatcccttttggaaaagacggatacaatccaaaaatactaataagtatctttattcttatttggacaaatgacacctttgcctatattgtgggtaagtctattggaaaaacaaagttatttgaacgcatttctcctaaaaaaactatagaaggctttgtaggcggagtattttttgcagtagtagtaagttatttcatttctaagtattacatcgaaattgcagaaggaaacatctatatttggattgttattgccataattgttggtgtttttggaacaattggtgatttaatcgaatccaaatttaaaagagtagctggcgtaaaagacagcgggaaaataatgccaggccacggaggcgtactagatcgactagatagtgttatatttgtagcaccaattgtatttttattttatcaaattttaaattatgtttcataaagaaggaaccaagactatcttattaggaattatttttatggtggttgcactattaatttctgattatttcattgacaataattggcttaaaatggcaattcaaatcggtgcgctgttaattttgattatcattttacaatttttcagaaatccgaaaagagtagcgataataaatgagaaccaaattttagcacctgtagatggtaaagttgtggtaattgaagaggtttatgaaggagaatactttaaagacaaacgcattcaggtttctattttcatgtctcctataaatgtacacgttactcgttacgcaataagcggacttgtaaaattcagtaaataccatcctggtaaatttttggttgcttggcacccaaaagcaagtgaagaaaacgaaagaactactgtagtggttgaaaacaatacttttggcgctattttataccgtcaaatagctggtgcattagcgcgtcgtattgtgaattacgctcaggaaggaatgcaagttgttcaaggtactgatgccggttttattaaatttggttcacgagttgatatctttttgccattaggtacacccattgatgtggtacttaaccaaaaagccattggtggaaaaacaattattgcaactaaaaaataatgaatgaaatagatttaaacactcaatttcaagaggccgtaaatagcgcttcattgatgactcaagcatctttaccgcaagatgtgcaactgcgtctctatgcttattacaaacaggctactttgggtactttagaaccaagacagacatctaactatcatttgagagatgcgtttaaaactaatgcatggatgcaaataagtcacctatctgccaatgaagctaaagagcattacatagacttaataaattccattttaaaaaaatagcactatccatgaaaaataatgcttatatattatccgctttagcaactatgactgttttattttcttgtcaagacaaaaaactaacagaagtagttgaagttccattgcccactgctcaagaaaaagtatctataggttttcctgaagatgtaaaagcagcgcaaggttcttttcaggtagaaaaattggaatataattatgacgccttagctcctactgtttctccactaactttagaaacacactattctaaacattatttaacctacactaatgacttaaacaaagccattgcaggaacgccatatgaaaatcagtctatagaaaacattctagcaaaattagacttaaaagacaccgaattaaggaataacgctggtggttattacaaccatagtttgtactggaaatcaatggcacccgatacaggtggtgttgcaattgatacgcttgcaggagtaattaaaagagattttggttcttttagtaactttgaaaatgcttttaaaaacgaagctacgagtcagtttggttctgcttggacgtttttagtcgttgataaatacgggaaattaaaaataaccagcactcaaaatcaagacaatcccttaatgagaaatgctgttgttcctggaacacctattctagctttagatttgtgggagcatgcttattatttaggataccaataccgccgaaaaaactatattgattctttctttaccgtaatcaactgggaaaaaatcaatgctaattatgaagccgcaatgagaaagaaatattaaacaataattttatatttaaaaatgctgatagaaacctcaaagaggaatttatcagcattttttttgtatttgtaaattccagctaagttactgtaatttatagataaaagattccagcggggctattgtaatggctacatttcctatgccgttttttacaacaagcgttgttttattctggttgtacaattgatcaataagtgagtaatttccatccttcatattccacttcttaataacacttgatggaatctcaagattgaaattactagttttgctatccgaaaaattagtgactacaactaatttttcatctactgaacaacgagtaaaagcataaattttagcatcaaaatcctttgtgttttttctattactagtttggatttctccaaaatctcccattaatgcagtactattaactgagaagtttaataatcgtttgtaaaaatcacgcagttctttttctttatccgtcagttgaccgccgtcaaatttaccttcattcatccagcgttggtgacttggaacacctacataatcaaaaatcgatgttcgagaatgagttccaaaacctccattttcattccccgattcccctacttcttgaccaaaataaatcattgtgggtgatgagcttaatgtggtagaaacaaccatcaacggctttcctctttcgggagatttagcaaattcagcacttgctaaacgttgctcatcatgattatccagaaaatgtaacatgtgatgttcaatatctttcattccgttttgaatgctagaaagtgcatcaggcgatgctttatcttgaattatctccttcagcttatcataagtctccactttatcatataaataatccattttacctaaattaatgtaatttctatattcttttgggttatacacttcggctaataaaaaggcattaggatttgccatttttatcgctgaattcatgtaactccaaaactcatatggaaccatttcagccatatcgtatctaaatccatcgacacctttagcagtccagtacaaggcaatatcacggaattttttccaagaatctggcacctctttatttttccaaaattcaaaatgagcagcataagatttcgatccataacgtttgggtaattcaggaaaatccttagttccatcaggacggattccgtaatttacttttacggtttcgtaccaatcattcttatcaggttttgacaatttagaaccgttacccgtccatttagcaggaatttcgtcaaatttaccatcgcttaaaggatttgcttctccgtttaaaggtttgtccgtatccggaacctcaaatttagaatttggaatataatagaaattattatctcttttatactccacagtcacatcatcatctgcaccaaagtcgttaacaccctctgggttatttttcccttcatattttcgagcaatatgattgggaacaatatcaataattaccttcattcccgcagtatgcgttcttccaatcaaagcttcaaattcttgcaatcgatgagctggatcaacagctaaatcagggtctacattataataatccttgacagcgtatggagaacctgcccgcccctttacaacatcaggatcgtcatttgagactcctattgcagtataatctcccactaaggcatgatgtggaacaccagtataccatatataagacactcctaaatctttgatttcatgcaaagcagtatccgtaaaatcattgaacttccctactccattttctgaaattgttccccaaggtttgttagtggtatttttattcccaaataaacgcgtaaaaacttgataaactactattttacgctctcttttctcggtatctatatcttgttttgattttaactccgttgttttacaagctgcagttagtaaaactaaactaaggcctataaataattttttatttttcattattattggttcggttacactattttaatagctcgtgattgtgctttattatgaattataactttctaaatttactataaaattcaaaactacactatactccaattttatctaagcgttaaaacaaaatcaaaaacaacactacaacgtgagagttgggtttattgttgataagttatcccgctaactaagagtaggatgctggtctaaaagcttttaaacctataaataaatgctaatatcgattaggattgtttcctttttcttaaatttgacaaaaaattaatccattgaataaatcactattcttcataggctgcttattgctgatttttagtactaaatcaactttggcgcaagcaccaaaaaaaattattgttgagcattctgattttgctgatattaatcaagtcgaaaatccagatgcttttttactgactggaaatgtacgtgttaatcatgacggaattgtattaacatgtaataaagcctattattttcaaaaagagaattacatcaaagcttttggaaatgtacaaatagtacaaggagacactttatttttaaatagtaaatatgccgaatataatggaaatgttaaaaaagcatttgcctctggtgaagcgtatatgagttctccagatgcaactttggtcacagatactattaattttgatcgaaatgtacaacaagtgtattacaacactcaaggaaccatcacgaataaagacaatacgttgcgttctaaatcaggaagatattacgtagccgaaaagaaatttcagttcttaacagccgttaccataacaaatcctcaatatgtaataaaatcgaatcatttagattactatagtaattccgggcactcttatctctttggtccatcaacaattactagtaaaaacaattatatttataccgaaaaaggtttttacgacaccaagaaaaatctagcacatttccttaggaaatcctatataaaatacgatgaccgactcatagaaggcgatagtttgtactacgatcgcaacagagaatttgcctcagcaacacggaatgtaaaaattacagactcaatcaatcgaggtgtaattaaaggacattacggagaagtttacaaaaagaaagactctatgtttgtaactaaacgtgcattagcaattaactttgtcgataatgactctgtctacatacacggaaaaaaactcatggtaactggaaaagaaggtgatagaatcattagagcttttaataatgttcggtttttaaagaaagacatgagcggaaaatgtgattcgatttattcgaactcaagaattgccttgacaaaattgataggaaatcctgtgttatggaatggtgacaaccagattactggtgatgtaatgcatttaataggaaacaataccacccgaaaattagattcgctaaaagtgctaaacaacacctttttagtctctcgggacaccttaggaaccggttataatcaggtcaagggactcaatttatttggtaaatttaacgatggtaaactccgtgatgttgacattataaaaaatgccgaagtaatttattacatgcgtaatgatagtaacgaactcattggaatcaataaaaatgtaagtagtaaaattaatcttattctcgaaaataatgctatcgagaccattacattttatgaccaagttgatggcgatatttatccagaaaaagagttacccgaaaatgctcgaaaattacgcggacttgtctggcgtggtgaggagcgcatttttactaaagaagaccttttttctgctgaagaaaatgagtataacgaaaagatgatttctgctgcaaaaaaagacgatgctaaagaaaacgttccgatgaaaatcaggaaagaaactttagattatgacaaaaagaagccgaaaaagaaacccaaaaagaaatagtttttttattaattgtaatttctgatttacagtaaaaagaactatttttaatatacaaaagataccatagattgaacgaagattttataaaataccaagcacaaacatcaccatatccattaggaatggaagtttcatacgctaaaggctcctatatttatgacactaatgacaaaaaatatttagattttgttgcaggtgtttcagcttgtactttagggcatcaacccgcaagagtcaaccaagccataaaggatcaattagataaatattcacacgtgatggtttatggagagtattctcaaagcccagcggttgcctattgtaaattaatggcctcactcctaccggctccacttgacaaaacgtacttagtaaattcaggtactgaagcaattgaaggcgctctaaaattagctcgaagagtaactggtcgcagtgaattaatttcttgtcacaatgcgtatcacgggaacaccatgggttctttgagcgttatggggtttgaagaacgcaaacaagtttttcgtccgcttattcctgacgtagcatttattacctttaataatgaggctgatttagataaaataacgactaaaacagctggggttttattagaaaccattcaaggaggtgctggttttattcagcccgaaaatgattttctaaaaaaagtaagagcccgttgtaacgaagtaggtgccattatgattcttgatgaaatccaacctggttttggtagaacaggaaaattatttggatttcaaaactacgatgttgttccagatatagtggttatgggaaaaggaatgggaggcggtatgcccgtaggtgcttttacagcttcatcagcaatgatggatttattgagtgataacccaaaactgggtcacataacaacctttggtggtcatcctgtcattgcgtcagcttgtttagctactttgcaagaaataactgagaccgatttaatgcagcagacgttagagaaggaaaaattgtaccgatcacttttggtacatcctttgataaaggaagtgagaggaaaagggttaatgcttgccgttatgaccgaaagtgcagcaataacaaatgaagtgattttaaaatgtcaagacaaaggacttatcttattctggttactatttgagggatgcgcaataagaatcacaccaccattaacaatttctaacgacgaaattaaggaaggatgtgccataatgaaggaagttatggatgaagttctactatcagctaccctttaaatacaataattactagtagcgattaaacaatactgtgtattgttaattaaattgttcacaacaattctaatttttcttcacatcaatagtaatgatacctaattttaaataggtcaaattcaaaaaaacaaagcatgcaattaagcaacgaagaagaagactataacttatcattatccaaatttgagtctatgttgaaaaccaacaaagtactcttttttgactcagaagaatttgaagaaatcattcttcattatctcgatatgggtaaggcggctttagccaaaaaagcattaaaattaggactagatcaacacccaaaatcaactggtttaaaactagttcaggtagagatgctcgtatttgacgataaattagacatcgccgaaaaattactcaatgaactgtatgcaattgagcccaataacgaagagatatacatacaaaaagccaatatttattctaaaagagaccaacatgaaaaagcggttgagttcttaaaaatagcccttacttatactgatgattatgctgatgtctataacttaattggtatggaatatctttttatggacaatctagagcttgcaaaagagagtttcataaaatgtctagaggaagatcttgaagatcaatcggctttgtataatgtggtgtattgttttgaatttttagatcaaaatctagaggcgataacgtatttaaataaatacattgataaaaatccctacagcgaaattgcttggcatcaagtaggacgcttgtattatgatctaaaagattatgaaaatgccattcgcgcatttgattatgctactttaattgatgatgagtttttaggcgcctttatggaaaaagccaaagcctatgaacgtctaaaaagatacgaagaagcaattgaaagttacaatagaaccatcgcgcttgatgacgctacctcttatgcgctgttgcgaatagggaaatgtcacgaacgtttaggaaatactgttttagcattaaaatattataatgaaacggtacacgaagacccccttttagacaaaggttggattgcgataactgatttttacttgcgtcaaaagaattaccaaaaagccttattttttgtcaataaagcattagcaatcgacaatcaaaatcgtttgtactggaagcgctatgctacaatcaacaaggaaatgaatttctttgaggaagctgaatttggttttagaaaagcagttgagtttggagatactgcattagacacttggttattttgggttgatattttgcagtttttgggcgagtttgatagtgcaatacaaacgttattgcaagcgtcagaatattttcctgaagaaaacgaaattgaataccgtttggctggattgtattttatgacccaagaaaacaccaaggctaaatttcatttaagcaatgggttgcgtctaaaatttgataactatgtattgattgaagacttatttcctgtagtatggacaaaaaaaatcgttcgcaattatattgataaatacaaaaaagaataatggctgtaactaataaaaaacgctttggtttactaggaaaaaatattagttattctttttcaaaaggatatttcactgctaaatttgaaaaagatgccgctatcaattatagttacgagaattttgacttagacgaaattagtgaatttgaggatttaataaaaaacaatcacgaagaattagctggtatcaatgttacgattccgtataaagaagcagtgatgccttatttagataaattatcaaaaaaagcaaaattaataggtgctgtaaataccattaagtttactgcaaaaggcaaattaaaaggatacaatactgattattatggttttaaaaaagcaataaaaccattattaaaatcacaccataaaagagcattgattttaggtactggtggtgcatcaaagggcgtttgttttgctcttgatgagctaggaataacctatacttttgtgtctaggataaaaaacgaaaacactatctcctatgaagatcttgataaagatacatttgagagtcatacaatagtaattaatgccacaccagtaggcacaagccctgacatagctgcttttccattaattccgtatgagtttttcacccctcagcacattgcatttgacctaatatataatcccccaattacgcagtttttaagtaaggcttccgccaaaggggcacaaactaaaaatggttatgatatgcttgtctaccaagcagaaaaatcatgggaaatatggaataaataaataattgaaaaatatagaaaaagctttcagtcttgaattagattgaaagctttttttatgctcaataataattatactaaaagcgtccctacgattttttaatactgtagtctattctctatttttttatgagtttaatatcaaaacttaagtttaaaccaaaaaaaaagcgacccttgtgaggccgctttgaatgttttcacaacggaataatccttattgtgaattgcttcaaaattgtaagacaatattacgataaaatttttaatatccaattacggtttcccgtaaggttcttaattttcttatatttatatttagcaattgataagaataataagaaaatcatcatacaatgaagaaaatattaggattggatttggggactaatagtattggctgggcgttaacaaccaatgactttgatactaaaactggaagtatcgaaggtttaggaagtcgtataatccctatgactcaagatgtattagggaagtttgatagtggtgtttctttatcccaaactgctgaaagaacaaaatacagaggaacaagaagattagtacagcgctttttattaagacgtgaacgattgcatagagtcctaaatattttaaaatttttacctgaacattattcagaagcaattgattttgaaaaaaagtttggacaattcaaacccgaaagggaagaaaagttctctttttataaaattgaaaacggtaaaaatcaatttattttcaaagaaagtcatcaagagatgctggctgagtttaaaactttatttccagctataaaaaacatcccttatgattggacaatttattatttgagaaaaaaagcattgactacaaaaatttctaaagaagaactggcttggattctgcttaattttaatcaaaaaagaggctattatcaattgcgtggagaggaacaggaagaaaataaaaataaaaaagaagaatttcatacgctattggtatcagatgttattgaaagagataaaggaaaaactggaacttggtacaatgttattctagaaaatggatggatttacaaaagagaaagtaagatttctttatctgattggattggaaagtcaaaaagttttattgtcacaacggagtacaatgacgatggaacagtaaaattaactaaagataatgaagaaaaaagaagttttagatcgccaaaagatgatgattgggccttagtaaaaataagaactgaacaaacgattaatcaaagcggaaaatctgttggaacatacatttacgaagcattattaaaaaatccgaatcaaaaaataaaaggcgaattagtacgtactatagaaagaaaattttacaaagacgaacttagagaaattctaaaaaagcaactagaatttcattctgaaattttgaaggataaaaaactatataaaaactgtatcgacgaattatacaaaaataatgagtctcatataaatagtatcaaagaccgaggttttgattacttatttttagatgatattattttttttcaaagaccacttaaaagtaaaacatccttaataagtgattgtagtttagaatttcgcccaataaaagataaaaatggtgttttggtaaaagatactaacggaaaacaaattgtaaaagcactcaaatgcattgcaaggtcaaatcctattttccaagaatttagattgttacaatttgccaaaaatctaaaaatatataaaagaggtgttctagatgatattgaggttaccaatgattacctaaaatcagaagaagatgttgaagaacttttgaattggttgaatgataaagcagagattagtcaaaaacagtttttagcaaatttcaaattaaaagaagacaaatacagatggaattttgttgaagacaaaagttatccatgcaatgaaaccagaaaccaatttttgaatgctattgcaaaaattgacgtagacaaatcttttttcaataccaagaatacccaagatttgtggcatattttatattcggttacagataaaattgaaattacaaaagcaataagcacttttgccaaaaaacataatttgcccaatgaattcattataaacttttctaaaataaaaccgtacaaaaaagaatatggctctttttcagaaaaaaccataaagaaattattgcctttaatgcgttgtggtagttactgggatacaaaaaatattgatactaagactcttgatagaatagataaaattcaaacaggcgaatttgatgaaaagattagaaatcgcgtacgtgataaagcaataggcttgcataaaattgaagattttaaaggcctgcccttatggttagcctcttatattgtttatgacaaacatagcgaagccagcgatgtttctaaatggaaaactcctgcggatatagaaaaatttttaaagtatgaattcaaacaacattctttaagaaacccaattgtagagcaagtaataacagaaactttgagagtagttaaagatatttggcaacattttggagaagggaaagaaaatttctttaatgaaattcatattgaattagggcgcgaaatgaaaaatagtgctgctgatagaaaaagaattacagataatatcagtaaaaacgagaatacaaacttaagaataaaagctgttttgaccgaattgaaaaacgatggcgttgatgatgtacgtccctattcaccaagtcaacaagagattttaaaaatttatgaagaaggagtttataacagtgaaaatcgtaaagaaaaattagaggaagttgataaaatcagaaaaaattcaaaaccaactacttctgaaataaacaagtataaattgtggttagaacaaggttatgcatccccatatactggaaaactcattccgttgagtaaattattcacaaccaaatatcaaatagaacatataatcccacaatccagattatttgacgattcgttatcaaataaagtaatttgtgaatcagaagttaatgagctgaaaagtaatatgacggctttagaatttataaataataatgaaaatagaatagtgacactaactggtggcgaaaccgttagaatttttacaaaagaagcttacaaacagcatatcattagttattattctaaaaataaaaacaaacaaaaaagattgctaaccgaagaaattccagaccaatttatatcaagacaactaaacgataccaaatacattagcaaaatagtaaaaaatctattgagcaaaattgttcgtgaagatgatgaacaagaagtaacctcaaaacatgttgtttcgctaaacggaagtataacctcaagaatgaaacaagattgggggctaaatgatgtttggaacaatatagtaagtcctcgttttgaacgtttaaatgcgattacaaattcgaatgattttggacaatttgaattgaaaaaagatgcttatggtaatgaaggtaaaagggtttttcaaaccacagtaccagatgccattgcaaaagggtttaccaaaaaaagaattgaccataggcatcatgctttggatgcattggtaattgcttgtgtgacaaaagaccacatcaattatttaaattcgataaattcacaaagaacaaattattctttggtcactaaattgagaagaacggaggaaatccaaattaatggaaaaactcaaaaatttgcaaaagaatttcataaaccttggaagaactttacaacagatgccgaagacaaattaaatacaaccatcacaagctttaagcaaaatactagagttatcaataaaacggtaaacaagtatgtgagttataaagatgaaaacggcaatttgaatgttgacgcaaacggattagcgcaaaagaaagttattacgcaaaccaaaggagacaattgggcaattagaaaatcaatgcatgccgaaacggtaagtggaaaagtatttttgaaacgaattaaacaaagtcatatcaccatagcaaatgctattgaacaggttgacttaattgttgataaagaggttaaaaagcaactaaaggctaaaattgaattatatccaaacaatatagttggcttgaaaaaacatctaaaagcatttcttgtaacaatcaacggtaaaaccactgataaaattcaaatttatgaaacgctagaagcaactgccacaagaaaaacactcgacattacttttgacgaaaaaagaattgaaaaaataacagatactggcattcaaaaaattctattgaatcatcttaaacaactaaaatatcaaaacacatttgatgaaaacggtaaaaaggtagctccacatgaaatagctttttctgaaaatggtctagaagatttgaataaaaatattacttttttaaacgatggtaaaaaccatcaacccattaaaagagtgaggatttttgaagaaagtaataagttccctttaggtgaaacaggaaataaaataaataaatttgttgaaactgctaaaggtacaaatttgttttttgcaatttataaagacgaactaggtaaaagaatttatagaactattccttttaatgttgtaattcaaaaccttaaagatggattatcgccagttcctgataaatatttagatgataaaactaaaatagaatataaattaaatcaatttctgtctccgaatgacttggtgtatttaccatcaaatgaagagttagaaaattcaaattatataaatttgaataacttaagtaaagaacaagtgcttagatgttataatgttaatgatttttcaggctatactatttattttactccaaatcattttgccaaaaatatagctccaaaagagctagatacaagttttgattctaaactctctaaatcgtttgaaggaacaactattaaagaaaatttttggaaattagagattgacagattaggggaaattagaaatatcattagataatatattgattcaataggattgggttttaacccaatctaaaatagacaaacacaaggaagaggctttagccaaaataattcggctaaagccaatacctataataattaacattttacctccagctaaagctggaggcaattgattgacaatgaatgtcgatttttattaattcaataggattgggttttaacccattcggcacaataaaaacaaatagtgagggctttagccaaaaagagtacaacaataattattgatccatcacattcaataggattgggggagctttggataaaattaatctaatactcttgataaataagcatattcactaaatacaaataattatgtcctacatcaaaacctatattcattttgtttggagtacaaaaaacagatttccctttctggatagtaaagaattgcggcagaaagtatggcttcatattaaagaaaacgccaaagagaaaggaatctttgttgattttgtaaatggatatacagatcattgtcattgcttggtttctttgggagccgatcaaaccattcaaaaaacaatgcagctaataaaaggcgagtcttctttttggataaataaaaacaatttgtgtaaaggtcaatttcaatggcaagatgaatattttgctgtgtccgtttcagaatctatgattgacagagtgcgcaactatattaaaaaccaagaacaacatcacgccaaatacacattccaagaagaatatgaggagtttattgttaaatataatttaccaaaagaatagattttggctaaagccaatttataaatatcaatttgttttcctccagctaaagcgggaggcaactcaatagctggagatagtctaatcctaaagtcatttaaaaatgatgacaatataaattttcaataataatgggtttcaacccattcaacaataaaacattccaaattggctttagccaaaagatattgtaagtcattagaataggattattaatttaaaaccaaaaaaatgatcaaacgaacgcttttctttggcaacccagcctatctgagtaccaaaaacgaacaaatagtgatctcttatcctgataaagaacaagagactaaaacagttgcgattgaagatattggtgtcattgtattagaaaatcaacaaataacaatcaccaatggcttacttgaaaaattgactaacaataatgtagcactaattaattgtgaccagtaccatttacctatagggttattaatgccactgaatggtcatacagagcaaagcgaacgatttaaaaaccaaattaacgcttctgccccacttaaaaaaaatttatggcaacaaaccattagcgccaaaattagaaaccaagcaggtttattgaaagaaaaaggaattccgtgtcgtaaaatggaaatttgggcaacagaagtgagttcgggtgatgcgcttaaccatgaatcaagggcagccgtattctattggcagaatcttattaaggttgaaaatttcacacgtggtcaaaagggtgtggcgccaaataatttgctcaactatggatatgctattctaagagccataaccgcccgcgccattgtaagctcaggaatgttgcctacactggggatttttcatcgcaataaatacaatgcttactgtctcgctgacgacattatggaaccgtatcgaccctatgttgatttaatagtatgtcacattatggaaactcaagattgttatgacgaattgactaccgaaatcaagaaacaattattgagtattgctacaattgatgtacttatagatggtaaaaatagtcccttaatggttgccatgagtcgcactacgcactccttacaagaatgttttgagggaacagcacgtaaaatattatatcctgtctatagttaacccattttaactttaagaattagacctataaaacatgcatgaagaacattatacaagattaaatcaatatagaagtttgtggatattagttttttttgacctacctacagaaacgcgaaaagagcgtaaaattgccagtggatttcgcaagaaattattggacgatggcttttctatgtttcaattttccatctatatgcgtttttgtgctagtagagaaaatgccgaagtacatacaaagcgaattagaaacagtttacccgaacacggcaaaattggcataatgcaaattaccgacaaacaatttgggatgatggagcttttttatggaaaaaaagcggtagaaccagataaaccttcgcaacaattggagcttttttaaaaattaggattctaaaaaccaacaactgattgacattcaatactaattaacaatcaatttttactttctaaacaaatcgataactcacaacatatcaaacgattgaatcgcggtatgttgggaattataagtaaaaatacaattttgaaagcaattcacaaccctgatggattaactgcacaaagaacatttgttgggaattataagtaaaaatacaattttgaaagcaattcacaacccatggtttaattataatctgttgagtaatgttgggaattataagtaaaaatacaattttgaaagcaattcacaaccctgatatactaatcaatggttcatacgggttgggaattataagtaaaaatacaattttgaaagcaattcacaacgcatgatggcgtgaatatctacaataaagggttgggaattataagtaaaaatacaattttgaaagcaattcacaacaaatttcctgaacattatcccaagtcattggttgggaattataagtaaaaatacaattttgaaagcaattcacaacaaagcacatggttgtttacatctggaataagttgggaattataagtaaaaatacaattttgaaagcaattcacaacctgtttaccctatttcccgcactacactgcgttgggaattataagtaaaaatacaattttgaaagcaattcacaaccacccactacataataagtcccatctttgtgttgggaattataagtaaaaatacaattttgaaagcaattcacaacagtagatgttttacccatatatcttcgtaggttgggaattataagtaaaaatacaattttgaaagcaattcacaacacctggataacgaaaaagcgcgcacaatcggttgggaattataagtaaaaatacaattttgaaagcaattcacaactgtaagaagacccgtctactgcgagtactggttgggaattataagtaaaaatacaattttgaaagcaattcacaaccttaactgccatgaataaatggcttgaacggttgggaattataagtaaaaatacaattttgaaagcaattcacaacgaacttcgagagctgatttaaaatcattaggttgggaattataagtaaaaatacaattttgaaagcaattcacaacagtttccgagcctgatttatatgaagaacggttgggaattataagtaaaaatacaattttgaaagcaattcacaacaattcagctaatgcaataaaattatcttgggttgggaattataagtaaaaatacaattttgaaagcaattcacaacattatacctctttctccatttcacgaacgggttgggaattataagtaaaaatacaattttgaaagcaattcacaacgacaactatactaaaacctaaaattaaaaaatttcatcattttattttatgtttccttatatcaaattactacaatagttcatgattaactctaaattctttagccccgatagtaacggcatccttttatggcttttttttaaagctataaaagatatagtgtatagcgggaaatagctccaaaaaaaagaaattattaacataaaaccactctaaattaacgatttgttttgttattcagtactgctttactatctttcgagttcaatttattagcaaccttacacattgaaccaatgttagaagaaaagaatgataacctgcaaaatgcagatggaaaattagccgttgcgtctcaagaattaaacgagaccgtatcagaaaatcaagaaactcctgttactcctactgaagagccagttacagcgaaaccgcaagagaatgacaatcaaaaagccctaaattctatcgatgactctaatgctgaggaaagcgaagatgaaactttaaaggaacgtcacgaaatacctatgcaagactacgacactttgtctatggaagaacttgttgatgcgttaaaaactattgtggaaactgacaaagtaatgtctgtaaaggagcatgttgatgagattaagaaatcttttttagcaaaatacaaccactttattgaagagaaaaaagaagagtttcaagcagaaaaccctgatagtacggaagattttcaatatcatttgcctctaaaagcgcattttgacgaatattacaccttatataaagataaaaaaaatgtacatttcaagagtttacaaacaaacttgaaaacaaatctagagactagattggccattgttgaagaattaaaagagttgattaatccgcaggaaaatatcaaagacaccttaaaacattttaatgaattaagagaccgatggaaaaatgcaggctctattcctaaagataaatacaaccacgtttggaataactaccactttcacgttgagaatttctatgactatttacaccttgatagagaggctagagacttagattttaaacataatttagagcaaaaacaaaaaattattttgcgtgttgatgaattgcttcaagaggaagatgtaaataaagcttttagagagttacaagatttacaccgcatgtggaaagaggatataggtcctgtttctaaagaacaccgtgaggagatctggaatttatttagtgatcttactaaaaaaatgcacgataaaagagagcttttattcgaaaaattaagaggtgttgaagctgaaaatttagagaataaaaatgcaattatagctggtattgaagatttggctaccattaaagtaaactctcattcacagtggttagtacaaattgaaaaagttgaagctttaagaacagccttttttgccgctggaaaagtaccatcagaaataaatgaagctacatggagtaaatttaaaactgctgtaagagactttaattcttttaaaaactccttttacaaagaaattaaaaaagatcaaaacgataacctcaataaaaagaatgcgcttgtagcaaaagcccaagaacttcaagacagcaccgactttgaaacgactacggctgtaatgaaacgcatacaggacgactggaaaaaaataggtcatgtacctagaaaatattctgataaggtttgggccgaatttaaagcagcttgcaaccattattttgatcgtttgaaagaacaaaaaaacgaaagtgacgctgaggaaattgctgcctttgagaataaaaaagcttacttagaatctttaagagcatttgaactaaccggtgatcataaaacagatttagatgcgattaaactgcacatcgaaagctggaaaaaactaggtagagttcctcatgcaagaagacacattgaagggaaatttaacaaaatattagacgccctttttgacaagttaagcttgagcaaaaaagatactgatatgatgcgttttgccaatcgtattgatcaattagctgaagataatgatactcgaaaacttgaaaatgaaaagattttcttgatgagaaaaattgatgaagttcaaaatgaaattttccagttagagaataatattcagttttttacaaatactaaaaatgcaaaaaaagaaaattctattgtattagaagttcgtaaaaacattgctatccacagagaaagtcttgatacttggaaagaaaaactaaaacaaattagaaatttgaaccaagaataacttctgattttcttaaattacaaacctcattctagtactagtttgaggtttttttatgaaacaaaaacacaagctaatttcatttataaaaattaggcttaccacttacaattacataagtttgcattatgaattggattaggaaaacgatcagttttattgtacttcttgtcatttttttagttgctttttcagcgactggaaatgccatgcatactaagattgaaaagcaatcgagtccaaaattctctctagaacatattcaaaataaggctttcatacagccccaaccagtttatacggttactttacaactagaaaaagaaagcaatccagtaataaaatggcaaagtgcgtttttgacacttaatacaaatgtggctaaacttagttgctttaactcttatttaaaccaagatattaatagatgcgaaaaagtatctatattactctttccgttccattttttctggtgatttaaattcatttatacttacacaatactattttatacagcttaatcaattgcattgagctggtcttgttctataaactaatttaaaaataaaaaatggatacatccgtaacaattataggtcttgtcattacattattaattgcaactcctcttttctttgtttttcgctctaatatgataagcaaaaataaaattaaaaccataaaagaagcctacagtaaaaacaatacttacaactatgagctaaccgaaatactcaacaataaagtgatgaatattgacgaaaataaaaaagcgtttctatttatggactttaattataaggaagaatacaccgcatttgttgatctcaatactatttcgtcatgcgatttagtagttacaaccaaaaatccaaaagaaacgattgtaaaaattgagtttgaatttaaatataaaaataccgatataaaagaattcatcccaatctacaccattgaaaacgatcaaataaatcaaattcgtttgtatgaagaacaccaattagcaaaaaaatggaaagcaattattgacaactgcatttctaaataataatcattcacaactttaaagaggctttttataagcctcttttctttaaaaaaactacttcgtgtaccgtatgacatttatcattttaattttcaagcattgccattacttttgaagtatcgctaaaaaacaatacgatgaaaagtgctttaattcaaaaatacaatgttccaggtcctagatacactagttatcctactgttccttactggaatgagaacgattttttatatgaaaattggattgatactttacaaaaatcattcattgagagtaactcaagtgagggaattagtttgtacatacatctccccttttgtgaaagcttgtgtactttttgtggttgcaataaacgcattacaaaaaatcatactttagaaaacccttatattgatgctgtattaaaagaatggtcattatattgtgaaattctaggcgaaaaaccatcgatcaaagaaattcatttaggcggaggaacacccacttttttttctccacaaaacttagaacatctaattaatggaattttcagtaccgctgtaaaagctaaagattatgaatttagttttgaaggacatccaaacaatactacgcacgaacacttgcgaaaattatatgatctaggctttagaagagtaagttttggcgttcaagattactctccaaaagttcaaaaagcaattcatagagagcaaccgtttcataatgtagccaaagtaagtttttgggccaaagagattggttatacctcaataggccatgatatcatttttggtctaccttttcaaaatattgatgatgttattgacactatcgaaaaaaccaaatcattacaaccggaccgtttagcattttatagttatgctcatgtaccatggattaaaggaaacggtcaacgtggcttcaaggatgaagacattccaaaggacaaagaaaaacgacaattataccaggttggaaaagaattattactaaaaaatgggtatcacgaaataggaatggatcattttgcacttaaaactgatagtttatacgatgcttttgaaaccagaaagttacatcgtaatttcatgggatacagttcttctaaaacaaaattaatgattggcttaggtgtatcttcaataagtgacagctggtatagttttgctcaaaacgaaaagagcttagaagattattataaacaattagaattaaacaaactgcctatttacagagggcatttattaactgcagaagatcttatcattcgtcaacacattttgaatttaatgtgtcagtttgaaacttcttggacaaacgagaatgaatattttcaagaaatccctgaaatattaattcagttacaagaaatggaaaaagacggtttagtactactgcataaagatagcattcaagttaccgaaggaggaaaaccttatgttcgtaatatatgtatggcatttgatttactgttaaaaagaaaagcgcctgaaacagccttgttttctatgacaatataatgattgattagttataacatttttgtcacatccagccactgtaaaaaattattatggttctcgattccgctcgaattgacaaattcctgctggctcgaactgattattgaagtgtgctcgaactaacaaatggagtatattcgaactgacaattggacttcgttaaaaaaacgaatgtttaaaattagatttcaaaactaaaataaaaaattcgcaaattaagattttaataagatctcaatttgcgaattttagttttctataggtaataaattacggttctattccttaattaacatagcgtatagctcatctttcaagaacaataatttcgcctttaattcgtgtgcatgaccgtcagtaactacctcagtatctgtatttacacgatgtacttcatgttccatttcattgtactcatcaaataattttttaaaatgagcatcattggtttttaattcgtgtattttttcctgatattgaggaaactcgtgtaataaatcgtgtctttccattttaatgtatttatgagttagtaataaaattatggttattatttaatgacaattgggttcagcttgaacaaacaaactcatattagaaggggaaacatagggaatccctaatcctaaacctcttaaaataaacaaacaccctataaaaacagcaacgtacggaattgctttttgaattttgtttcgaatgcgcaatgttataaacgaatttgcatataccacggcactcatcataggcactgttcctaatccgaataagatcatatacaatacccctaaactagcgctttgcatcgctatggcaccaaataaggctacataaaccattccgcagggtagaaaaccgttgagtaaaccaatcgtaaataaggacttgtaacttttgtttttaaactgacttcctagatgttgcttaatttttgatattaatcgaaaaacaggttttgagaaattatattttgcaaatgacctttccggaattatgacgattaaaatcattgccacaccaataaagatggacatcttttgttgtaaaccagccataaaaaaaccctttcctactaaaccaaaaactaatcctatcgtaccataagcagtcaatctgcccaaatggtacgtcataatttgaatcgtttttttggccttgttattacgatctacaggaagcatcatagctataggaccacacataccaatgcagtgcaaactactaatcaatccaaatataaaagcggtgtataacattttattaattgtgaattctacatttctcgtttagcaacactatttcactaagaaactttgaaactcagagaatcagaaacttaaacaatctaattaatataaatagtctccttagtcaagtatgcttttccttcatactgccattccatattaatatcccatcgaccgcctaccaattttgatttaggtatgagcaaagttggcttagacagagaaataggaatttcaaaatctaaatttttcatagacggtctatatagggat

SEQ ID NO: 1087 - DNA, 24590 bp, synthetic construct
  misc_feature 1..24590: note = Synthetic
  source 1..24590: mol_type = other DNA
ggcggcaaagatatatggatggcagaaaaggacaataacgaatgggtcaacgtgcagaacttaggcagcggtatcaacacgtccgccaatgagatgtacccgtacgtgcatgccgatgggacactctatttcgcatcgaacggtcatccgggttatggcggtttggatattttcaaagcgacaatagacagcacattcaccgactccattgtgtgggtgctatataacatgggagcaccgttcaacggaaccggcgacgatttcggaatcacattcgccggaaacagtcaggacggttatttctcttccaaccgcggagaaaagaaaggttatgacaagatttatgctttccgactgccggagatggagttttttgcggaaggagtggtaacggatgagcaaggcaatccgctctccgacgccaaactacgcatagtgggctctgatggcacgaacaaccgcgtgaacgcccgtcgagacggcagttataagatcaagatcaaacgtgaggtcaagtatgtgatgttagcgaccgcacgcggacacctgaatgccaaagaacaatggaacacctttgatctgaaagacagcaagacatacacgatgaactttatgctaaacccgataagcaggccggtgaagatggagaatatcttctatgagttcggtaaatgggaagtgaccaaagccagcgaaggggagttggagcagttagttaagttactgaacgacaaccccaatatcacgattgagttgagcgcacacacggacttggtgggtaacgagcagttcaacttggagttgagtcaaaaacgtgcacagagttgctgcgattacctgatcaaaaaaggtattgagaaagaacgtctgacaccggtgggttacggtaagacgaagcctgtgattgccgataaagcgcttaataaacgctattcgtggataccggtagagcaagccttggatgagacgtttatcctgagtctgccggcagacaagcaggagatttgcaaccaaatcaaccgacggacagagtttaaggtgttgaaaacaacgtataaactttattgacgattgaaataattgacgatttatgcaacaatatttggatttgtgcaagagagtgctggaggaaggcacagttaaacatgaccggacgggaacagggacgatctctgttttcggacatcagatgcgttttaagatggaggacggttttccgcttttgacgaccaagaaactgcatctgaaatcgatcatctatgagctgctgtggttccttcaaggagatacgaacgtgaagtatttgcaggaacacggcgtgcgcatctggaacgaatgggcagatgagaacggcgagttgggacctgtctatgggcatcaatggagaagttggcccgattataacggcggtacgatagaccagattgccaatatcgtggagatgatcaaaaagaatcccgacagccgccggatgatggtgagcgcatggaatgtggcagaagtggagaaaatggctttgccgccgtgtcattgcctgtttcagttctatgtagcggacggcaaactgagtctgcaactctatcaacgaagtgcggacattttcctcggcgtgccgtttaatattgccagctatgcgttactgctccaaatgatggcacaagtaacagggctgcaatgcggagattttgtacataccttgggcgacgcacatatctatctgaaccacttggagcaagtgaaactgcagttgacacgcgagccgcgggctttgccgaagatggtgatcaatcccgatgttaaggacttgttcggtttccaatacgaggattttcaattagagggatatgacccgcatccccacattgccggacaagtgtcggtttaaattaaaaattaaaaattaaaaattaagaattacgaattatgatttccattatagtagcagtagcagagaattatgccatcgggaagaaaggcgatttgctgtgtcatcttccggcggacttgaaacatttcaaggagatcacaagcgggaaaaccgtgctcatgggcgaacggacattctattcgctacccaaacatccgctaccaaaccggcggaatatcgtgctgaccgatgtgcaaggcaagacttttgaaggagccgaagcggtttattcattggatgagttatgcgccaaagtgcaaggcgaagaagaagcctttgttatcggcggcggaatggtttaccggcagatgatgccgatagcggataaattgtatatcacgcatattcatcatagttgggacgatgccgatacgttcttcccagagatcaaagagaccgaatggaaattgatcagttccgaggaacaccaagcagacgaaaagaacccgtatgacttcaccttttgcacatataataggcggtaacacaaacatcagcgagcggcaagtagatgccgtactgactttgttggacgaaggagcgacgattccttttattgctcgttaccgaaaagagaggacaggcagtcttgacgaagtgcagatcgccgctattcagacacaatacggaaagttgcaggaattagccaaacgcaaagagaccatctatgcgcggttagatgaattacaaattacgaatgacgaattacggcaacgtatagccgattgctgggatgctacggagctggaggatatctacctgccgtacaaaccgcacaggaagacgcgcgccgacatagcgatagagaaaggattattgcctttagctgaagagattctcaaacaacgtccgatgaagttgccggatgaggaatcgttgcaaggtgcacgagatattattgcgcagcggattgcagaagacgagaaaagcagaaatgctatccgacgcgagttcagttataccgccatgctgagttgcaaggcggtgaagaccaaatgtgacagccccgaggcacagaactacaaggattattttgatttcaagtgcccgctcaaacatatcaaaagccatcagttattggctattcgtcgcgcagagagcgaaggatttctgcgtgtggacatctcgccggacactgagaaagcgttagataaattagcgaacttgtggttgcgggcgaataacgacacagcttaccaagtggagttggcgatggaggacggttataaacgactcctgaaaccggctatcgagaccgagtttgccgcgctctccaaagagaaagcagacgaagaggctattcgtgtgtttgcggagaatcttcggcagttattattaggcgcacccttaggtcaaaaacgcgtgctggcattggatccgggattccggacgggctgcaagaccgttgtgctgaatgagcaaggggatttgttgatgcacgatgtcgtatatctgcataatcctcaaagcacgcagaaactgcaggagttgattgagaaatacaagatcgaagccatctctatcggaaacggaacagcaagccgcgaatgtgagcaaatggtacgttttgcaatcatccatcagtcttcagatatcaaaccccaggtctttgtcgtgagtgaagccggggcatcggtgtatagcgcgagtaagattgcacgggatgagtttcccgatgaggatgtaaccgtgcgcggagcagtaagtatcggaaggcggcttattgacccgctggcggagttggtgaagattgagcccaaatccatcggtgtcgggcaataccagcacgatgtggaccagaccgagttacgcgagagtttgcaacaaaccgtggagagcgtggtcaattatgtgggagtagatgtcaataccgcgagcaaacatctgctgacctatatttccggtttgggaccgatgttagcgcagaatatcgtagattaccgtgcggaacatggggctttcggaagtcgcaaagagttgttgaaagttctgaaactcggtgctaagacttttgaacaggcagctggattcttgcggttgaaaggagctaatccgttggataacagcgctgtacacccagagagttacggaatcgtggagaagatggcaaaagatcagaaatgttctgtcgcggatctgattgccaagaaagagttgcgggatcagattgatttgagcaaatacgtgaccgcagaagtggggctgccgaccttgacggatattttgaaagagttagcacagcccggacgagatcctcgcggcgaaacggaagagtttcattttgatgaacacgtacacacgatagacgacctgcaggcaggcatgatcttgccgggcattgtaacaaatattagtgcttttggcgcgttcgtggatttgggagtgcacaaagatggacttattcatatctccgaaatggcagaccggcgtgtgacgaacccgcaggaagtggtcaaactacatcaacatgtgcgcgtgcgcgtaatagatatagatcgcgcgcgaggaagaatacaattgagcctaaagcgaattaattgacgatttgacgattgacgaggtacgattgattgacgattgattataattgacgattgtcagcagcgtaaaatcgtaaataaactgcgaagcggtaaatcgtcaataaatcgtaaaatcgtaaatatgtaaatcgtaaatatataattatggcagacgataagaagataattttttcgatggtgggactgagtaagagttttggtccccaaaaacaggtattgaagaatatctacctgagtttcttttatggtgcgaagatcggtatcatcggtctgaacggcgcaggtaaatccaccctgttgaagatcatcgccggtatagagaaagagtaccaaggcgaggttgtttggagtccgggatatagtgtcgggtacttggagcaagacccaaaactcgatccgaacaagaccgtgcgcgaggtcgttcaagaaggtgtgcagccgatcatggacatgttgaaggagtacgacgatattaacatggcttttgcggagccggacgcggattttgacaaactcttggctcgtcaagctgagttgcaagataagttagacgctgccgacgcatggaacatcgaccagaaactcgatcgtgctatggatgcacttcgctgtccgccggatgacgcgagtgtcactaccctttcgggaggtgaaagacgtcgtgtagcgctctgtcgtctgttgcttcaacagccggatgtgctgctcttggacgagccgacgaaccatttggatgcggagagtatcgattggttagagcaacacttacagcaatatgccggaacagtgatctgtatcacgcacgaccgctatttccttgataatgtggcaggttggattcttgaactggatcgcggagaaggtattccctggaaaggcaattactcgtcgtggcttgagcagaagacgaaccgtatggcgcaggaggagaaacaggcgagcaagcgtcgcaagacccttgagcgcgagttggagtggattcgtatggcgccgaaagcacgtcacgcgaaacaaaaagcgcgtttggagtcgtacgaccgcatgttgaacgaggaacagaaagagcgcgaggagaaacttgagatctttattccgaacggtccgcgtctgggtaacaaggtcattaacgctgaaggtgtagcaaaatcgtttggcgacaggttgctctttgagaacctcaatttcatgttaccgccgaacggtattgtgggtgttatcggaccgaacggagccggcaagacaaccctcttccgtatgatcatcggcagcgagaaagccgacaaaggtacattctccgtcggcgagaccgtgaagatcggttatgtcgatcagcaacacgcagatatagacccgaacaagtccgtttttgagaccatcagcggcggaacggagttcatccgtgtagcaggtcgtgagatcaacgcgagagcttatttgagccgtttcaacttcaccggcgcagaccaagagaagaaatgcggtgtgctctccggtggtgagcggaacagactccatctggcgctgaccctcaaatcagaagccaacgtgctcctgcttgacgagccgaccaacgatattgacgtgaacacgctgcgtgcgttggaggaaggtttggagaacttcgccggctgtgcggtagtcatctcgcacgaccgttggttcctcaaccgtatctgtacgcacatcctcgcgtatgaaggagacggcaaagtgttctggttcgaaggcagttactcggaatacgaggagaacaagaagatgcgtctgggtgaagaagcgtgcgaaccgaaacgtgttcgctaccgcggactaattaataattaataatgaataattaatattttatagttgcttagacgtgtatcgacatatattcggcagcggggattgttacagaaagacaagcctgtgttggtggcattgagcggcggagcggatagcgtgagcctgctcgatgtgctcctgcgagccggatatacgtgcgttgcggcacattgcaattttcacctgcggggcgaagagagcaaccgcgatgaagctttcgtgcgggatttgtgcaagcaaatgaacgtggagttggaggtcacggatttcgacaccatcgaatacgcacgtacgcatgaagtgagtattgaggtagccgcacgggagttacggtatagatggtttgatgaaatggcacgcaaacatcaatgtcaagcagtttgtgtagcgcatcatcagaacgatcaggcggagactattttgctcaatctcaaacgcggaacaggtatccgcggacttgccggaatgcgccccgtgagcgctaatcctatcgtaccggagagcgtgcctattgtgcgtccgttgctctgtacaacaagaggatatattgaacattatttgaaagacaaaaggcacctcaattgggtgacagacagcactaattcggacacttcgattacccggaatgcgatccgcgagcagctcaaaaactactccaaaacagagatcgagcacatggctcaaacggcggaatacatgcaagggtacgtagatatgatagagggtaaaaagtcgcgcgaagaaggtatcgcacgcctttacgaacaacttcgcgaatataatttcgcagaaatagataaaatttacgatgcgttgcaacggggagaaggaggcaaaacattcacctccaaaacccaccaagcaacgataaaaaaaggaaaattatgcgtcactttggtatcataggatttccattattgcactccttctcggcgaagtatttcaacgagagatttgcaacagaaaaaatagaagcagagtactcgttgtacccgatgaaggagttaacgaatgaacgaatgaacgatttgctgaactctttggatggcatgaatgtcacgatgccgtacaagcaagcaatcattccgtatctggagcagctggacgaaacggcggaagctgtgggagcggtcaatgtggttcataaacgggtcggttacaacaccgattgtatcggtttcatggagtcgatccggccgttgttgggcgagaatgaccacaaagccttggtactcggaaccggtggtgcatcgaaggcggtttgttacggtctgaaaaaattagggctctcccccactctcgtcagccgtacgccgaaagaaggcatgttgggttacgaccaattgaccgaagaactaatgaacaaatacaccgtgatcgtcaattgtacgccgcttggcatggcgcccgaggaaaacacgtaccccgcgattccgtacgaatggatttcggcacgacatttgttgttcgattgcgtgtataaccccgaagagacgcttttcctgcaaaagggaaaggcgcaaggcgcacgcatcaaaaacggcatggagatgctcttcggacaagcgaaagcggcgtggaagatttggaataatgaataatgaataatgaataatgaataattaatatttcagagatatgaaaaagatctttttagtgctcctgggagcatgtatgttgtgcggggcaaacgcacaagtagtgaaacaagacgaaccggctttggtgtattacagtccgaagacttctatctcgctggatttcaaatacaccgtcgagaccttcgaacccggcatatacgcctcttacgcggaagcgatgttaggcgcgacagatgcggtgaaagagaacaaaaaagaatatgcactgaagagtgtacagatcaccacttccacctccactgactacgaccgtccgcacaaagtgacggcagaaggaggcattcctatgttgctcactatcaacgggaaaggtctgctgacaggttataatgtcccgatggcgcaggagaagaaagcagcaagtaatatctacaactcaacgcgagaggaaaataaaccgaaaacgatgaagaatcgcattgcgccttatccggaagacgtgctcaaagcagctactccgatggcccaagcacatgaggtagctaagcagattttccatcttcgtgagacgcgtatgtacttgctcaacggcgaagtagagcacgctcccgcggacggcgaggcaatgaaattagtgctggcagaattggacaagcaggaacaagcgctcacggaactattcatgggcaagagaagcaaaaaaatatgtcataagcatgtgagcttgaatccggagcaggcagataaactctatttcttctccgatgagaatggttttaccgacgcggagaacgtagatgccgacaccatcaaggtggcgttaaaagcgcaaaagcaaagcctcttgcctcctgccgtaacgggtaaaaaacagaaagcgccggcactttcgcagattgtatataacttacccggctgttgtgacgtgaatgtgttatacaaaggtcgcgtaatgaacagacgtacgatctctgttgcgcaattcggagtagatgttccgctgagcagggatttgttcaccggtgccaacctgcctgtgattgtctttgatgagaaaaccggcaatattaaatcaattagcaagtaaattataattgacaattggattattgtgaaaagaataactttcatcttattttgtctgctgacattgattgtaagccagacaaaggcgcaggaactcaactgctccgtgactgtcaattcggacatgattgagggaactaacaagcagattttctcaacgctcaagaccgccatcgaggaatacatgaaccataaccgatggaccaatatgagttatgccgagcatgagaaaatcgagtgcagcatgcttattgtggtcaaatcgaagactgaagatatgttcgtttgcgacatgacgttacagagccgccgtcccgtgtatggctctacatacaccacgccgctaatcaatttcgtggataaaaacttcaattttacttaccaagagtacgaccgcattgagtatcagcaaaacacgttcacgacgaacctgacggcgatgttggcgtattactgctacctcatcatcggtcatgaccaagatagttttcaacgcttgggcggtacacctttcttccagcaatgcgaagatattgtgaatgcatgtcaatcggcttcgatgaacgaccaggagcagcgtggatggttagcttttgatagcaaccgaaaccgctatgctctgacgaataacctgattgacgaagcgtttaagaaataccgcaattattactatgagtaccatcgtttgggcttggacgagatgagcaataatgtggcaaatgcgcgtgcccgtatcgcggaggggatgccggttctcagagaatcttatcgagcccgtcctgctacgtacgtaatcaatacttttctggatgccaaggcggatgagatggtggacatcttcagcaaaggaaccgacaaggagaagaaagaggtgtatgagatcctaatggacatcgaccccacccgacaaaacacttttgatcgaatcaatcaataatagttgtaatttatttgcgtgattcagaaaaaagttgtaattttgcaagcaaaattgattgatacgaaaaataacaattaccatgaagaagaaaattctcggtttagatttaggaaccaatagtatcggttgggcagtagttaatgatgaaaacggcatgaaaagcatttctcatgccggtagccgtattattcctatggatgcaaagttgatgggagattttgaaagcggtaattcgatctcacaaacagcaactcgtactgctgctcgcggagcaaggcgtttgtatgagcgtcacgctttgcgtagagaacgcctaaaccgagttttaactattcttggcttcttgccggatcactatacaaaagaactgaaccgctacggacaagtaaataaaggcgcagaacctaaattagcatggaagttcattgatggtaaatacttgtttttattcaaggagtccttttttgaaatggttcgtgatttttccagagtacatccggaattgttggagaatggacgaaatatagcttacgattggacgatctattatttgcgccagaaagcattatctcagcccattggcaaacaagaattagcatggattcttcagcagtttaatcaaaaacgcggttataatcaagcccgcggagaggaagaagaacagaaagaaaataaacgtcaagagtttataacacaaaaagttctttcagttcgcgatacaggcgaaaaatcaaagggaaaaactgtatatgaaatatgtcttgaaaatggatggaactttaccaaagaaagcaaatatcctttagattgggaaggcaaaactaaaaacttcattgtttcaaccactctcaattctgatggaacagatgcaatagataaagatggtaaagctagaaggacatttagagcacctgctgatgatgactgggcacttctgaaactaaagacccaacacgatattgatgcaagccacaagactgtcggagaatttatctacgatgctttgctacaaaatcctaatcaaaagattattggtcagttagtacgtgttgttgaccgtaaatactataaagacgaactaaaacgcatccttgatactcaaaagcagtttattcccgaattgcagaacggaaatttgtatgatgagtgtattcatgcgctttatccgcaaaatgaagcttatcggaatagtatagccggcaaggattttacgtatttgctgctaaatgatattatcttctaccaacgcccgctgaaaagcaagaagtcattaatcaacgaatgtccgtacgagtatcatgtatataaggacaaagatggcaaatggcaaaaaaaatacttgaaatgtatttccaaatctcatcctatttatgaagagtttcgtttatggcagtttgttgaaaatttgcatctttatcgcgatgacgctaatggaataggcaaggcagattgtaccgcagagtatatagtcaataaagcggaattgatttcttggctgctgacaaagaaagaagtgaccgaagagtctttgctcacacatgtagctggaaagcaaaagaaaggtctatcgtggaattatgtttccgaaaaagggaaaacataccctgctgctcctgtttcttctactataattggcactattaaagaggcaggtggagacatcaacactttgaccgatccatttgaaatccgccaaaacaagcaccatagaaaattatcaggtaaagaacaagacgagaaagccaaaaagaataatagaattatcaataatttagagcaaatatggcacatgctctattcaatatctgacaagtctcaactgctcgccgcgctcaaacattatgctgaaacaaaccatttgtccgatgtgtttgtagagaaattgggtaagatgaaaccattttccgactacggagcatatagcgaaaaggcaacgcgcaagttgttgaatttaatgcgttgcggagcgtattggagcgaagaagcgatagatgctcaaacaaaatcccgtatcgagcatattcgaataggcgaagtggacgatgcaatcagtgagcgtgtccgcgagaaactggacacaatgcatgaagtaaaagattttcagggacttccattgtggcttgcggaatatgtagtttacgatgtgcgcaagaacgacaccaaatgggagaagccggaagatattgacaagtatcttcaatcattccgtttacactcgctcaataaccccattgtggagcaagttgtcatggaaagcctaagaacggttcgtgacatttggaaacaagaaggacaaattgatgaaatacatatcgaattagggcgcgacctcaaacaaaatgccaaacaacgcaagaagactcagcaacgccaacaagaaaacgagaaagcgaaccttcgggcgaaattactattacaggaattcatgaatcccgatatggagatagaaggtgtacatgcttattctccgagccaacaagagcttttccgtatctatgaagatggagtattaagtgccaacaaacccgatgatgagacacaacgcatcataaatgacttatcttctctcaaacaaccatctgcccaagatatcaagaaatatcgcctttggttagaccaaaaatatatttcaccatatacgggagagattattcctttagccaaacttttcacaccggcatatcagattgagcatgttattcctcagtctcgtttcattgatgattcgatgtccaacaaggttatttgtgaggcagaagtgaatgcccgtaaagacagaaagttgggacatgagttcattgtaaaatgcggaggagaaaagattacactttccggaggtaaggttgtaacaatattatcccaagaggcttatgaggatactattcgcaagaacttttccggagacccacgcaaacaggagaaactgatgctggatgatattccggagaagtttgttgcccgtcagaagaacgatagccggtatattagccgattgatgatgcaactgctcagtaatattgtgcgtgagaaaatcagtaatacagaatatgagccggaggcagttagtaagaatctgattgtatgtaacggcgcaactaccacgcgtctgaagaaagactggggaataaacgatgtttggaataaaatcattcttccgcgttttgagaggctgaatcagatacaaaatacaacggtctttactgccaaaacagcaaacgggcacattattcccaatatgcctttggaattacggcagggctttgagaaaaaacgtattgatcatcgtcaccacgcgatggatgcaatcattattgcattcacaactcgcaatcatgtagctttgttgagcaacgaatccgcattagacaaggatgagaacgcacgcgatgacttgcaaacgcttctgcgcaagcgggaagtctggagaagtgcagacgggaaagaacattataaattcacagattttattgcaccgtatgacggtttccagaaagacgtacaagatactttggaaaatataattgttagtttcaagcaaaacttacgcgtaataaataagagtaacaatcatttcgtgcgtttcaaaaaagacgaagatacaggaaaactaaaaaagaaaaaagaccgccaaaagaaaggggacaattggtctattcgcaagtccttgcataaagcaactgtttttggcgaagtgaatcttcgcaagaagaaatatgtcaatctgacttatgcgctccagcatgtggaagatatagtcgagaaagatttgcgtaccaaactgcgcgagttgctgcaagaaggcaaggacgagaagcaaatcaagaaatactttgcttccgaaccggatgtttgggcagatgtcaacctcaaacgtataaaggtcttctattataccaaggatacaaacgaccactattatgcggtcagaacagcattggatgactcgttcacagaagattatatccgcaacaaagtgacgtcagaagccatccaaaagattcttcttgcgcatctggcgcgttgtaataatgatccgaaattggcattttctcccgatggaattgagcagatgaacgcagatattcaggctcttaataacggtgtgcctcataaaccaatatataaggtacgcacgtgtgagaaagcagagaaatttgcagtgggacaaatcggcgctaaaagcaaaaagtttgtagaagcagacaaaggaacaaaccttttctttgctgtttattctaccaaaacggaagatggctctgataaacgttcttttgttaccgttccattcaaagtggcggtggattgccagaaacgcggaaagaaagaatggcgtacattattagacgaatgggcgcattctgaaagtatagttgcagagaatgcaaaactacaatttattctttctccgggagatttggtctatgtaccaactgcagaggaaatacatagtggaaacataagattggataaatccagaatatataaatttgtttcgtcaagcgatgttgatgcgtattttataccagtagcggtagcctcgccaatagttaataaagtggaatatactcaactaaacaaagtatcacgagtgagcatagaagaaccgctaatcaaagaaatttgtaaacctatccgtgttgaccgcctgggaaatattatagagccatgataaaacgcgtcttatgttttgagaatccggcacgtttgagtcttcgtttggagcaaatcgtcgtagagttaacagctgttgttaacaaccctaatgtgcctgaaattgcgcaaaaaatgggcactaaaaccattcccattgaggatgtcggggtcgtagtgctggataaccggcaaattacgatcacacacgcgcttattgacgcacttcttgaaaacaattgtgccatcattacttgtaatgaaaagcatcttcccgtgggattgatgcttccgttagacggacacaacttgcaaagcgagcgtttcagggaacagataaatgcatccgaacctctcaaaaaacaattgtggcagcagacggtaacggcaaagattttgggacaagcacatgtattgggcactcaacatattgagcataacaacatgctcaaatgggcaaaagatgtgcgttccggagatacagataatatggaagctcgtgcagcggcatactattggcgtaatgtgtttggtgatcaggattttatacgtgctcaagaaggactgccgcctaataatctgctcaattatggctatagtattgtccgcgctatgatggcaagagcgttggttgcggcgggattattgcctactttgggcattcatcaccataatcgctataatgcttattgccttgcggacgatatcatggaaccctacagaccatttgtggatgaaatggttttgacgatgatcaaacaagggatggttggtgaagatattactactgctcaaaaaatccaactgttgggtttgtgcactgcagatgtgcatattgaaggtcatcgccgtccaatgatgttagccatccaaacaaccgcacaaagtgtccaaaagtgttactctggcgaagcaagaaaaatcatttatccagattggtaactatctcatcctaaaaagtaaaaatacgaactaaaacaagccacaccttgcgtgttttctttgtcgttaggttgtgtatgtcattcaaaaaagtaaaaatacggactaaaacaaggaaaagattgggttttgggactgctggcttggttgtgtatgtcattcaaaaaaaagtaaaaatacagactaaaacaaggcacaacggatttcctgacgtacctgcaaggttgtgtatgtcattcaaaaaagtaaaaaatacggactaaaacaagcatttcaatcatgtaaacatcagcagccgtgttgtgtatgtcattcaaaaaagtaacaaatacggactaaaacaaggaggagttcatcgatgagacctacaactgccgttgtgtatgtcattcaaaaaagtaacaaatacggactaaaacaagcaactggaaattaccaaatataaataataggttgtgtatgtcattcaaaaaagtaacaaatacggactaaaacaagtttctgggtcttggggttgtaggtgtaccagttgtgtatgtcattcaaaaaagtaacaaatacggactaaaacaagatatgcaggcacagcaaccgaaagtaattgttgtgtatgtcattcaaaaaagtaacaaatacggactaaaacaagtagccggtgtacaacaggcaaacatcctggttgtgtatgtcattcaaaaaagtaacaaatacggactaaaacaagggcatcagcatgtttactacagaaagggatgttgtgtatgtcattcaaaaaagtaacaaatacggactaaaacaagttctcttccttctttagtttctgccttttagttgtgtatgtcattcaaaaaagtaacaaatacggactaaaacaaggctgccggtaaggcatattataagtacctgttgtgtatgtcattcaaaaaagtaacaaatacggactaaaacaagcatgtgcaaataaattagtaactttgcgtaagttgtgtatgtcattcaaaaaagtaacaaatacggactaaaacaagttagttgcactccatcatcatccaagcgagttgtgtatgtcattcaaaaaagtaacaaatacggactaaaacaagtttccctaatattatctcaaatgaaacaagttgtgtatgtcattcaaaaaagtaacaaatacggactaaaacaagtatcactggtaattgtccaaaatctgtcccgttgtgtatgtcattcaaaaaagtaacaaatacggaataaaacaagtttgttcgttttcttttcaaatgaaaaatagttgtgtatgtcattcaaaaaagtaacaaatacggaataaaacaagacagtgtgctattcgatgccgtcaagtccggttgtgtatgtcattcaaaaaagtaacaaatacggaataaaacaagagaatccgtataaagcactaaaacacaacaagttaagtaatgttttagaacgtaaaaaagcagcactttttagtgctgcttttgtttgtataatacccattttcgatttctaaaacaactccaattgttgaacaggctgatcaacctgaatctctttgcaacattcaaaaatctgcatatctccaaactgcttgtccgtgatccggagaataccgatcttaccaaacggtggcatccatttcttgacacgcgctatatgaacatcggcattctcggcactcgggcaatgacgcatataaatactgaactgaaacatagtaaacccgtccatcaaaagctttttgcggaacagggcatattccttcctgtctttcttggtatctgtcggaaggtcaaataaaaccaaaacccacataattctatattcgctaaatcgggtcatgtattagctgcaaaggcacgattaactaagttcatggatgcaaaattacataaaaatacgcaaatatcaaaatttttcgccaataaatttgcatatttcaaaaaaaagcagtacctttgcataactttttgaatgacatacacaataaggattattccgatgtgtaaacatttagggtgggaggaaactctcgccctctttttttagaacacttgcgccacttaccctttcaacctccttccatttaggcgagcatttcgcgagcatcgtggacgtgaccatacgatggctataccatgattactggttaaaaggttaaaggttaaaagtcaaaagtaaaacaccaaaaagtcaaaagtaaatttgcatatatcaatatttttttgtacctttgcacgcaaattttgcgcagatgacatctgcgggagaatattaacagatgccggaaagagagacgcagatgacatctgcatgggaatattaacagatgccgaaatgagggacgcagatgacatctgcgggagaatattaacagatgccgaagagagagacgcagatgtcatctgcggggggatattaacagatgcggaagagagagacgcagatgacatctgagggaggatattaacagatgccggaaaagagagacgcagatgacatctgcgggggaatattaacagatgccggaaaagagagacgcagataactaatcatctacacataaaaggcctatctatggaacgattcgtttggaagcgacataaggatattttcaagggtatcgggatataccatatcacttttgtggtcggtggtagacagccgttgttgggaagcttggctgtttatcacgatgagccgcgatgcctgccaaccgatttaggaaaagctatatcgcacgacttggaacatatccaacaacgcagaccatacgtccgccttcttgccaagcaattgatgcccgaccatatccacgtgctactatatattaccgatgagtgcggtgtcaccatcaaggagatagcacgagggatgcgccaaggatggcgacagatcatgcccacccctgtcaatatagacccgcagatgtcatctgcaggagaatataaacagatgccggagataagcatagagatggcagaaggggggacgcagcctcctctctttgagacgccattttttcgcacactcgcgcacaaagggcagttagatgcgatgattcaatatatccacgacaacccgcggcgcgctttgctcaagcaacagaaccccgacctgttcattctgcgcagggatacgcgtgtgagagaactatgcttcacttcgatgggtaatctctttctcttggattatccggacaagcagccagtcatctgttcccgctcgctgagtgagcaacagatagccgcgcgacaaacggatgcgctccaccaagccgaaaacggctgtattacggttactgccgctattagtccgggggaaagacagatagcaaaagctatccgggaagccggctttccgcttattatccttctcaaggatggtttccccaaggcgggcgatccgtatgagaaattctataaatccggcggagtttattttgaagcatgtgcagccgggaggcttctgttgttagaacccaccgcagagacccttactttgcccaatatacagacacgtaccgaacaggcgctccgcgaaaaagcagaagccagacattggaattatcaaccgatacctgtctcatctgaccgctaccgtatgatggcagccaatgagatcgtcaaaatcctatgcccatgaactgattaccgaaacttttactttattcttaataatcgtatacctttcaacaaccttccgaaatcgagccaaatagcatatctcgcgccactctcgcgccactatttggtagatagcatagctccctctatgccggctcaaaggcatcgagaagcatcatacaacagaataaattctattttttgcaaaaaaacgcttttttatttgcgtatatcagaaaaaagttgtaaatttgcatgttttttgaaatattttgtatataatatacaatcggactattagaacggacaaatgttaaaacatcttcacatacagaactatgcgctgataagccatctggatattgattttgaagggggtttttcggtgctaaccggtgagacaggagcaggaaagagtattatcctcggtgcgctggctttggtgatgggtgcgcgcgcagatagcaaggctattacggacggagaagagaaatgtattattgaagcggtgtttaattcacaattcacaattaacaattcacaattcacagatcataaagcacaagggacaaaggagattattgtgcggagggaactgtatgcgaatgggaagagccggtcgtttgtggatgacagtttggtgacgctgcaggagttgaagagtttggcaaacaagctgattgatattcatagtcagcacgctaatctgctgattgagaatgcggattttcagttggaggtagtggatgctatcgcgcagaacggagcgctatcagaggcgtatggtagtcagtacgagcggtatatggcggcgtgtgaggagttgcataagttacagagtttggcaaagaaaagtcagcaggatgccgattatatccaataccgctacaaactcttggacgaggcgcatttggaagccggcgagttggaagaattagaggacgagcaataccgtttgagccacgcggaggagatccggacggcattagagacggcattggcggcattgagtggcgagcaaggaagtgcgatagaagcgctacgggcatgtcgtctggacgaagcggcaagcgatctgcaagaacggatcgagagtgcgcggatagagctgcaagacatagcccaagaagcggagcgcaaactaaaccacatagagatggatccgcagcgcttggaatgggtcgaggaacgaataggtgcgttggaggaactgaaacataagttcagcgcagagacggttgacgaactgatcgctatgcgggacgagttagcggaacaagtgaaccgtttggacagtttcgatttcgatatcgagcaagcaaagaaaacagtcgagacggagaaaaaggtgttaacgaaagctgcagaggcgttgaccaagagccgcaaagcggttgtgccgcagatatgcgagcggttaataagcggtttgcagagtttgggtgtggcgcacgcgaaaatagaggtccctattctacccgctccggattttactccgaacggttgtgacgaagtgcagattctctttgcagcgaacctcaatcagagcctgcgggcagtgagcgaagtagcgtccggcggtgagataagccgattgatgctctgtatcaaggcgttgattgcctcgaccaaaggattgccgacgattattttcgacgagatagacaccggtgtgagcggtaacatagcgacgcagatggcgaagatcatgaaagagatgtcgaagagccgccagatcatcgctatcacccatttgccgcagatagccgcacagggcgagagccattacaaggtctataaagccgatacggacaaacggacagagacccatatcagccgcttgacggatacagagcggatcacggagattgcctctatgctgagcggaaaagacgtaagcgaggcggcggttcaaacagcacaggaattgttaaataataattgacgattggacgattgacgaggtacgattgattgacaattgaaaagaattgttcgattgttcaccgtaaatcgtcaatcccgcgaagcggtaaatcgtcaataaatcgtcaatcgtaaatttgtaaatcgtaaataaactttatgttgccattagcagaacgaatgcgtccgaagacgctggacgaatacataggacagaaacatctggtgggtgaaggagcgatcctgaggcagatgatcgagagcgggaatatcgcttcgttcattctgtggggtcctccgggcgtgggcaagacgaccttagcaaggattattgcacatcagttacagcgtccattctatacgctgagcgcagtgacgagcggcgtgaaggaagtacgggacgtgattgacaaagcgaaacggaacgcctcgatgaacagcggattgtttgccccgacggacggaagaagcccgattctgtttattgacgagatccaccgtttcagcaagagtcaacaagacagtctcttgggagccgtggaagaaggaacgatcacgctggtcggcgcgacgacggagaacccgagttttgaggtcataacgccgctcttgagccgatgccaagtgtatgtgctcaaatcgttagccaaagaggatctgctggaactgctcaaccgtgtgctgaccaaagatgagtacatccgttcgttgggaatagaggtcaaagagaacgaggcgttattgcgtttcagcggaggcgatgcacggaagttactgaacatcattgagttggtggccaacagcggcgtcaaggagattacaaacgagaccgtcaccaagcagttgcagcaaaaccccgtggcttacgacaaagacggagagatgcactacgatatcatttcggcgttcatcaaatcggttcgcggaagtgacccgcaggctgctatttattggctcgcacgcatgatagaaggcggcgaagatccgaagttcatcgcgcgtcggttggttattttggcgagcgaagatatcggtttagcgaacccgaatgcgatgttgttagcgaacacgtgtttcgacgtagtgaacaagatcggatggccggaagggcgcattcctttagcggaaacgacgatctatttagcgacctgtaagaaagacaactcggcgtatttggcaatagacgaagcgcaggcaaaagttcgcgaaacgggtaatttacccgttccattgcatcttcgcaacgcgccgacgagtctaatgaaagatctcggttatcacgacggatacttatatccgcatgattttccgggacactgggtggaacaacagtacttgccggatgagctggtgggaacgactttttggaagaaggattagtgggttagtggattagtggatggctgggatatacgtacatataccgttttgcaagaagagatgtctgtattgcgatttttactccacaacgctgttggggaggcaagaggaatatgtgatggccgtggtgaaagagatcgaacaacggcagcacgaggcaggagaaccgatacgaacggtgtatatcggcggcggtacgccaagcacgctggagattgagttggtgacagcacttactaaggcaatagatagcacaaacatatcagaatataccgttgaagtcaatccgggcgatgtgacagaggagtatctgatgggcttgaaagctttgggtgtgaacaggctgtcgatgggtgtgcagtcgtttcaggacgagttgctgcagcaaatcggtagaaggcataatgccgcggaagcgattgaggcagtgcggacggcacaaaaagcagggtttgagaacatctccattgatttgatgtacgcgctgccgggtcagacgatggcgcaatggaaagcggatatagagacggcattggggctcggcgtacaacatatttcgtcttacggactgatgtacgaagaagggacgatgttgacccggatgcgagacaaaggagatatcataccgatagacgaagagacagagaacgcgatgtacgacaccctctgcgagcggctcaaagaagcgggttttgtgcattacgaggtgagcaattttgcgctcccgggctatgaagcaaaacataacagcagttattgggacggcacgccgtatataggcataggagccggagcgcacagttatataggacgtgtgcggagctggaatcccgatgatttggaagcgtatataacggggatagaaaacgggactttggttcgcgagagcgaggcactaaacgacagagacctgtacaacgagcggatcatgctggggctgagaacgaataaggggatcctcctatcggacgtggacgtacgtaatgcgaacgagatggtaacgagaatgacaggtaagaatccgctattacgggagacggacgacgggcgtttggttgctacacaaaaaggaatacatgttttaaatcgaataattgaagatctgatgatatgaaaacgaagagttggtacaaaccattcttattgtggttctggggattattccttggcgggatgacggttgcttttctggtcatttggttgattaccaaaggtgcgttgggttatttgccgccgttggaggaattgcaaaatccgaaaaacacgttcgcgagcgagattatctcgtccgacatgcagtcacttgggcggtattaccgctatgagaaccgtatcggcgtgcaatacacggatttgtcgccgaacctgattaacgcgttaattgccactgaggacgctcgtttttacaaacacacgggcgtggatttcaagtcgatgttccgcgcggtactcaaactcggtcgtgcgggcggtggttctaccctcacccagcagctggcaaagcagttatggtctcctcgggcgaacaatatttttgagcgcgcgatgcagaaaccgatcgaatgggtgattgccacgaagctggaaaggctgtattcgaaggacgagatcctgctgatgtacctcaatcagtttgattttctatacaacgccgtgggtattcaatcggcatctcaggtttatttctccactactccgggcgagctcaaattagagcaagccgctacattagtaggcatgtgtaagaacccgtcgttgtataaccccgttcgtcatcccgagcgcgcaactaaccgccgcaacaccgtactgagccaaatggagaaatacgggtatatagacgaggcaacacgcgattcgatagcagctcttccgattgagttgcactatagttctgtggatcacaaacaaggtattgcaccctatttccgcgagtacttgcgaggcgtgctgaccgccaaagagcccaaagagagtgattatttcgattggaacaaacagcaatacaagattgaccgttggaactgggacaataatcctttatacggtttttgcgagaaaaacaagaaacccgatggcagcaaatacgatatttaccaggatggtttgaagatctacacgacgcttgattctcgcatg

SEQ ID NO: 1088 - DNA, 24587 bp, synthetic construct
  source 1..24587: mol_type = other DNA
  misc_feature 1..24587: note = Synthetic
agtttacgattgatcgggaggaaaaccagtttttggaatggtggaatatccgtaggtcgctcgagagttccgatgtggacatttatggtaagaactatcgctttggcgaagaagtgaaaggggcaagggccaagtttcgcgtccatttgttgaatccatcgcggataggagatgaggtgggatttgagcttcaccacccaaatacgttggtggaccgctatgccggtagcgtgcaggttcgtccgttgataaactatggctctgtacttgaagtcagtatggtgaccaaagtggtagaaaagggaagcgattatgttaatgcattgatggatgcctttcttgaatacgatcttcgtgagaaaaaccgcatttccgaaaatgccctacgctttatcgaagagcagctttacatcgttgaggattcgctcaattcggtagaaaggcgtatgcagcagtttaaggtagccaacaaactgctcgacgtggatgccgagtttggtggggtgctgaacaacatacggaccctggaggaagcgatacagaaaatcgattttgagctttcttactacagatccctgcgcgattacctgcttcggaagggactggactacgaggaagtggtggcaccctccgtggttggtatttcagatggactgctcaaccagttgattgcccaattggtggattattccctacagcgcagaaccttggtaagcatcgtaaacgaaaaccacccggatgtggccgtattggaccagcagatccagcgggttcgggacaatgtattcgaaaacatacaaaacctgatcgaaaatacagagacgaagaaacgtgaaagcgacgataaactcaggtcttttgaccagcagttttccaagcttcccatggccgaatccagctacacgaatattttcagggagtacaagctgcgcgagaacctgtatacctatctgttggagaaacgggccgaagcgggtattgccaaagcctccaacgtttctgataattccattgtagattacgctaaaaaggggagtctgatctatcccaaaaaaatgcagaattattcctatgcagtcgggctgggttttttcatccctctgggttttttgctactctatcactacctcaacaaccggatcatggatcaaatccagctgaagagcatcctgaagattccgcttctcggtacgattggctatagtgacaaggacaccaatctgctggtggcggattttccacgggctctttcatcggagtctttccggtccttgcgttcggcactgttttatattcacagcgaaaaaacctgcaaacggatcttggtgacttccagtatttcgggagagggcaaaacgtttatcagtataaatgtggcctctgccatggcactgagcggtaaaaaaacctgcctgatgggaatggatctacgaaagccgaagttggcggcaaatatgaacgtgtccaacaaaaaggggctttccacattcttggtaggcaaacatggctacgaggagattgtacttaagacaaagtatgaaaacctgtatgtggttccttccggaccggttccacccaatccatccgaactgttgctcaaggatcaactgaatgagtttttttcatacctggagcaggaatttgatgtggtaattatggattgtccgccggtgggactggtttctgaaaccatggatttgctgcgcttttcggatataaacctgtacatcgtccggtacgattatacccacagaaatcacctactgatgatcaatgacctctacgcaaatgaccaagttagggatttttacgctatctttaacgggctaaaaagcgggggagatacctatgattttggtgggtataactacggctatgggtataattattcttacctccgaaagaacagatacagtggaaattattacgaggacgagccaaaaaggaagcagggttggttgtcgaattggatatcaaaatttagggcttagtttagttgttttatggaaaaatcaattttgatcaccggaggggcgggttttattggctcccatgtcgtcaggctttttgtgaagaagtacccaacgtatcggattgtcaatttggacagcctcacctatgcgggtaatttggccaatttgaccgatatcgaaagtgaaccgaattaccatttcgccaaagtggatattcaggatgcggaggcagtggaagccacctttcggcagtttcaaattaccgatgtgatccacctggcggcagagtcccatgtggatcgctccattaccgatcccctttccttcgtgaagaccaacgtggtcggcacagtcaacctcttgaatgcggccaagggttattggcaggattttgacaagcatctcttctaccatatctctacggatgaggtgtatggttccctacacgatggagggtatttcctggaaaccactccctacgatccccaatccccttattcggcatccaaagccagttcagatcattttgtaagggcctatgccaatacttatggtctgaagacagtgatttctaactgttcgaacaactatggtcccaaccagtttcccgaaaaactgatccctctttgcatccataacattaaaaacaacaaaccattgcccgtatatggcaaaggagaaaacgttcgtgactggctttttgtggtggatcatgcccgcgccattgatgttattttccattccgggaggttcaatgatacctttaacataggagggtttaatgaatggaaaaacatagacatcgttcgcctgctatgtgagatcctcgatcgaaagctgggacgcaaaataggtacctccgaaaagttgatcaccttcgtaaaggatcgtgccggccatgaccttcgctatgcaattgacgcctcaaaaattcagcaggaattgggatgggagccaagcctaacctttgaagtgggtatagaacagaccgtggattggtacctgagcaatgaagactggctaaatggtgtcacctcgggggattaccaaaagtattatgagcaacactacgggtaacgcagaccaaaatgaagcaataccatgacttgttaaggcacatcttggaaaatggtgtgcaaaaaggggatcgtacaggaacaggcactattagtgtctttggttatcagatgcgaatggacctaagcgagggctttccgctgcttactaccaagaaacttcatatacgttccattctccacgaactactttggtttctgcaaggaaacaccaacattgcctatctgaaagcaaaccaagtctcgatatgggatgaatgggcggatgaaaacggcgatttgggccccgtctatggctatcagtggaggcattggcccgacggaaagggcggagagatcgaccagatcaaaaatctggtccagcaaataaagaccaatcccaattcccgtcgcctgatcgtcagcgcctggaatgtagccgatgttgacaagatggccctgcctccctgccacctccttttccagttttatgtggccgagggcaagctgtcctgccagttgtaccagcgaagtgctgatgtgtttttgggcgtgccgtttaatatagcctcctatgcgatctttgtatacatggttgctcaagtttgtgggttgcaggtgggcgagtttatccacacctttggagacgcccatttgtacaacaatcatttggaacaggcacgtcttcagcttaccagggagtgccgcccactaccaaaactgaagctcaacccggacgtgaaggatatctttgggttcaggtttgaggattttgaaatcaccgactacaatcctcacccgcatatcaaggccgccgtatccgtttgatgcttatgccctcctcggggcaggatcaaaaagaaaacacctgttggacaacaggtattgacgttgggtcaaaaacagtgtcttcaaaggatgaaataaaggagacgcccgtcacgttcgtggtaaatacctgatccgcttcccttatggagtccactttttgggatacttcctgtagcgggatgtttttctttttcaggtgggcaatcagtgctgccctcgccaccccggctatgcagttgtgggttagcgaaggcgtatagaaggtgttgtcctttttccagaacaggttggccgctccggcttcggaaaggtagccgtctccatctgtcagcaggatctcgtccacgccgagggagacgcgttccatattggccattacatagggtagggcattcagcgttttgcagttggcccatggagttgggtacagttttatggttttgctgagagcggaggtttttttgatcaggggagctgactgaaaaggttgtatgtacagggtctcccgtataccctcggtggtgggggtatatttccctaatccagcccggaagatgttccagcgaacccgccaattttcttccttgcccagggtattcacgagtgatttttccaagtccttcagcgtggagaacccttttgaggcaagctgtagaaccctcagaccgctgttaagtctcgccagatggtggtttgcaaaccggatgcggccattgctgaaaaccatcgtttcaaaaatcccatcgccaaaaaaggctgcccggtttgctagccgcccaaaggaccaacctccggaggagtctttctccaaatacattgtatcaataccgttcactgtgttgtccgatttcggtcaggccgtttggtctcggaatgtttttttttaatcaagtagataaaacagccccgtttgttggtcgaatccgcaccatattctttattttgcactaattaactaagatacggtgaattagcacagaagttgttctggcagagtttcgatgtcgaaatttagtaggttaccattaaggaaaggtttatgtacaaaaattttttactgattttttgtctacatgtgttcaccacaggagtctttgcgcagacagatacgtacacaggtgcattgaccctggagcaatgtgtgcaaatagcccttgaaaataatttgacccttcagcgtagcaggttgacgctggtgagttctgaagcagcgttgctggaggcccagggacagatgatcccatctttctccacctcgctctcttctggatttcgttggggtaggtccatcaacccggtgacgaacctgtttgaaacccggcggatagggaacgttaacgtgtctgcaagcggaaatgtccccatctatgcaggtaggcagataaacaatcgcatccaacagaccaagacagaggtagagataggtaggctcaatgtggccgcaaccgaaaacgacattcagcttaatgtaatcaatctctttgtcaacgtggcctttgccaaagagcaggtcaacatcgcccaatcccaacttaggaccgtgtccgaacagctggaacgaacaagaagattggtaatggccggttcgttgccaagggccgatctgttggacctagaggcccaaactgctactacagaactggaactgatcaatgcgcgcaacaaccaccgtatagcccggcttaacctttcccaacagcttttgttgtcctttaccgatgattttgatatcgtagtacctgattttaatgcggataacctgggcatcgtaggtgtgggcgtggcggaaatctacggcaccgcagctggattgttgccacagatcaaggcagccgaaatgggtgtgaacagtgctgaactgggtgttcgtatcgccaaaggagcgtttttgcccaccttgggggtcaatgcaaacgtcttttccaactacgtagatcagaccacattcatcccgagggatcccctgttccggcagtttgaaaacaacctgtcccagtcaatgaacatggcactcaatatcccggtgttttcccaattcagaaacagggcgggattgcagcgggcgagggtgcagcggcgattgagcgagatccaggaagtggaggtgaaaaaccagctacgacaggagatcgaaaccgcctacacttcggcctttgcctccaagcagtcctttgaaagttccaagaagcgggtggctgctttggaggagtcgttccggatggccacgcagcggtttgaggtgggtgcaatcaacgcagtggactatcagatcgcccagaacaacctattcaatgcgcaggccgatctgattacttctaagtatgaatttgtttttagggctaaagtcttggatttctatttaggtaacccgctctcgttaaattaacctctacatggcaaagaagaagtcaaacaatgtattgtacatcctgttgggtgtaattgccttactgatcgtaggtatcttgatcggaaaatcccagggatggataggcggtcccaaggaactggaagtggaggtgaaaaaggcggatctcaaaaatattaccgagcgcgtcagttcttccggagtcgtacagccagaaaccgaggtgaaattgagcccggatgtggcaggtgaaatcattgaactgaacgtgatggagggggattctgtacgcgttaacgacctgttggtaaagatccgtcccgataattttatctcggccctcgacagggcacgggcaacgctgaaccagcaaatggccaacctggcgcaatcaaaggcggcccttaagcgctccgaagcggttttcgtccgctcccaattggagtatgaccgtaataagaaactccacgaggatcgggtgatttcggatgccgattttgagctgatcgattccaattacctttcggccaaaaacgacttggatgcagcggagcaaagcgtcttggctgccgagtttatcgtcaaaagcgcgcaggctaccgtggatgaagcggcggagaaccttcgcctaaccaatgtgtattcacctaccaatgggattgtttccaagctgttggtagaaaaaggggaacgggtagtgggtacggcgcaaatggccggtaccgagatgctccgaatagcggatctttcgcgtatggaggtcagggtaaatgtcaatgaaaacgatatcgtccgaatcagtctggacgacgacgtcgttatcgatgtggactcctatgcattcagcggcaagcgctttgctggaaaggtgacagccatcgccaactccgcaaacgataaagccaacgcggacgcggtcaccgagtttgaagtacgtatccgtatcttgaatgattcttaccgggatttgatcaccgaaaagaacccctttccctttcggcccggtatgacggcctcggtggaaatcattaccaaccgtaaggaaaacgtgttggccgtgcctctggcggcggtgactacccgggaaaacgagaccgaggaactgagcaacgggaataccaaactgaaggaattggtatttgtcaaggagggcaacctggctaagatggttcaagtgaaaaccggcatttccgattttgacaatatcgaggtgttggaaggactgaccgcagggcaggaggtcatcgtaggcccctattttgtagtaagcaagcagcttgaaaacgataagccggtcaagatcgctgggaaggaagggtccaaataagcatcgaaccatcacgcgccgaccggacaggggatggtgtacgggaaatcaggttttaaatacaggcaggctaaaaaaacagaaaggaacccgatagggctcctttttttttggggtttatctttaactgacctcagctagttatgtttcaagaaatggcatgccaggcaatatcttcatttctaaaatttcactaaactaataaaattctttcaattcggcctattttttttaatcaatttttagggattaataaaacgtgaaatataatttcgtgttttcttttttctcatcaaaagcattgaataattcacttttgattaaataagtcacagtaaattattaggtgtttagacattattttttgaactgccgatgaatagaatccaactggtcatacaggatttgttgcagccgaaggtgttcgggggctgtcagttcgggggctttgtgggcatgatggtgatcgtggtgatggtcgtggccctcgtcgccgtggtggtgatcatgggaatgctcatatccggggacctctacgaagttggcatcccacttctccaataacgattgcaggtccgatttttgatccggcgagaggttttcggcctggagaagctggttcaggttttcccgtagggccagggacttttggtgaatctcaaaggcttcttgcagttccttttccttggaagaatttgaacagcccataaaaaagagcagggccatcgttgcggttagaaagatgtagttcatgttttttccggaaaaataatcactctttgtttttaatgcaataatgttgcatatatatttgcacgatggtttgggaatttgaagttttcgcagcgtttgccagcgcacttgcagtcagtttggtgtcgttggtgggttgggtgtaccagtgggtttcgagagaatttatatcgcgatatattccctgggttttggccatgacggccgggattctgttggggaatgtgttttttcaccttatccccgaagcagcccatgagtctaccgattcctttggggttccgctgggttttttggccggcctgggtgtttttggagggttggacgtcatattgcaccgatcgcaggggcatccgagcagggagcgtgccgcgttggggtatttgacgctggttggggatggctttcataattttatcgatgggctggtgatcggcaccagctacctggtaagtccggagttgggactgaccaccaccttggcgatcgtgctgcatgagcttcctcaggagtttggcgagtctggcaccatggtctacagtggttttagtccaaaaagggtcgtacggttgaattttttggtttccctaacggctttggcaggtgtatcggtagcggtcggcattggccattggctgccgctttcgccctccctgctgctggcgtttacggcgggtggattcttttacgtggcattgggtcggttggccccggagttgctccgaagcagccgcctgatgggcgttcggctgtcgtatttggcggtagtggggcttggtttgggattcgtgctcggtgtaaaccaattgcagccacatgtccaccatcatccatccaaaaccgcgcatcaattgcaggccgtaccatttgggtttgtgccccgtccttagcaaaggccgcctaatttatcgatcatttttccaacccttcttccggagttgggttatggtatccgatgggggctgttttacgacgccggtcggttcgatccgatttccatcaacccggaggtaggataaaggttgcgccacggggtgattttcggatctgtcacctgcctggttctatcgatgtcagttcaaatgccttgtggcttttaccaatcagaaatagacacatgaaagtccgtaaacaacatctcccggaaaaagtatgtcccgtatgtcagcgtccctttgcttggcgcaagaagtgggagcggaactgggagtcggtcaggtactgttcgaaacgctgtgccgggcttcgggccaaacaagacaaatcctagggctaattggctgtaagttgcgttatttctgagtctgttgatagaaagccttcttttttctgcaaaaaccgcctaaatataccccgatcacggtattttttgtttatcttattcttccgatcttttgggggcaaactgactttatgttttctagtccttggattgcccctgtataaatgccaaggggccttgggatcgtatttctgatttgacggaaaatagggttacctggtcgttattatggtattcgctgcgatcaataacataggaatcaagcactcagcattagggaaaaaaacgaccctacagaataaatccggtagggcccttttaaatgttttcacaacggaataatccttattgtgaattgcttcaaaattgtaaaacgaagatacaagtaatattttaaacttttgatagaagatgaaaaagattttgggattggatttggggactaactcgatagggtgggcgctagttgagcaggattttaaaaacaagcaaggcaatattatgggaatgggttccagagttattcctatgagccaagaaattctcggggaatttgccagaggaaatacaaaatctgagactgctgaaagaacaaggttgagaagtgtaaggagactaagggaacgtcatcttttgagaagagagcgcctgcatcgagttcttcatattcttgggtttttaccaaagcattatgtcaatcagattgattttcaagaaaggttgggaaagttttttgaagaatctgagccaaagcttgcatacgatactggtgatttcttgtttaagccttcttttttagaaatgcttgaggaattcaaaatccatcagccaagttttgttgagggagacaaaaaagtgccttatgattggaccatttattttttacggaaaaaggcattaactgaacgaatcgaaaaggaagaattggcttgggttattctgagcttcaatcaaaagcgagggtattatcaactaagaggtgaagatgaggaggaaaagccaaataaactggaagagttttactctttgaaaatagttgatatcaaagtggatgaatccccaaataaaaagggtgacacttggtattcattaaccttggaaaatggctggatttacagaagatcaagcaaagttcccctagatgattggctaggtaaaaccagagattttatcgtcaccactgatatagacgaggaaggaaatcccaaattggataaagaaggaaatcctaaaagaagttttcgcgctccaagcgaagatgattggggattgaggaagaaaaagaccgaaaaggaaattctcgactcatccaaaaccgttggccatttcatttttgaaaaccttctggctgatccgactcaaaaaatcaagggaaggctggtcagaaccattgaaaggaaattctataaagatgaactgaagcagattttggtttcccaaaatagatttcatccagaactcagtgatgctgatatgatggcggattgtgtcagggaactgtataaacacaatcattcccaccagaatttccttgccagcaaggacatcaagcaccttttggttgatgatataattttttaccaaagacccttgcgaagccaaaaatccactataggaaattgtcctttggagttcaagaccttcaaaaaggatggaattgaaatcaaagttccttacaaagtggctcccaaatcccatcctctttttcaggagtttagattacttcagtgggtttctagccttcggattatccgtaaatcagatgattcggatgtgactagggagtttttgggaactcaagataaaacaaagcagcttttggattatttgatgacccaatccgagatggattgtaataaattgatgaccttccttttgactcaggagggatataaaaggaaagaccttaagtctgaagtcggcaagtttagatggaattatgtatttgattccgaaacaggagaatcaaagacttatcctggaaattctacaagagcagaatttctaaagaggttaggaaaagtagaaggatttgacttttccaaatacacagaagagtttgaggaatcactttggcatcttgtttactcagtcaccgataaggtcgagtttgaaaaagcgctcagaaagtttagccgcaaaaacggaattgagatcaattcttttgtggagaatttaaaaaagtttccaccctacaagagtgagtacgcctcttattcccttaaagccataaaaaaactgttggcattaatgcgatttggagaaaattggaaggaagattctattgatagtatatccaaacacaggattgagaaaattttgacaggagaatatgatccagaaattaaggataaggttcgtgaaatttccagagcctttgatgaggtagaggacttccaaggtttgccggtttggtttgcgaattatgttgtttatggtcgccactcggaggcttcggagttaataaagtggacttccagtgatgaaatggctgatttcattaaagaattcaaacaacattccctcagaaatccaattgttgaacaagtggtattggaaaccttgagagtggtcaaggatatttgggataagtacgggcatggacaaaaagacttttttgatgaaatacatgtcgagttggggcgagaactgaaaaatcctgctgagcaaagggctagactaaccactcagatttcggcaaatgaaaacacgaaccttaggattaagtcgcttttggtggaacttctacacgaccctggggtagaaaatgtgaggccatattctcccatgcagcaagaaattctcaagatttacgaagaaggagttttaaaatcgagctttgaggtccctgatgatatcctaaaaattagtaaaacggcacagccttcttcatccgatttaaagcgctataaactttggcttgaacaaaaatatcggtcgccatacaccgggaaaattattcctttaaacaagctctttacccctgcttatgaagtagagcatgtaatccctcaatccagatatttcgatgacagctttagtaacaaagtgatttgcgaagctgcggtcaacaaattgaaggataacaggttggggatggaatttattaaatgcttccatggacaaagagtttccttggggtttggcgaagaggtggagattttttcggaaagtgcctacaaggcattcatccaggataattttcccaagaacccagctaaaaaaagaaaactgttgatggatgaattaccagaacagatggtcgaaaggcaaatgaatgacacccgatatatcagtaaattcgtcacttccatcttgtccaatattgttaggtcggaggaaaatgatactggatttaattccaaaaacatcattcctggaaatggaaaaatcacgactgcgctaaagcaagattggggactcaatgatgtttggaatgaactgattttgccgaggtttgaacggatgaatcaacttacaggtaccaccgtgtttacggcatggaatgagaatcaccagaaatttctgccaacagttcctttggaatacgcaaaaggcttccagaaaaaaagaattgaccaccgacatcacgccatggatgctttggtcattgcctgcgctacaagagatcacgtgaattacttaaataatgaacacgcgcttggaaagaattataagggaaaggaagaaaagcaatcgcgaagatttgatctaagacaaaagctttgcctcaagaaaaaaaatggtcactcccaagagcagtatgaatggattttctctaagccatgggactcatttactcaagacgctaagaaaaatctggagcgaatcatagtcagcttcaagcaaaatctccgagttatcaataagacgagtaataaatacctcagctacaaggatgaagagggtaacctaaggcttgatagtcaaggcaaaccagtaaaagctctaacaaggcagatcaaaggagatgcatgggcgattagaaaatccattcacaaggacaccgtttcagggctcgtcaaattgcgtcgtgtcaaaatggttaatctaagtgtagctttggataatccagaaaatattttgaataaaaagctgaagaaaaaaatcgcagaactagtcaagttgaactacgataacaagctgctgcttaaatatttcagagatagggattacatgtttgatggaagggaggtatccaagctcgacgtttactatttcgaggagggtttagcagcctcaagggtgagtttggacacttcatttagtgataagaaaattcaatcgataactgacacaggaatccgaaagattcttttagcacatttagccaattaccatgggagactggacgagaaaggaaaagtcattcctccagaaactctagcctttactcctgaagggatagaggaacttaacaaaaatatcaaaggtctcaatggtggtaaattccatcagcccattttcaaagttcgtacctatgaacccaaaggcaataagtttcaagttggctttaaaggaaacaagaactccaaatatgtcgaggcagcaaaaggaacaaatctgttttttgctatttatttgaatgatgaaggaaagaggagctatgaaaccattcctttcaatgtggtgatggaaaggctaaagcaaggtgagggtccggtgccccagacaaatgagaaaggtggcaaacttctatttcatctatctccaaatgagttggtgtatgttccagaaacagacgaaaattatacaaatgttgattttaaaaacctttccaaagagcaggtggagaagatatataaaatggtaagtagtacaggttcagaatgccattttgttcgtgcggatatatcatcattaataaagggatatgacgcaaagacaaaggtgggagaacttggtagtttgaataaacaagaggtgacaaataatggaatgactcgaataaaagagaagtgttggaaaattaagatagaccgattagggagcatctagtgattttttcaaatggaaccaggctattattatcatatctacaaagacgccaacggaacggagaatattttccgggaggatgagaattatcagtttttcccgaggcaatatgctaggtatctagatgaagtggtaaatacttatgcctattgccttatacccaatcatttccatttgttggtgggggttaaggaagaggagcagttgaagtcaacttttccaaagttcggaactttggaaaagttaatctccaagcaattcgctaatttctttagttcttacactcagtcgtttaataaagtgtatgataggagaggaagtttatttgtaaaaaatttcaaaagaaccccaatcctagatgaacgccaatggcaagaaaccttcctttatatccacctcaaccccgtaaagcatggctttgtcaaagatcaccaagattggaagtggtcaagttggcatgcctaccaaagtctcaacaggcctttaaatttaaacagagcctattttaacaatttcttcgacggttgggagcatgtgagaaatatcatagaagtaaaaaaggaatggttgatgaataaaaatttggaatagtggtggttcgaaaaaaatttccaatccgcctaggcggattggaaaagttaactacagccagaaccttggaaacatgatcaaaagaactctcttctttggcaaccctgcctacctcagtaccaaaaatgagcagctgcatattagtttccccgaagctgataaggtggacaggacagttcccatagaagacttgggaatgatcgtattggaacatcagcagattacgattaccaatgggttactggctaagctcaccgatagaaaggtagctgtggtttcctgcaatgcccaacatctaccggaaggtctacttttaccgatgcaggggcattcggaacaaacagagcgggttcgctatcaattagaggcttctcaacctttgaagaagaacctctggcagcagaccgtatctgcaaaaatcaaaaaccaatatacgcttttacaggaaaaggggaaggagtccaaacggatggagtacctgtacaagaatgtaaattcgggagattccgggaatcatgaagcgcaggcagcggcgatttattggcaggaattgtttgaaatccctgattttaatagggggcagatgggaatacctcctaataatctgctaaactacggatatgccattttaagagcggtgattgcaagggccttggtttcttccggtatgcttccgggggtaggcatctggcatcgtaacaaatacaatgcttactgcttggcagatgatattatggagccatacaggccttatgtggatttggtggtatcccatattgtggagacgcaggatgattattcagaactgacaacggatctgaagaaggaattattaagtattcctgggttggatgtcaagatagatgggcaaaaaagcccgctgatggtagctgcttccaggacgacttcctccttaaatgagtgttttgccggaatcagtcgaaaaatcatttaccctgaatatggatgaaaaatatttttcaagacttaatcagtaccgtagtttgtgggtcttagtcttttttgatttgcctacggaaacccgcaaggatagaaaggtagccacttctttccggaagaagctcctggacgatggttttgccatgtttcagttttcgatctatatgcgcttctgtgccagtcgggagaatgcggacgtgcatattaagcggacgaaaaagaatctgcctccgaaaggaaaggttggtattatgtccatcaccgacaagcagtttgggatgatggaggtcttttatggtgtcaagcctcaggaaacggaatcgccggcccagcaattggaattgttttaagggagtaatcctggcaggttgtcaaaaatctacccggtctaccctgcatagtgaaatcttgccggattttttgtttctaatttagcgtataaaaaacagcataccagctagttaggtgctggtatgctgtgatttaccccttaaggtacaattttgaaagcaattcacaacggcttttcgtcagtccaacgacccctccgagctgtgatttaccccttaaggtacaattttgaaagcaattcacaacgatgatctcctccgtattgcgttcctcgcagctgtgatttaccccttaaggtacaattttgaaagcaattcacaaccgtaggcttgcgcgttgtttttttggaattgctgtgatttaccccttaaggtacaattttgaaagcaattcacaacactttgtaggctttgttgtctgtgggaatggctgtgatttaccccttaaggtacaattttgaaagcaattcacaactattgccaatgaatacaggaataataatgggctgtgatttaccccttaaggtacaattttgaaagcaattcacaacgggtttgttggcttttccatgtcagtcattgctgtgatttaccccttaaggtacaattttgaaagcaattcacaactgccacgtgttggtggatttgctttgttcggctgtgatttaccccttaaggtacaattttgaaagcaattcacaacctctttcctcttccttaagcgcatctacttgctgtgatttaccccttaaggtacaattttgaaagcaattcacaaccgcacagatgaaggagatcttcaacctaagctgtgatttaccccttaaggtacaattttgaaagcaattcacaacgatacggccatgatgcatgccgtgaacgccgctgtgatttaccccttaaggtacaattttgaaagcaattcacaacagcacctgcatggacagcttttccttctcagctgtgatttaccccttaaggtacaattttgaaagcaattcacaactgaatctgtctgcatatttttaaattttgtgctgtgatttaccccttaaggtacaattttgaaagcaattcacaacactggaacagctgtatgtgcagcttattggctgtgatttaccccttaaggtacaattttgaaagcaattcacaacgggctatttgatgataatttctatatgcgtgctgtgatttaccccttaaggtacaattttgaaagcaattcacaacataggctaccaggtcattgaaatagaagccgctgtgatttaccccttaaggtacaattttgaaagcaattcacaaccgggttgcatccgtgcttttttccggacaggctgtgatttaccccttaaggtacaattttgaaagcaattcacaactgaaaaagcgctgtttttccggcagggaagctgtgatttaccccttaaggtacaattttgaaagcaattcacaaccgggccggtcgccgatcacgaagcggccagctgtgatttaccccttaaggtacaattttgaaagcaattcacaacatagatcataattcactaaaacccggagatgctgtgatttaccccttaaggtacaattttgaaagcaattcacaacattggcctagcttttcactgtcctctaagagctgtgatttaccccttaaggtacaattttgaaagcaattcacaacgatgaaagaaggcaagaagtttgaagggtgctgtgatttaccccttaaggtacaattttgaaagcaattcacaaccttcaggcgcatcggaaaaatcgcttgtacgctgtgatttaccccttaaggtacaattttgaaagcaattcacaaccctactgagtttacaacccccgtggtaaacgctgtgatttaccccttaaggtacaattttgaaagcaattcacaacaggtgcggatccgatatccccagctgctccgctgtgatttaccccttaaggtacaattttgaaagcaattcacaactttatgtcggtgtactttttgataaacgaagctgtgatttaccccttaaggtacaattttgaaagcaattcacaacatagattaacctaatccaagacattgtgaagctgtgatttaccccttaaggtacaattttgaaagcaattcacaactgtggtatttggataacgactgccctttcgctgtgatttaccccttaaggtacaattttgaaagcaattcacaactgcttgcggtttcaaaggttacaattttgtgctgtgatttaccccttaaggtacaattttgaaagcaattcacaactttttatctctatcgttctcatttcacatcgctgtgatttaccccttaaggtacaattttgaaagcaattcacaacggtgaccactttgtaggctttgttgtctgtgctgtgatttaccccttaaggtacaattttgaaagcaattcacaacatagttgaagtttttgtcctcgatcatagggctgtgatttaccccttaaggtacaattttgaaagcaattcacaacatcattactcatgttatcagtatttgaatggctgtgatttaccccttaaggtacaattttgaaagcaattcacaacggtcaattaagaatagatcagcggggtaaagctgtgatttaccccttaaggtacaattttgaaagcaattcacaatggtgcgtttcttgtagcggcagtcttggggctgtgatttaccccttaaggtacaattttgaaagcaattcacaacacccgacttcattcccccacaggaggtagtgctgtgatttaccccttaaggtacaattttgaaagcaattcacaacttaagctcatttacataatcttctatacttgctgtgatttaccccttaaggtacaattttgaaagcaattcacaacgggcgatggtctgtcccttgatgccgtcgggctgtgatttaccccttaaggtacaattttgaaagcaattcacaacggccttttggtcttcggtaccttcgaagggctgtgattttccccttaaggtacaagttgaaagccttcggtcacatcaaataggttgagatcgctgatttcggtggtcacctgcttgaagcggctgtgtgttggagactttttatagatattctcaaaaacgttttttcaaaaaaacattatttacccataattgttgctcggaaaatacgataatggaaaaactgactcaaaggtatctaaaaggtagaccctaatcaacagggtagggtcattcatggataggtatcacctgaaaacctcaacggctttgcgaagctacaatataggtaaaagaatgttttctgccctccatccaatatatgcgtttagtgcctttttcaggtttttcctatccgattgcttggctttggctattgctttctgcgatataactctcctgtcctagccaaataaatccaagttattgaccaaatcgatcaacagacattcaatatgtctcgcaggatttccgttggaggtgggcagcctgacccggtagcaattggcagaagaaaaggactgcacgaaatccttttcccaaaaaccggggggcggaaatgaaaatatccagccataccagctaacttagggagtgaaatcgatccggcaaagacggactgacctgccctatgcaacccgcaatgggataaaaacatagttgcctctttgctgttttctacctcagacctcctatcaaacgaaagccaaatggaaaatcccctgattcccttcctgagagatcttgccgaaaacaaccacaaagagtggatggatgcccataggggtcgttatgtccatgcgagggaatttttactggctgaggtggaggagctattgcagggtatagtggtgtttgagcccatgttggagccgctcaagccaaaggattgcgtgtttcgccaaaatcgcgacatccggttctcggcagacaaacgtccgtacaaaaccaatatggcggcctattttgccgtgggaggaaagaagagtaacggccccggctattacctgcacgtagagccgggcggcagtttcttggcctgtgggatatggatgccaccggcggatgtattgaagcgcatacggcaggaaatcgactacgccggcggggagctcgacgccctgctgcggcattccacgataaaaggatactttaatggcctcgagggagagcagttaaaaaccagccccagggactacccggcagaccatccttacattgactacctaaggcacaagagctttattctttccaagcctcttacggacgagcagatcaccaacggtgtgtacaaaatgctcgccctccaggccttcgaacgggcgaagcccttcaacgactttctttcacgtgccttggaggatgtagaggacggcagcggcctactttgacgacatcggaacgtgcatcggtggatttcaggcctgggcgggaacgtcctacaacaaaaaggattcgatggcaatcgcgaccccgtccgctttgttgctggccgtgatgtggttggctacggcctttacctcctcacgtccgtttgccaccgagaccccaaaacccacccgttggatcagttctacgtcattgtagttatctccaaaggccatgacctcctccagtccaaacgaaaagtttgtccgcaaaagaagttccagggcacttgccttggagatttgtttgggggcgatctcgatgtaggtgtcctttgaccgatacaggtgcaactcattgcccagtagcattgcgaggcgttcatacaggggttggatctcggatacagcccccatgcacattaccttgtgggcaccggtacgtaacctgctccatgtttccagtacctccaccccgggcataggcgtggatttcacctttgttaccagttcttcctttgctgtccacgcatcctgctgtggggtataccagtcatcggcatggaataggctgacgtggatggcgctgccctcggtcatctttaggatggtttggcagtgctcgaaggggatacaggtagaggccaacggagtgcccgaagtaccaggggacgcggaattcaatacatagcccccattgtagcagatcagcggttgatcggtcctgcccagttcttccagtaggtgggtcatggcagacggcatacgggaagaggccaaaatgaccgggaagtcctttggcaagcgacggaaagcggctttggttctggcagaaagttggcggttcttgtctaaaagtgttccgtctatgtcggtacaaatcgcccggattttcatacagaaaggtgttaaatgaaggggtaaaactaggcaaggtgatacggattaccaagaaatgatggcctaaaccaggtttattcgcctttgggaagtcgccctgccttcttgagtgcctcatggataatccattccagttgaccgttggtgctgcgaaattcgtccgcggcccatttctccacggccttcatcatccgttcatcgatccgtagggcaaagggtttcttagttggcatgatggtttaatttatgctgattaaaccactctactgccattgccgctgcttcaggttgttgggtaccgagcaggaatgtttttttggaggtttttaccagaatcccatggttacctccggtattgtatacccaatagtggaagttgtaccggatcccccatcctccgaatttgagcagggaattgtatcgaatcagtgtcaggctttcaatttgctcgaggggatacgttctcacaccgatgaatgggaagtagctgaaggatagttttttgtcgtccaaccgtacctccagctccatcacatacaacaaaaccgtcactgcgacgagaacaatcagggcgatgattccgtcccatgcgctcgtgtttggtgaagtagcagactgcacaaaaagccaggtgatcaatgttgcactcagcagcatgatcagccagatccatacttcccgaaatttttgtgtctctttgaatattgttttgctcatgatttgtcctgttcttgcgcccacagatctatcaaccggaggaagtcctggtgtcggtgggtactgaatacaagttttttgtcggtgctgttccggtttatttccagcacatggtcactgaagaagatataagccgtgccttttctggagacccgtacgcccacccctccataatccaagagccctcccgatttggtgacgtttgccgatcggatatccgataggggaatttttttccagttggagaagaaaggtgggtttcggtaagaaagccccttttcgtctgcccttatttctacggagatacttaggatgaggaaaaagacggccgacataataccaaaaaccaccagaagcacaatccagccatcctctcccagatggccggtaaggtatagtgtcgaaagaaggatgagcgtgggagcttccaacaagataattccccacattaggatgctgcccctgaaatccagtttttcgtgtaccaccatctttacgtgtttagggtgccgacgttcagtaccgggctggcggagcgatcggagcagagcacgaccatcaggttgctgaccatagcggcctttttatcttcctcaaaatcaatgattcccttcagttttaggtcttccagggccatttcaaccatgccaacggctccgtccactatttttctacgtgcagctacgatggcggttgcctgttgacgttgtagcatggctgaggctatttcggaggagtaagccaggtgggaaatccgggcttcgatcaccttgatgcctgcgtgctgcaatcggtccgcgatttcttcttccaacgagtggtttacctcttctacgcccgatcgcagggttacctccgcatcctccgcttcaaagtcatcgtacgggtacttgccggccattttccgaaccgcggcgtcggtttgcaggtgtacaaagttctcgtagtcctccacctcaaacgtcgcccggaaggtgtcctccacctgccacacaacgatggtacccaccattacggggtttccaattttgtcgtttactttcagtggtttgttttcgaagtttctcacccgcaacgaaattttctgcttgatcataaagggatttacccaaaagaagccgttgtctttaaccgttcctttgtaagccccgaatagaatcagtaccaccgctttgttgggttggagggtgaagaatcccgggagcatcagaatggcgccgatagtacaaataacagcggtaggggggatcttgtaaataaaggaggcaacagcagcggcggctaggagtaccgtgttcccgagcatcgcatagccggaagagggagtgatgattttttccatgacgattaggttttaaaatgatatcataatgatatacgtgtgatagtatatttaagttcccttggtggaaattaattcattttctaaggggcgattagggaatgaaagggattcctgagggggtttttgctttgtaattgaggtagtcccggccaaaaaaatcgatcaggtaggcctcttcaaatcggattctttccctaaaaaagtgccagcctaccaccgagaagcaaataagcgagaccggtgcacccaaaagtagaggaatgcttaggctgtacaggtaccatccggtataggagggatgcctaaaaagccgatacgggccatgcaggatcagttcatgggaggaagctttggaggtttgtatcgtgtgattgaaggatttttttgccgtaaggatcgctgtccatcgaaatccaaggccgattgcgacgcccaccaatccaagagttaccatggaagtggataacggcagcaggggcttgatgaaaaaatattcgccgagcaatactgcttgggcggcaacgtagggcagggagaagagtagggaactccttctaaattccccgtgcatcagtcgatggaggaggaattctgtgaggtgataacagacaaagatgtacccatagataataatggggtctttttgcggtatcatcttaggaaatgttttgtagataggagatcaatccttctttttctttgatggtcttctttatttgattgtggacgattttctcaaacaatcgaaggtttag

SEQ ID NO: 1089 - DNA, 24584 bp, synthetic construct
  misc_feature 1..24584: note = Synthetic
  source 1..24584: mol_type = other DNA
gcatcctgagccggacgatcatgtcttattacgaacgtggtactctcctttgcagggctctccgtaacatcaactgtgaattgaggctcaaggtcattaaccaccttgaatcccagatatacagtagtagaattgttcatcacatcccaagccctaaacataagtgtatgttttccttccggcagttcaggtatgctgaatgtcacagttccacgggtaaaatcacctgcattctgacggaaatagctgttgagcacccaggtccactcaggattattatcaatcacaagcaggatatcatgtccaagaccattaccagatgtattaagaccagaactatcacgtaattcagcaacaaaaaacggcgttgaatttacgttctcaccatactggaatgacggagtgttcagatataaattcaacacatccggccctacgttatcaaccacaagcccgggagctgttccacccactatgaaattatcaaattttccgttggctgattccgccgctttattgcttttggcataaagtgatatacatcctgtctcatcggagtagttaatatccagcggtacagggaatgtaaaattaaactctccgttttttacagaatcagtaccggaatacagaatacggtctctgtatttgaaagaaaacggttcatcggcttcattctggttattgaagcatgttataacgcgttcattgtcaaacacgatgtctgaaagctctccgttaaagtctgttgccttcaccccattacgctcaatatgtccgcggactgtaatcacggaacccgcgctggcctttccaacctctgttgaagatactcccgcgaatgaatccaccaccgctgcaagttccggcaatgccagttttaatgcaggatcaccaagtaagacatagtgtatcttgtttacagtcaagtctgtctcacccacaccggatgtaaccaattcgttcttggcaagccgcagagcgtctcccaatgcataacgccggcctgacttatcagaagcaagtacatactttgtaaaactgcggtttattgtctggttaaggtttgcataaaccgtacgggttgtagagagtaatccgatagccccacccttggcgttccgaatcagattcaagcccatgctctccaaaggagagtcaaaaggagcgatatcacatgaagcggtaatccagaacgggagtctgggagaactcaacgcgctcatatcggccttgttcatcaccagttcatgcgataacacctcagtactgccatgccctgaataatccacaatcaacgcgccatcatcaaactgttccaacagatgtttacggattgaaggataaccgttatttgatgctgttacatccattttgtaggcatcccaatacactttacgtacattgactgacgaataaaggctttcatacataccagccaccccatcagcatcggccatatgagtattgttatctccgtcatcacccagtatcataaccttgttacaccatgcaccggcattcttaccaagcatgtaatctataatcttatctacactggcagtagcctctgatactgaaaccaccggcaaacgccctactcctatatctaccttttcagtaaatagtttctctccttccgtatcgtcaagcaggccaaaataatcctccatgacatatgaatcagtatgacttgtagaattataagattcatagcagagaagataatcatcaggattattacctctccaatctgaaacatgcatacggttatcccatgctcccccacccatcaataacagataacgcggagcggaattctcatcgcctcgatcatagagcatcttcataaaacgccggatggcggtggcatcaggagtacctgatgaaaactcgttataaatcatgtcagctttaacgacggccaccttaaggctgtcaatagtacgatgagcagcggccaaacgctcagcctgtgcagtaagtttgcctgatgccggaactactatcaccatatctacagaatccatgccatgcagattctggtttttgacagtacctaccacctgtggctcaggaaaactgccattgggattaacagccacaagcaggtcccttgagccgtaagaagcgctaagagtgacagtactcccgtctgaccatacagaaggaacaacctccatcttaccgtctgaacttatacgccaaaccacaacatcggcatttgaatccttaatgttgaaactgacatcaaccatatagtttgaggtacggaaaaccgttgatgaaccatacattgccagcctgcggttaaaattaagacgtatataatccaaatgggcattcacacccgatgctgcattatagacaagcctcacctggctctcatcactaaaggcattacggctcacaagagaaccatcctttattccagccacctcctgacctccctttgcacctatattgataactccagcctcttttccgttaacagaaactgtcagttttgaagttgcgcttgacgaagaagagaatgctatatccatcaagacactgtcgctattaattccggctatcttgaatttgtagctacgaccgtttcccgttgcgtaatcatacccctcaaacatacgcctgccggaacgataccaactgtaatcatccggatcatataacaccgcatcagaatactgttcaacaagagttccaattatattacttgtcttcatggtatccatctgcgccttctcaccgtcagcgcaatcagtcaggaaataataaccgtaatcagaataggtatttacatcctgaatatatttattaccactgcgtttccattcaacaggccctttggcatagaataaccaatcattaccgactctccataatggctgctccggaaggtcatcagtgagattctgaagattggtttcaggcaacacagcaccgccatatccgaacaacctgaccgcctgcggatcattaaatcccattgaacgtaatgcctttgcggttagcttatatacacctgattccgctacccttatcttgacccacttaccagtagacaaccttgaagtacgcgtatatctttcatctgacggtaatgtcagaatgggcagtaatcttggagcagaaataataactgatttgaatgaacttattacgtaatatgaaccgtctctttttataacaggcaggaatcccgcattaaatgttgcactgccacggctcacacctattgatgactctatctcaggccactcaggaacatcatcaggttcaatgccccatctgcccagcgtctcctctgttatctttacaagttcaggatactctatctctgccgcatagacagaatcctgccagttaccctccaactgtaaacagaatccggaccatggacggatagaatcagcagtcatggattcccaatcagaatccacaaaacccactctctgcgcgagcatacctacgcacgcacaaagaaacaggataaaaatggcaagtgtctttttcaatgcaagtatctatcttacgtgaaaatccaatacgttttctccttccaggaatccctgcagatgctgtcccacactaaccgggccaaccccaaccggcgttccagtgaaaatcagatcaccagtcttaagggtgcagaaaccgctgacatattcaattatctctgctacaggaaaaatcatgtctgcagtatagccctcctgtactgtatttccgtcaatatccagacggaaatgcacatcctgcaagtttccaatcttgtccttaggaatccactcacccaccacagccgactggtcaaaacccttgcacaactcccacggcagccctttactacggaaatcattctgcatatcgcgcgccgtaaagtcaataccaagtgtcaccgcatcaatataccggtcagcaaacctggcactgatgctcttgcccagatggtttatcctcactacaagttccgtttcataatcaacccgccccaaatggtctggtagaaaaaacggtctacggttcctcaggatagaagaatccggcttcatgaaaataaccggactctccggttttaataacgcgcagcccagttctttattgtgtttggaatagttcattcccacacagataatcttcatataactctgtttgtttgatacaaagttagtatcttagcgagatacaacacacatgttatgggaaaaagttcaaacgattggaaagaaaggctcggagtgatgtattctaccaaccccgatttcaattatcagactgatgaagagcctgaggcggatctgctcccgccccagcaacagaaactgcgcctgcgtatggaaaagaacggccgtggaggcaagaccgtaaccgtaataagcggattccaaggccctcaggccgatatggaagcattggcccgcactcttaagacattcagcggctgcgggggctctgcaaaggatggcgagatcataattcagggtgatttccgagagaaacttaaggctaagctaatctctttaggctatactcagactaaataaattgaaaattgagaattgaaaattgaaaaataacatacacctgcgtaaaatgaaaaaggcttgcgaaaaatcgcaagcctttttctaattttcaattttcaattctcaattttcaattattctgacttgagagtgaagcggcggaaagcagttacagtgaggtccttgtcaagagccttgaggtactcggcaacggtcttcttctcgtcaacgatgtacttctggttcaggaggcagctctcatcatagaacttcttcatacgaccttcagcaatgcgctcgatcatattctcgggcttgccctcctcacgtgccttgtcggcagcgatctccttctcacgtgccacgatgtcggcaggaacctcctcgggctttacagcgataggattctgagcagcaacctgcagagcgatctcgtgaacatactccttatctgatacctccttgttgaaggcaaccaggcagcagaggaagttcttgccctggtggttgtaagaagcaatctcaggagcctcaatgtagttgtaaccgtcaagctcaagcttctcacctacaataccggtacgctccagaacgatatcagctacggtcttgccgtcaaaaggcagagccttaacctcatcaagtgacttggccttagcagcaacagcagcatccagaatgctctgggtaagagcaatgaaatccttgttgttggcaacgaagtcggtctcgcacttcagggcgatgatagcaccaaagttaccgtcaaccttaaccagaacgcaaccctcagaagcctcacggtcagaacgctttgcagcaactgccagacccttcttgcggattatctcaatagccttctcaaaatcgccttcagcctcagtaagagccttcttgcaatctgacataccagcaccggtcttggtgcgcagggctttaatatcatcaagtgttacagccattttctttagatttaagtggttataaaatcaagcctcagcttcaccctctgccttgggagcagcagccttgcgtgtacgcttgggttttgcgggagcctcctcggcgggagcctcagtggcctcagcagcctcagctacaggagcttcttctgcagcgggagcctcttcaattgactcttccttcttggcaaccttgcggatgcgctccttacggggcttctcagccttctcctcatcatctgaagcggcagcctcatcacccttctcagccttacgctcagcaagaccctcggcgatagcatcgcagcaagcggtcaggatagcgtcaactgacttggtagcgtcatcatttgcaggaataacgtagtcaatatttgaaggatcactgttggtatcaacgatagcgaatacggggatacccagacggttagcctcacgaacggcgatgttctccttgagcacgtcaattacgaacagagcagccggcagacgtgacaggtcagcgatagaaccaaggttcttctccagtttggcacgctgacgtgtgatctgaaggatctcacgctttgagaggtttgaatatgtaccgtcattggtcagcttatcgatagtggccatcttcttcacagccttacggattgtggggaagtttgtgagcataccaccgggccagcgctcaataacgtaaggcatacctactgatgacaccttctgggcaacaagctccttgagctgtttcttggtacctacgaaaaggatcttctttccgtcacgggccatacgcttgagaacctcagcagcctgatcaatagcggctacagtctggttaagatcgatgatatgaatgccattgcgctccatgaagatgtaaggagccatagcgggattccatttgcggcgcaggtggccgaagtggcaaccagcttcgagaagctgttcaaaatttgttcttgacataaatagttttgatagtttgtttacattcttttttaaatcaaccgtcgggtagctgtcccttatgcggcagatcccgacagtttagatactaaacacagatttccagaggcccgcaaatacataaaggtgcaggcatgggaatatatccagcgattaacgcttactgaactggaatctgcggcgtgccttgggctgaccgggcttcttacgctcaacagagcgagcatcgcgggtcaggaagccttctgaacgaagggccttcttgtcatcaggattgatcttaacgagagcgcgagcgatagcaagacgcagggcattagcctggccattgtaaccgccaccgtccagattcaccttgatatcatacttctcagcaacctcaagtttcttgagaggctgaagaactacatactgaagcagtgaagacgggaaataaactgcgagatctctcttgttgatggtaatcttaccagttccttcagaaacgaagacacgtgccacggcgcgttttctacggcctattgcattgattacttccattctctttcaatttaactaagtgaattgatatcgattgccttgggctgctgtgcctcatgcttgtgctctgtacctgcataaacataaaggttgtcaatgagcttgtcaccaagcttggtcttgggcagcatacccttaacaactttcctcataagtctctcagcaccgttgggcttagccatcaactgtgcaggtgtggtctcgcgctgaccgccgggataaccggtgtaacgcagataaaccctgtcagtccatttcttgccggtcaggacaaccttatcagcattgagaacgatgacattgtcgccgcaatcaacatgcggagtgaaatttgtcttatacttaccgcggagcagcttggcaaccttcacggcgaagcggcccaggacctggtccttggcgtcaaccacgacccattccttattaacggtagccttgttggccgaaacagtcttgtaacttaaagtatccattctaaactttaaatcattaattaaacattcatttctacgcaacctctccgtcatcccgacgtcatggaaactccctaaacgctcgttttcagcggttacgctataccgcagaaccctcactcgggggtttaacacgttaataactaaccctttatgcaagggttgataataatcggctcgcaaaattacactttttgaatgaattagcgtactgtttactggattttttttataattttacatctccaaaaacaaacattattgaacatgaatcccaattacagtatttatcgcattcacaaaaagatggctgctcttgagaagctgtatgatctggacaggtttataaaaatcgacaatacgcctgatcagatcagaaagtattaccgcatcaacaattgggcttaccatcattatcattcccaggacggcttcatgcatttcaggataagcaagaatggatactttactgatgaagacatatattatcagcccgattcagtatcacaatacatcaagcctggcaatgtcgtaatggaattgggatacggacatggcgcaaatctgctttatctggcacattgtcatcctgacgccaattttatcggactggatctatctcctttaaaatgcaaggagataccttcaaacgtaacagcatacacaatggattacaatgacctctcacgatttgaagacaactcggtagatgtattgtatgcctttgaaaccttagtgcacaatacagacaaggagaatatcttacgtcaggtaaaacgcatcctgaagccgggaggagttgccatagtgtatgactattgtctccaacagagatttgaaagctatgatcctgtaatacaaagggcagtttcaatccttaaaggaccggcatgtcccatgatcgagtctttagatgaatttaatacactctataccaactgtggctttcagatagaggagtcacatgattacatccgtgatacactcccagacctgaagcgtctggagcgctcagctgccaagataattgaaagaccctggctggctaaactgttgtcatggctacttcccgacatgtttgtagttaatatagtaataggttatatagttttcgacggaggtaacgccaacatcggctcctattacaaatggattctcaggaaaccggacagcagcaaatagctccacacatatcacataccattgataatatatacagctgaatatattatccctaaactggccccgtgttttggagccagtttatttattaccatacctgtagtcacaaccccaacagccttcatttcatgtaagtttaaataaaaaacaacttgatagtatgaaggtaaagacatatatttgaaagaaaaacactatggatcagcccaaaatagaaagaatgctccatttcatcacattgttggccgacaaaaaaggttatacgattgatgagattgcccaaagattagaaataacacgacgtagtgtgtatcggtatattgacacattcaaggacgcacgttttgttattgactatgaaaacgggcgataccgattggcgaccaacaaaggatgcatgaaggaattagcagacactatctggttcactgaagaagaggcctacataatcaaacgtctgattgatgaattggataactcaaacggtatgaaagccggtctaatgagaaaactggcggcaatatcagacatgacaaatcttggcgattatacacataataaaacaatctctgacaatatcaacggccttgcttcggccattagagagcagaaacaggttctgctcaagaactactcatccgcccattctgacacacgcaacgaccacatagtggaaccatttgagtttacaaccaacatgattgatgtctgggcctttgacaccaaagacggaaagaacaaaaggttcaaaataacccgaattgagacagtccagaaacaaaattcaaactggcagtatgaatcacaacaccattcggaggcattggatgatttccgtacccacggcaatgaatgccatcacatcaagctgaagatagaccgcatggcaaaggaactattggttgaagaatacccactatccgagaaccacatcaccacggctgatgataatcattggctatatgaagccgatgtccataagattgaaggagcaggaagatttgtaataggactatttccgcacattattatattggaaggcaaggaattaaacgactacataaaccatttggcagaaaaaatactgaatgtttaaaaataatctgctttgtgacagaaattgacactaacattgttttactttgtaagattcatattaaatgcgtgtaacgggaaatagtatggagaaaacgataaccgggaacatgataaaagaaagacgaagggtttcccctccgccttaaatgttttcacaacggaataatccttattgtgatttgcttcaattttgtactgcaaacatagtgacattttttattccgcacaataattacagataaaaaatgaacctcatatgaaaaagatcttaggacttgaccttggcaccaacagtatcggttgggcggtaattaatgctgaagaaaaaaaacgtgagaatgaaaccacatatctacaacctacaggtattagttctgcaggaagtagaattatcccaatgtctgcagacaccttaggagattttgacaaaggtaactccgtctcacaaacaaaggaacgtacaagttttcgtagcacacgacgtttattggaacgcaacttactacgtagagagcgcttgctacggattttaaaaataatgggattccttccggatcattattcaaatcaaatagacacctacggaaaatttattaaccatgctgaacccaaaatagcctggtttagtgacaccgatggcaaactctcattcctcttcaaggactcatttaatgaaatgcttgctgatttcgctactaatcagccccaactggttgcaaagggaaagaaagttccatacgactggactatctattatttgcgcaaaaaaggtttgtcacaaaaactcacaaaagaagaacttgcatggatcttacttcagtttaatcaaaagagaggatattaccaattacgaggtgaagaagacgaagaatcacaagataagaagattgagtttctagctcagaaggtcattcgcgttgaagcaactgatgaaaagaaaggtaatgacatttggtacaatgtatacctagaaaatggaatgatctatcgccgcacaagccggattccattggattgggtaggaaaaataaaagagttcattgttactacggatttggaaaaagatggcactcctaaaattgacaaagagggaaatgtcagaagatcgttccgtgcccccaaagaggacgactggaccctgttgaaaaagaaaacagagtatgacatagacaacagcaacaaaactgttggctgctttatctacgacgccttactaaagaatccaaatcagaagattataggaaaactggtccgcactgttgagcgcaaatattataaggacgaattaaaacagattctagacaaacaagtagaattaattccggaattacaagatgagaatctctacaaatcatgtattgaagaattatatcccaataacgaatcacaccgaaatattatttccaagcctgatttcaagaatctgttcatcaatgacatcatattttaccaacgtccgttgaaaagcaaaaaatcgctcatatctgattgtccttacgaatttcgttttgataacgaaggccatgagcacccagtaaaatgcatagcaaaatctaatccgctattccaggaattccgtttatggcagtttatccaaaatctcaggatttatcagagagaaaaagaaataaacggaaagctctatacggatgtagatgtaactcccgagctactaaagaatgaaaatgaatatgttgcattatacgagtggcttaacgatagaacatctataaaacaggacacgcttctaaacacatatttcagaatcaaaaaggcaaaaggtaaggaccaatacccctaccgatggaattacgttgaagataaagattatccgtgcaacgaaacgcacgcagagatcctcaaaggcttagataaatgcggcataaatcacaccattcttactcacgagcaggaaatatctctttggcatatcctttattctgtcgaggataaaatagaaatcagcaaagcactgcaaaagttcgccgccaagaacaacttaccagaatcctttgtccaagtgtttgcccaaaccaagcctttcaaaaaagagtacggctcttattctgagaaggcaattaagaaactacttccattaatgcggatggggaaatactggaatgctgactcaattgatgcaaaaacaaaaaagcgaatcgacataataataacaggagagtatgatgatggtatcaaaaatagggttcgcgagaacgccatcaatcttacagacattgaacatttcaaaggtctcccagtctggctggcatgttacattgtttatgacagacactctgaagctaaagaaattacaaaatggaagaatccgcaagatattgacttctttctcaaaagtttcaaacagcattcattacgcaaccctattgttgagcaagtaatcaccgaaacgcttcgcacagtacgagacatctggaggcaagaaggaaatcttgacgagatacatctggaattaggacgtgagatgaaaaatcctgcagacaaacgaaaaaagatgacagaaaagaacctgcagaacgagaacacgaacttgcgcataaaagcgatgctccaggagtttatgaatcctgaaatgggcattgaaaatgttcgtccatattcagtttcacaacaagacattctgcgtatttatgaggagactgcacttgacagtctttcaaaggatgacaaggattttgacttcatcaataagatttcaaaaacagcacaaccctcaaaatcagacatcataaggtataaatgctggcttgaacagaaataccgttctccttatacgggagagatgattccacttgcaaagctgtttacatcggcctatgaaatagagcacgtgattccacaatcacgctatttcgatgattcttttagcaataaggtcatttgcgaatcagaggttaataaattaaaagacagacaattgggatatgagttcataaaaaaccacaaaggacaaaaggtacaaataagccaaggacaaactgttcagatcctttcagttgaagattatgaaaaatttgtaaaggatcattactccaacaatcaacttaagatgaaaaagttgttgatggatgacataccagacggttttatagaacgacagttgaatgatagtcgctacattagtaaatacgtgaaaagcatactgtcaaacattgtacgcgaaaaatcacctgaaggagaatacgagcaggaggctgtttccaagaatcttatttcgtgtaacggttcaataactgatcgtctcaagaaagattggggtatgaatgatgtctggaattgtattgtcctaccacgtttccaacgcttgaacgaattaacaggaagagactgctttaccacgttgaattctgaaggacacatgattcctcaaatgcctattgagttgcaaaaaggattcaacaaaaaaagaatcgaccatcgccaccacgccatggacgcaatagtgatcgcttgcgctacacgcgaccatataaatttactcaacaatgaggcagcacattctacccaaaacgctaatcgttatcaacttcaacgtaagctcagccggtttgaaaagattgttatcgatggtaaagagaaagaaacagcaaaagaattcctaaaaccatgggattcgtttactaccgatgcaaagcaaacattggaaaatataattgtcagctttaagcagaacctgcgtgtaattaataaagccacgaaccattatcagcactacgatgaggatggcaagaaagtgttgattaagcaagataagggcgatagttgggcaatacgcaaatcaatgcacaaagacaccgtatttggcgaggtcaacttacgttttataaagacagtatcattaaacgaagcattaaagaatcccaaacgtatagtaaacaaagattttaaaaataaagtatcggaattcctgtctcttggatgtgatgccaaatacatcaagaagtatgttgaggacaataaagatgtttggtcggatattgacataaaaagaataaaggtttactatttcacgaaggagacaaaagaacgttattatgcaactcgtttcctcagtgaacttgtatcttacatgtctggaatcacaaaaaaggaagatgcaataaataaaattaaaggcattacagacaccggaatacaaaaaatattaattgcacatctggaagcgaaaaatggcaacccagaacttgcattttcagcagatggaattgatgagatgaattgtaatattattactcttaataatggcaaattccatcagccaatatacaaggtcagaagatttgaaaaaggtaataaatacgcgataggccaaactggtaataagtcgacaaaatatgtagaagcggacaaaggcacaaatttgttctttgctgttttcagctctgaaaaactgaataaggagagtggtgaaattgagaaggttcgttcttatctaaccattccacttaatgtgatgattgattgccagaaaaaatatggttcaaaatggcatgacaatattgaggaatatttgaaagagcaggaacttgtttcagttgatgtaaaactactgtttattctttcgcccaatgacttagtttatttgccaaagaataatagcattattgacagaagtcgtatttataaaatggttagttcttctggaccacaatgtttctttgtaaataacactatggcaaaatcaattgttgataaagttgagtttacttctttaaataaggcagaacgtgctattacaggtgaaatgataaaagaaatatgtatccctatcaaagttgacagattaggtaatatcattgaattaaataacaaacaactatgaacaacattaaacttttccgagacaagaaaatccgttcccattggaacgaagaagaacaacaatggtatttttccattgtagatgtggtagaagccttgacagacagcaaagacccaaccgattatctaaaaaaaatccgcaaaagggataaggcgttggcaacatacatagggacaaattgtccccaggtagaaatgttaacggacacgggaaaaaagagaaaaacactagcaggtaatgctaaacaattatttcgtattatccagtctataccatctcacaaagcagaaccatttaagcaatggctagctcaggttggatatgaaagattagaagaaatagagaatcccgaactcgcccaagaccgaatgaaggatctttatgaaaagaaaggttatcccaaggaatggattgacaaacgtattcgcggtattgccatccgtcagaaccttacagacgaatggaagaaacgtggaataacagaggagcgtgactttgccatattaaccgcagaaataagtaaggcaacattcggcatgactccatcagagtataaagagttcaagggactcaccaagaagaatcagaatctgcgtgatcacatggatgacctggagttgattttcacaatgcttggtgagcgtgtcacaactgagatctcagagaaagaagaaccagacacattcgagaaaagcaagaaaatagcaaggcgcggaggaaatgttgccggagtagcacgtagggaaaccgagaaagaacttgggcgtaaagtatctacccccaaaaattatttacccgataaagacaaacctaaattggaaaatgattaagaagaccctttgtttcagcaatccggcatacctctccttgaggaatgagcaactgctaatcagactgccggaagtggaaaagaatgagactcttcctgaatctttcaagaaagaagctgtaaggactatcccgatagaagatatcggtgttgttgtattagacaacaaacagttaaccattacccaaggcctaatggaagccttgctggagaataattgcgcagttgttacctgtgacaacaatcatcttccggttggattgatgctcccgttatgcggtaacaccacccagaatgaacgtttcagggatcagttggatgcatcacttccgctaaagaaacaattgtggcaacaaaccatacaatgcaaaatacggaaccaggcttccgttctgaaagcaaacactggtgttgaaaccagaaatatgtcagtatgggcagagaatgtaaaaagcggggactccgagaatctggaagcaagggccgcagtctattattggcgcaatttattccctgatctacccgaatttattcgtgacagagatggcactccgcccaacaatcttctaaactatggttacgcaatcctaagagccgtagttgcaagaggattagtctcaagcggattactccccacccttggcattcatcaccacaacagatataattcatattgtttggctgatgacatcatggaaccatataggccatatgtagaccaattggtcattgatattgtatctaaatatggttatgcagaggaactgaccaaaaatcttaaacaggagttgttatccatacctgttttggatgtcactatcaatgagcaacgaagtccgctgatgatagctgtcgggctaacgactgcctccctatacaaatgtttcaacggtgaatctcgaaaaataatataccccactatatgattccagaaagacttagtgagtataggataatgtggatactggttctatttgacttaccaaccgagactaaaaaggacaaaaaggcatatgcgttgttccgcaagcaactcatgtgcgatggattcacgatgtttcaattctccatttacttaagacattgtgccagccgtgagaatgctgacgttcatattagaagagtcaaatcattcttacccaacatgggacaagttggaatactctgtattactgacaaacagtttggcgatatggaaatctttatcggtaagaaaaaagaggaacctgtagctcatggccaacaactggagctattctgacgccgaaacaacatctctttcagaaacgctaaacggtattgacatcataaagaaatcccggctaaaagctgggatttctttttctatcacccgtgataaatctttgactctctgcaagatactcacatcgtagtgatagcgatgtcaaagatacccaaaattgaaagcaaatcacaacgcggacatccgatacatcccaaacgtttttagtgatagcgatgtcaaagatacccaaaattgaaagcaaatcacaactaaagtatccttttactctcctttcctttagtgatagcgatgtcaaagatacccaaaattgaaagcaaatcacaacagaaaacaaattatggcaaaggaaccgaaaagtgatagcgatgtcaaagatacccaaaattgaaagcaaatcacaacacagaacatcatgggaacaatgcagattaaagtgatagcgatgtcaaagatacccaaaattgaaagcaaatcacaactaaatctctggtggggaaagttgatattgtagtgatagcgatgtcaaagatacccaaaattgaaagcaaatcacaacgggcgttgacagaactaccataagccatttagtgatagcgatgtcaaagatacccaaaattgaaagcaaatcacaacgtaacctacaacgtatagacgatttgacaagtgatagcgatgtcaaagatacccaaaattgaaagcaaatcacaaccaattccgtcaactcgtcaatcgccttttgagtgatagcgatgtcaaagatacccaaaattgaaagcaaatcacaacgttcttaagaaagcacgttgatatgatgtagtgatagcgatgtcaaagatacccaaaattgaaagcaaatcacaaccgttggtcatgttgtcattggtgatctcctagtgatagcgatgtcaaagatacccaaaattgaaagcaaatcacaacggatctggttaagataatctttgggaaccaagtgatagcgatgtcaaagatacccaaaattgaaagcaaatcacaactactgattacatgacaccacggaccgcaaaagtgatagcgatgtcaaagatacccaaaattgaaagcaaatcacaaccttgaggagcttggcgagggtcttgcggagagtgatagcgatgtcaaagatacccaaaattgaaagcaaatcacaacttaccgtcgctataataagagcggatcgccagtgatagcgatgtcaaagatacccaaaattgaaagcaaatcacaacttttatattgttacattactgcacgaactgagtgatagcgatgtcaaagatacccaaaattgaaagcaaatcacaaccaagtattactgttgattcaaataatactaagtgatagcgatgtcaaagatacccaaaattgaaagcaaatcacaaccaaactgaacggacaaatcgaagacggttcagtgatagcgatgtcaaagatacccaaaattgaaagcaaatcacaacataaaccaagtctgttttgtacggccactgagtgatagcgatgtcaaagatacccaaaattgaaagcaaatcacaacagtgcctttgctgtaaacagaaataccgtagtgatagcgatgtcaaagatacccaaaattgaaagcaaatcacaacccaggtgctggcccgccggtatcacctgtcgagtgatagcgatgtcaaagatacccaaaattgaaagcaaatcacaacatgccagcatagcctgctcacggctgttggagtgatagcgatgtcaaagatacccaaaattgaaagcaaatcacaactgcacctcacgtgcggacagtattactatgagtgatagcgatgtcaaagatacccaaaattgaaagcaaatcacaaccatcgagggcaataatctcgtaggtgtcatagtgatagcgatgtcaaagatacccaaaattgaaagcaaatcacaactgctatgcagtcaaaaccatttaattgaaaagtgatagcgatgtcaaagatacccaaaattgaaagcaaatcacaacagagtttacggctcagcctgcggtattcggagtgatagcgatgtcaaagatacccaaaattgaaagcaaatcacaacggcagcttcacgtagaagtaaggatgttcagtgatagcgatgtcaaagatacccaaaattgaaagcaaatcacaacccattttcgtgcgatttggcggcatatccagtgatagcgatgtcaaagatacccaaaattgaaagcaaatcacaacagtatttcataatcatagaatttgagttaagtgatagcgatgtcaaagatacccaaaattgaaagcaaatcacaactcctggttgttgtttacatcacgttttttcagtgatagcgatgtcaaagatacccaaaattgaaagcaaatcacaacaagcttaccttcggccgtcagttccgcattagtgatagcgatgtcaaagatacccaaaattgaaagcaaatcacaactatcaaaacaatggtcttatggagaacatcagtgatagcgatgtcaaagatacccaaaattgaaagcaaatcacaactattcgctgcccgtcacctcaccccaaggtagtgatagcgatgtcaaagatacccaaaattgaaagcaaatcacaacaaaactgagatatgaaagcgattggtctgaagtgatagcgatgtcaaagatacccaaaattgaaagcaaatcacaaccaaggtgccggcatcggccgtcagtgtaggagtgatagcgatgtcaaagatacccaaaattgaaagcaaatcacaacaatagaagcgagctgcaggatctgcagctcagtgatagcgatgtcaaagatacccaaaattgaaagcaaatcacaacagaatagaacccgcgccgccggtctgggagagtgatagcgatgtcaaagatacccaaaattgaaagcaaatcacaactactcatagtaatggccttgctcagaaccaagtgatagcgatgtcaaagatacccaaaattgaaagcaaatcacaacctcgtgtacgagtcaatatctcaaattctgagtgatagcgatgtcaaagatacccaaaattgaaagcaaatcacaactactccataccatagctcttgcagacctctagtgatagcgatgtcaaagatacccaaaattgaaagcaaatcacaaccggaccggcctgaggctgaacgtcaaggtcagtgatagcgatgtcaaagatacccaaaattgaaagcaaatcacaaccataatgttgtaatagttcaccacccaaatcgggtacatttcactgtttgttttgactttcaaattctatggactgactggggaggatacagtcggattcaatatgaatgtcttgaccatcggcagcgggtacagcgggtatttcaacccacagttcctggccagggagtatgtcgcgcagggagatggcggaacggatgtcacctatggtaaaccacgcatcacggtataacggtgccacaccctggttggttaccaacaggcgggttatgctgccgttggtctggcactgctttacgacaaagcggtagcctgtggccattgatgcttcacgaaaaagttggggagtagccacaccaccatgaggggcatcgttggcaatcatgaaagtgatatggtatttggccgcctgttctgcccaggtgtggccgtacaggccatcggggctaagaaaactcttttggtcattgggcgaatagtagcttatctcaccaccgcacacgcctgtctgccagcgtacgcctcgacctatggcgttccagcattgctcgttgtagccatcggtggtgccaatctcatggctcttgtgcatgaaagaatcatcaaacaggccaaaacacaacgacataaggcttttatcggccacaacaggagagtgatctgccgatgccgcatcaatggaaacagcccacggaatgcctgtcataacggtgtccaagcgttcaaagaaccgcttctggaaatccatagaggggaagttactgcccaactggtatttggtaccatagatgtggtattctgaccaatggccaaaaccgacctccacaaacgccagacggggatcttgtgcataacgctgcgcaaagtccgcgtagaactgtaatgtaaacctttgcagttcactgttactccagtctgaataccaggtgggaccgtcgccaccgggatttgcggagtatgtctctttgtagtcctgtagctgctttatatactgaggtacggctgttgtgccacggttaccatccacatccctgcctgacggatactcgtaccggaaacgtgctataagctgatgaccacgtcctgcaacatcatcaagcaaatggtcaaaccaactccaatcatattgaatagtaccgtcatcgttacagccagtcaccaccttgcaaggcaggcaatatgagaactccaactgtatggtctggccatattctgcattgcggctacgggcctcatcgggccaaagcaccagccccgtcatgggctgcacgccagttatctttctttctaaagccacttgctgccattgctgagcaagacaatccaaatggcccagcagtaatatcatagcccaaataaagattcctgactttttcacaacaatatggagtgtaataattatggcttatgcagcgcgctcgcggcggtcacgttctacctgagcggttattttctgacgggcgttcttgtgcatcttgatgcagaaatatatcagaaggatgaaactgattcctcccaatacgggctccactgttccggtaagtgcaaatgcgtcatagcatccgtgggcaagtacaggtatgaaaaatatgctcaagaggttcttggctgatttctggccaaagtgatagagcgagtagtaatagcccatgaaaacggcaaatgcataatggccgggcacggccagaagagcacgggttacggctacagacagccatgcatcggcatgcatcaggacatatcccacattctcaattgcagcaaaacccaaccctacgcagaccgcatagactatgccgtcatagtgctcgtcaaagaatggattatgtctgagtatcagccataaagccagcagtttgaaaccctcctctggcacggcagctaccaggaatgcctctagcgtggagcctatcagatttgacggactgccttccgatgcaaacaacgtcccgcttatatagttctcgacaaacgacacgggaatacaaatcaatgcaccatacagaaacgcctttagcatctgtgacataggctcaggctgagcatctttcctgcagatatataaccaaagaagtatggcgggcaatatcgcggcgacaatcagaatcatattcctatttttttattccagacctgaaaacggagccggcaaacgtttagtgtagccttgagcgtggaatgtggcaatgatggtaccgttctggtcagtaaccacaacctgagctgccggaatcttgggatgacggctggtgaaatggccctcggccgtaagaacatcacctaatttggccgatacgtgataatagatagtggagtttatggcaaaagccatgttctcaccctgattgacaagggcggcaaatacaagatcggccagtgtgaacaacgccccaccctgacagatattgcctgcattcatatggttctctgttacggtcatcgtagctttggctgtaccgggtttaatctcagtaagttgaatacctatgtatttggcgaacttgtcaccatcgttcagaaaatttttcagtgtcataataaaatatgttgttatttaagaatctcaaaagtagctttgtcgctgagtgtacctccccacggactatcggtggcggtaacagtatatgaatctgttttacgacggatatataccaccatgcggccttgataagtgctgaactccgtgctcttgtgagtggtatcgtgcgccaggacatcggcattgtcaacggctatgatttctgctcctgatattccaagccggagcttgcggtcgctgttgggacacattatgtaatccttgtcagttatctgtatggagattatctcaacagaatcaaattctactggatttcctcctccaaccctctccatatgtatgcgcgcaggctcaccggaggtgctggcagagcatcggttagcttcagcatcatcattgtagcccacaatctccagcttgccgggattgtagttcacagtgaacaatgcagggcgagcgttattgggcattgactgtcggcccaatgattcaccgttcaggaaaagttccacctcctgacagttggagtagacctctattacggcctggtcatacgtatccatatcggccggagtccagtcagatataagcgggcctgctccgttattgtcagcatgacgggcatacgccaccataggttcacttgtccaccagctggcacgctgcagcccggcaggcttgactctgcctgtcacatcgagcagtgaggtgctccacatcacctgcggccacgcggcctcacccagataatctattcctgcccacaggaactgtccgcaaagtgacgggtcatcacgcagcatgagccacgactgtacatcatgcgtattctcagtgccgatgatggctttctccggatgtgcatcgtgatatgccttgagttcatccacgcggtagttctgccccaccacatccatcatctcggcaaacccgtttttatatacccccgatgagttggggcggaaaagagccatggtaaccggacgggtattatcaagagaatgtataaggtcttgctgcttacgatacttttcaaaaccatcaggattgttcagattatcacgtatctcattacccacactgtaaatcacaacgcaaggatggttgcgtgcctgctccaccatagcgcgggtgtcaggctcccaccactcatcaaaatagaggttgtaacccttctctgcatggttcttgggcgagttccaggtatcaaaagactctgccatgaagaggaatcccatgcggtcgcaaagctccatcagcacaggatcagccggattgtgtgccattcttatggcattcacaccaagtttacgcaactgctgcagccgatactcccaaaccgatgcaggcactgctgtacccaatgctccggcgtcagaatgcaggcagactccgtacatcttgatattctgcccgttaaggaaaaatcccttttcattgtcataacggattgtgcgcagtccggtggtaacggtttcggaatctatttccttgcggccatcagatagggaaacctcaagcgtgtataaatagggatcatccaatgaccaaagatgtggtgatttcaccgctgcatttaaggcaagttcagtatgctctcccggggctatctgaacatctgaaccgtttccacgtgtaaccaccttgccgtcagcatccttaaataagaacaggagtcttaccttacgggatttgtctgatgtatttgagactgtagccttgacattgagcttaccatcgtcaaatgatacaaatacaccgttcatgggaatatggcacgcgttcttgcgcacaaggcggacatgcctgtttatgccgctaccggtgtaccaacgggatgccggctgaacggaattgtccacacgcaccgcaaccgtggcatcagttccgggcgcgacaaggtcagtaatatcgtacgtaaagcccacataaccgttaggacggtatccggccagcttcccgttcacatagacgctgctgcatgccataaccccgtcaaactccaggaacagacgttcatcgggagcgatatcggtcttgatggttttgcggtaccatcctattccggccggaagataagctccgccctgccccgtcgggttgcttcggtcaaactcac

SEQ ID NO: 1090 - DNA, 24581 bp, synthetic construct
  misc_feature 1..24581: note = Synthetic
  source 1..24581: mol_type = other DNA
attgaaagatatgccgcaaagtggcgtgaataaactacaggtgggacggtctgtttatgacttctacatgaaagaatgggcaggtgtagaccccgacaatggaaatccgttgtggtatatggacgaggtagacgccaatgataacccgacagggaaacgcgttactacaagtgattatgcttcggcaaattattattacgtcaacaaatcttcccttcccaaagtgtatggtggttttaacacttcgctttcatggaaaggattcgatctttccgcaatctttgcttatagcattggcggatatatctacaaccgtgatattacgatgattttgcacaacggtagtctggaaggtcgtgactggtcgacagagatactgagaagatggacaccggaaaaccgttatacggatgtgccggctttgagtactacttctaataactggaactctgcttccacccgttttttgcagaacaactcgtatatgcgactgaaaaatctgactctttcttacaatttgccgaaacagttgatcagtaaattggcattgagcagcgtgcaggtgtttgtacaaggtgataatcttttcactattcacaggaatcagggacttgacccggaacagggaattacaggcatcacttattatcgttatccggctatgcgaaccatttccggaggtattaatctatctttctaaaattacacgatatatatatgaaaaagataaaaatacaatctatactgactgctgttgccggattactattggcgacaagttgtagcagtagctttctggatacagagcccacggatgcagtaagctccgatcaggtggcagtagccggaaacgcggaacgtctcttcaacggagcttggtataacctgttcgagtacggaacaacttatgccaatattggctatcgggcacttcaatgtcaggatgatatgatggcaagcgatgtggtttcccgtccgaaatatggtttcaattcttcgtatcagttcaatgacatagcgattccatctgacggaagaacttcatttgcctggtatctgatatataaaacaatagataactgtaatactgcgatttccattaaaggggactccgaggcacttcggcaggcacaggggcaggcattggctttgcgtgctttttgttatttacatctggtacagcattatcagtttacctatctgaaagataaggatgccccttgtgtacctatttatacagaaccgactacgagcactaccgagccaaaaggaaaatcaacggtagcacaagtttatcagcgtatttttgatgatttgaatcttgcacaagagtatttggaaggctatgtccgcaaaggagacggccagaaattcaaaccgaatgcagatgttatcaacggtcttttggcacgtgcgtacttattgaccggacaatggggagaggctgcaaaagctgccgaagctgcccgcaaaggatactcactgatgactaccactgccgaatatgaaggctttaataatatttccaacaaggaatggatttggggatctcctcaaacactttcccagtcggatgcaagttacaacttctattatctggatgcgacttatgtcggagcttatagtagtttcatggcagatcctcatttgaaagatacttttatagaaggagacatccgcttgcctctgttccaatggatgcgcgaaggatatctggggtataaaaagtttcacatgcgctcagatgatacagccgacctggtgttgatgcgttcttcagaaatgtatctgatagaagcggaagcgaaagttcgtgacggtgtagcgttagatcaggctgtaatccctttgaatactttacgcaatgctcgtgggataggaaattatgatgtgacaggaaagacaaacgaagcggtcattgatgaaatactgatggagcgtcgtcgtgaactttggggagaaggctttggtatcactgatattctccgtacccagaaaacggtagaacgtacggctttatccgaagaagtgcagaaaacggaagtagactgctggcaggagggaggtagctttgcaaagagaaatccattgggacattggttcctcagcttcccgaatggcaaagcgtttagtgaaaacagtagctattacctgtatgcgatccctgagaaggaaatgaatgcaaatcctaacttataataaatagctctcttaattttttgactttgaccttaacttgtgagccggtatacgtcgtgacgacgcataccggctgtttttatgctgttttttgctttttcaaattaggtaaaaagaaagtgactaatcccagcaacggcatatatgcacagacattatatacatattcaatactggttttatcagccaaattgccaagaacggcagaagcgacacccgcaactccgaaagcgaatccgaagaaaagccctgatactaatcctaatttggtgggcagcagttcttgcgcatagagcagtatggcaggaaaggcggaggaaagcattaaccctacacagaagctaagcacaatggtccaggtaagattagcatgaggcataagtaaagcgaaaggcgctgctcccagaatggaagcccagataacatatttccgtccgacgcggtcgcctatcggaccgccgatcaatgttccgatagcagtggcaactaagaaaataaataaatatagctgcgattcttgtacggttacattaaatttatgaatcagatagaaagtataatagctggtaagacttgccatatagatatatttagagaaaatcaatatcaataatataccgatagtgatagccgtcttatccataggcagtgggagatgcactggctttctgagacttaccgtttgcgctttcatccggtttagataagatttgtaccatttgcatatcggatacatcaccccaatagccgctaaagcgacaaatgagaaaatgaaaagatggtctctgccataaggagctaccagtaaggctactaataatgggcctaatgaacctccgaaattaccgccaacctgaaacaaggattgtgcgagtccacgttttccacccgaagcgaggaaagtgattcgggacgcttccggatgcagtacggaagaaccgataccaattaaaaatacggataacaatatccagggaagattgtcggagaatgccagactggtaagtccgaccattgtaaagctcattccgataggcaaagaccatgcaatgggatacttgtcaaagataattccggtaatcggctgaaaaacagatgcggaaagttgataaactaatgtgatcagtccgatttgcgcgaagcttaatcccaaatcatccttgaacaatgggtaagctgccgaaactacagactgcaaaaggtcgttgaggcagtgtgaaagacttaatgcaattaagatagagaatgtaattttccctacaggctgttcttgattctgtaccataatacctatttctattgaagtgttcctgaaaaaattgcctgcaaaggtacgtaaacttcccgtttctcaatatatttgctacgattaattctgtacgatatgaagaaagtggtagtagcgatggattctttcaaaggttgtctttcctccacagaggcagaaaaggctgccgaagaaggcgtaaaacaagtttgtccggactgtgaggtcgtttgttttccgatagccgacggaggtgaagggatgctcgatgttttggtggaagcaaccgaaggtgcatatcaaaaggtaattgccagtgatcctttgatgcgtccgatagaaacaggttatggagtttcgggcgataagcgtattgcctttatcgaaatggctgcagtgaacgggctgccattattatcggcaacggaacggaatccgatgctgactactacttatggaaccggtgaattgatattgcacgccattgaacatggataccgggaatttataattggtatcggagggagtgcgacaaacgatgccggactgggcatgttacaggcattaggtttccgtttttacgatcaggatggagaaattttggggaagggaggtcaaatcttggatcagattgtcgctattgatttttcttctgtccatccggcattgaaagatgcccgttttacgatagcatgtgatgtgcgaaatccctttagtggtccggaaggtgccgcatacgtttttgcccgtcaaaaaggagctgacgatgctatgattgaaaaactgaatgcaggtatgaaaaggttttcccgattgattcattcaactaccggaagagaaattacagaggttgccggagcgggagctgccggtggtttgggaggagcatttctggcttttctgaatgccgagttgaagccgggaatcgaattattgctccggacattgaagtttgatgagaaaataaaagatgccgatctgataataaccggagagggaagggtagaccgccaatctgtgatgggaaaagttccgttcggaatattagaagaagcgaacaaacaaggcataccggtcattgttgtagcaggtagcatagcagatacggaagttttgaataaggccggttttcgaggtatcttttccattgttccttcgcctatgtctttggaagtagcgatgaaaccggaaaccgctaagaataatattagccggactgttgctcagattatttctttagcaaccttataactgttcatatctgtgttatgccataaataacctcctgcctttaatcaattactgtctcgctatgttattcttgtttcgttctacgtgggttatcttttagttccacctaggtggaacgaaacggaaagctaggtggaactaaaagataacctaggtggaacgaaaaagaataagtataaaaaaagaatcgaagatactgttcagcggaataacgtatgaaagcccctttatagaaaagagaacgatctaagaaacaagttcctgtctggatagaaggggaacttcggtcgtaaaagttcctttgaataaagtcttaaaactaaggattgtaaattgtagttaattcatttttgccctaccgaactattctctacacctactgttgttaaataaaaaaggaggataaaatgggctttatttggtatattattattggtattgtggctgggttcctcgcaggtaaaataatgcgcggcggaggttttggccttattataaatttgttacttggtattctcggaggagtgctgggtggttgggtatttgcccttttcggactggcagcttcggggttgatcgggagtttgattacttctactgtgggagctattctggtattatggattgcttctttattctcgaaatctaaataataattttatataatttatttttaatctaaaaacagaacttaattatggaatgtagacatggaaatttctggattggacttggaattggttcaattcttggtgcagtagcttatcgtctttcacgtacagctaaagctaaacagttggaaagtgatatttataacgctattcaccgtatcggtcgtgacgctgaaatagcagcagccgaagcagaaagaaaagcaatgaatctgggcctgaaagctgttgaaacaggagctaaagttgcagataaagtagctgaagaagctgacaaggtagttggaaaggcaaaagacaaatgggaaaaataatagcccttgaaagtggtaatcgattttaatagaaccggttaccactttcgatttgttctgctcttcctattattaaaggtcttttttcacttattaagagtgatgtgtgcccgtacacattttgcttctcatatacctcttttccattccttctgtagataaaaagctcttcttgcatgatacttattacttttctaatagatgttttatagcttttctgcttaatatcttatgtttaacaacatgtgtgcactttgtggtattgctttaaatcgttgatttatagtgtgatattaatagtgtgttataatgtgtgtgcgcacacacttttgcttaattcaataattcattttacttttgtcgttgaaaaataagatacttatcagtaaatggataaagaattctcaaatattcgtattgtggacatcgccaagatggcgggagtctctgtcggtacagtagacagggtaattcataatcgtggacgggtatcggaagaaaacaagaagaaagtgcaggccattctggaaatggttcattatcagccgaacttgatggcacgttcgttggcatctaaaaaacaataccattttgttgctatcattccttcgttcgctcacggtgaatattgggaggctatttccgaaggaattgataaagcggcttcggagatggagtcgtataatataactgtaaccaagctttttttcgatcaatataataataaagcttttgatgatactgtccgtaatctgctggacggaaaagtggatggagtattgattgctacgctgtttgccgattctgtaattcgtctttctcaggagctcgataataatgagatcccctatgtgtatgttgactctaatattaaggggcaacatcagcttgcatattttggaacggaatcttatgatgccggagtgattgcggccagattattgacggacagactctcttcctcttctgacattctgatggcacgaattatccatagcggaaagaatgattccaatcaaggaaaaaacaggcgtgaaggtttctgtcattatctgaaagaaataggatttggtgggaagttacacgaagtagagttgaaaatcaatgattctgtatataacttcattaaacttgacgagctttttgaagctaacccttctataaaaggtggtattattttcaattcaacctgttatatcttgggaaattatctgaaggcacgggggatgaagtctgttaagctggtcggctacgacctgatcgaaaggaacacacaactgctttccgaaggcgtcattaccgcattagtagcacaacgccccgaacgacaaggatatgatggcatcaagtcattgtgcaatcatctgttatttaagcagaatcccgaaaaagtgaacctgatgccgattgatattcttttgaaagagaatctgaaatattatctgaacaataaattataaaccatataaataaaaaagaaccatgaacgaattatttaacgtaaaagacaaagtcgttgttatcaccggtggagccggaatcttgggtaaaggtattgctgcatatcttgcaaaagaaggcgcgaaagttgttgtgctcgatagaagcgaagaggctggtaaagcattggtagaaagtatcaaggcagaaggcaatgaagcgatgttcctgtacactgacgtgatggacaaagaagtgctggaaggcaataaagtggaaataatgaaagactatggacgtatcgatgtattgctgaacgccgccggaggtaatatggcaggtgcaaccatcgctccggacaaaactttctttgacttacagatcgatgcctttaaaaaggtggtagacctgaacctgtttggtacagtattgcctacaatggtatttgctgaaatcatggtagagcaaaagaaaggttctatcgtaaacttctgttcagaatctgctcttcgtccgttgacccgtgtagtgggctacggtgctgcaaaagctgctatcgctaactttactaaatatatggccggtgaactggctttgaaattcggaaatggtctgcgcgtaaatgccattgctccgggattcttcctgactgaccagaaccgtactttattgacgaatccggatggctctctgaccgatcgttctaagacaattctggctcatactccatttaaccgtttcggcgaaccggaagatctttatggaactatccattacctgatcagtgatgcttctaacttcgtaacaggcacagtagctgttattgatggcggtttcgatgcattttctatctaatacttaatacttatcattatgtatttatgtgaacaaacttggcgctggtatggtccgaatgaccctgtaagcttgtgggatatcaaacaggcaggcgctaccggtatagtaaacgctcttcatcatattccgaatggcgaagtgtggacagtagaagaaatcatgaagcgtaagcaaatgattgaagaagtgggattgacctggtcggtggtagaaagtgtacctgtacacgaacatattaaaacacagaccggtgatttcatgagatatatcgaaaattataaggaaagtatccgcaatctggctaaatgtggtgtaatggtagttacttacaactttatgcctgtattggactggacccgtacagaccttgcctatacaatgcctgatggctctaaagctcttcgttttgaaaaagcggctttcgttgctttcgatcttttcatcctgaaacgtccgaatgcggaaaaagactatactccggaagagatagctaaagcaaaagctcgtttcgaacaaatgagtgaagacgataagaatttgttggttcgtaatatgattgccggacttccgggatcagaagaaagtttcactgtagcgcagttccaggaagcactagaccgctataacgatattgatgcagagaaacttcgtgcgaatctgattttcttcttgaaagagatagctcctgtagctgatgaagtaggggtgaagctggtgattcatccggacgatcctccttatacaatcttaggcttaccgcgtatcttgagtacggaagaagactttagaaaactgattgaagccgttcctaacgagtctaacggcctctgcttgtgtaccggttctttcggtgtacgtgctgacaatgaccttgcaggtatgatggagcgttttggcgaccgtgtgaattttgtacacttacgtagcacgcagcgtgacgaagaaggcaacttctacgaagcaaaccatctggaaggaaatgtggatatgtacaatgtgatgaagagtttgattcttctgcaacaacgtcgtaaatgttctattgctatgcgtcctgaccatggccatcagatgatcgacgatttgaagaagaaaacgaatccgggatattcctgcttaggtcgtcttcgtggactggcggaacttcgtggtttggaaatgggtatagccaagtctatactttaatcaggatttataattagcactgtattataaaggcactgcggctgttattgattgtaataagggctgtagtgtcttttattttgtttacctgatatcatttatagattaaaacaggtttccggtgtgcaggtcaactttaacctttttcggttcgggaatgataagaagcgctatctgtgcacaagcttcggcatcagccagggcgtggtggtgattggtcaaatcatatctgcaccgtgctgctaccgtgtgcaactgatgattgggaagttctttcccaaatacttttcgtgaagtacggcaggtacagtaaaacttataattgggataagtcatctcgtataactcatgaactgctttgaggcagccttcatcaaaaggactgttgtgggcaacaagtggcaaaccgtctatgagcggcttaatttcagcccatacttccggaaagtcttccgcttcttctgtatcactgtaagtcagtccatgaacagctgtggtccattgagtatagtaattggggcggggacggatcagacgatagattttgtttataatttttccattccttacaataacaattcctacactacatacactggtgcgtttatcgttggctgtttcaaagtcgatagctgcgaagtttttcattattaacgataaaaaaggacgagtttccccgccctaaatgttttcacaacggaataatccttattgcgatttgcttcaaattagttttgcaaaactaactaaatatatttagaaaaccaatagttttatacaaaaaaaatagtagctttgggaaaaataataatacgatgaaaaaaatattaggattagatttgggaaccaatagtataggttgggctgtgttaaatgctgcagatgataactctttaaaatatatagaagcagctggcagtagaattattccgatggatgcagctatattaggtgattttgatagaggtaattcaatttctcaaacggcagagcgaacaagaattcgtggaatgcgtcatttacgagaacgatatttgcttcgtcgagcaagattacatagaattctgaatttgttaggcttcttaccctttcattatgcgcaagacatagatcgatatggtaacttttcagctgatatggaacctaaaatagcttggtgtaaaaatctagaaggagaattagagtttatttttatagaatcatttaatgaaatgctggaagactttaggaaaaatcagcccgaattagtcgcagataataagaaagtaccttatgattgggtgatttattatcttcgtaaaaaggcattagaaaagaaaatatctaaagaagaattagcttggattcttttaaactttaatcaaaagcgtggatactatcaattacgtggtgaagatgacgatgaatctatgaaaactgccaagacacggcagtactttgataagcaaattattaaaaatataattgatactaatcagacttataaagggcaaagaatacttattgttgagctacaaaatggagataaaggtaaaatctttaaaaaagaaattccagactggatagggcaagaaaaaaatattatcgttactgtagatattgataaagatgggaatgataaatatgaggaatctgggagcttgtcgtgtcgatttaaaattccaacagacgcagaatgggaatccgagtggaaacttataaagatgaaaacccaaaaagatttggatgaatctaataaaacagttggtacttatatatatgattcgattttgcaaaatccgacgcagaaagtacgtggaaaattagtgcgtacaattgaacggaaatactataaagcagaacttaagcaaatattggaaaaacaaaccgaatttcattcggaattgcaggataaggatttatatattgagtgcttgaacgaattgtattctaataatgatacccatcggaacgcgattactgaccgagactttgtttatttgtttatgaatgatatattattctatcagcgtccacttaagagtaaaaagtctttaattgataactgtccatatgaaagaaatatatatatagataaggagacgggagagataaaatatttacctattaaatgtattgctaaatcacatccgttgtttcaagagtttcgtttatggaaatttatatctagtattagaatttatcaaagagaaagtgttgttgaagttgttgataaacagttagatttattttcttcacaatcaacttctgttcagaaattagtcacagatgtagatgttactgataaatttttaacatgtgagaatgattatgtggctctttttgaatggctgaataagaagaagattatagatcaaaaagaatttttgaaatatcgtccgtttggtctaaagggagatatagataattatcggtggaattatgtggaagataaatcatatccttgtaatgaaacacatgcaatgattttgacttattttgcaaaagcaggtatttcagaagatattctaactaaggaaatggaagaagcgctatggcatattttgtattctgtagaagacagacaagaaattacgaaagctttaagaacctttgcttccaagtatcatttaagtgattcttttgtgaaggtatttagcaatattcctccttttaaaaaagagtatggttcttattctgctaaagcgataaagaaattactttctttaatgcgaatgggaaaatattggagtgaagatgctattgatgtgaatacaagagagcgcatagataagattgtaacgggtgaatatgatgagaaaattagagatagagtaagggagaaaactatccgattgaatgatatcaggcatttccgtgcattaccggattggttggcatgctatgttgtatacgaccgtcattcggaaactagagaaataactgaatggaaatctccagaagaaatagatgaatatatacggaattttaaacagcattcactaagaaatccgatagtagagcaggtgatcacagaaacattgcgtactgtgcgtgacatctggaaacaggtaggttgtattgacgaaattcacgtggaattaggccgtgaaatgaagaaccctgctgataaaagaaagagaattacatcacagataatcgaaaatgagaatgcaaatttacgagtgaaagctttgcttacagagtttgtgaatcctgagtttgagatagaaaatgtacgcccttattcgttgagccagcaggatattttacgtatttatgaggatggagtattaaacagtgtagcggaagtacctggcgatatagcgggaatattgaaaaagttcaatgagaatgatgcaaagaagcgtcctacaacaagtgaaattcttcgctataaactatggcttgagcaaaaatatcgttcgccttatactggtgaaatgattcctctcagtaaattgtttacatcagcttacgagattgagcacgttattccacaatcgcgatatttcgacgattcttttagtaataaggtaatttgtgaagcggaggtaaataaacttaaagacaatgcgttgggttatgagtttataaagaaacatcatggggaaaaagtagaattgggatttggtaagatagtagaaatattttcagttagtgtatatgaacaatttgtgaaggataattattcgcgaaatcgtgggaaaatgaaaaaactattgatggatgaaataccggagcaatttatagaacgtcaattgaacgacagtcgttatattagtaaagttgttaagacattattatccaatgttgttcgtgaaaaggcggagcaggaagctgtttcgaagaatgttattgtttgtacaggaggtgtaactgatcgcttaaagaaagattggggaataaatgatgtttggaataaaatagtgttacctcgtttcctgcgtttgaatgagttgacaaattcgactaattttacagcgaaaaatgctgccggtaatgagattcctgcgatgccgcttgaattacaaaaaggatttaataaaaaaagaatagatcatcgacatcatgcgatggatgctattgtgattgcatgtgctaatcgtaatattgttaattatttgaataatgaatctgcaagtagaaaggctaagataagccgtcatgacttacaagctattctatgtgataaggtgaggacagatgataaaggaaattatcaatggagggttaaaaagccatgggatacatttacacaggatgtatatgttgcattggaaaatataattgttagttttaaacaaaatctacgtgttataaataaaacgagtaattattattggcattatgagaacggaaagaaagttctagtaaaacaagtaaaaggtgatagttgggctattcgtaaaccaatgcataaagacactgtatttggagaggtgaatttgcgtaaagtgaaatcggtatctttaaatgaggcgcttaagaatccacagtttattgtggaaaaggacttaaaaagacaattgttatctttacttcaacagaattttgatataaagaaaataaaaaaatactttgaggagcataaagatatatggagtgatatatctttgtctaagatgaatatatactattttacaaaagaaactaaggaccggtattttgcaactcgcaaacctttggatgcaagttttgataaaaagaaaatagaaagttgcatcacagatactggaatccagcaaatattacttcgtcatttagaattaaaagaaaatgatccggagcgagctttttcaccagatggcattgacgaaatgaatcgcaatattattcaactgaataaaggtaaaggtcatcatcccatagctaaagttcgcgtttatgaaaaggctgataagtttgaggtaggacagcgaggcaacaaatcttctaaatttgtggaagcagcaaaagggacaaatttattctttgctgtgtatgaaactgaatatccggatgaaaaaacgaattctattgtacgtaaaagaaattatgcaacaatacctttgaatattgctattgaaagacagaaaagaggattatctacagctccagaagatgagaaaggaaatgtcccctcttttgtcttatcacctaatgatttagtttatcttcctacttctgaagatatcgtgaatggtcatattactcaaccgatagataaaagtaggatttataaaatggtctcttcttctggaagtcaatgtttttttataaagcataatatagctaatataattgttgataaatacgaattttcacctcttaataaaatggaaagggcaatctccaatgagatgattaaggagatttgtattcctgttaaagttgataggttgggaaatattgtcaaattaggtaaatctgaatagtgttagttcttaattttgaaatgatctaaatagtaagcttatattcaatggaagaaaacaagaaaggtgagatacttttatatcaaacaatagatggagtttctaaaatagaagtgactgtatataatgatatagtatggttgctagatcaggtggcagagctatttcaacgtaataagtcaacaatatcgcttcatattaaaaatatatttgattgtggtgaactacagatagattcaactgttgcaaaatttgcaacagttcaaaaagaaggtttgtataaagtagcatttgttttaggtagaaattcattttattgaaaattaaaaaaagagcgaaaaaaaatgaagatataggatacgttataattattatactatttaacaccttaaaactaatacaatgataaaaaaaactctttattttggaaatccggtttatctgtcattgaggaatgcgcagttagtaataaaattaccggaaatagagaaaaatgatatattgccagagaattttaagcaacaatctgaaataacaaaacctgttgaagatataggaatagtggttttagataataaacagattactattacatcaggagtacttgaagcattgcttgagaacaatagtgctgttataacctgtgatagcaaaagcatgcccgtgggattgatgcttcctttatatggaaatacaactcaaaatgaacgctttcgtcaacagttggatgcttcagtaccattgaaaaaacagctttggcagcaaactattaagtcgaaaatagataatcaagcctctgttttggagaagtgtactgcggaagaagtgaagtgtatgcgtatttgggcgaatgatgtgaaaagtggtgatcctgataatttagaagcacgtgctgctgcctattattggaagggactatttgctaatgttaaggggttcactcgtgaacgcgaaggcatttctcccaataatctactaaattatggatatgctatacttcgtgcaattgtagcccgtggattagtgacaagcggattacttccaactttgggtattcatcatcataatcgttacaatgcctattgtttggctgacgatataatggaaccttatcgtccttatgtggatgagttggtttttgggttggttcagttgcatgggagtaatttggaattaactaaagaaataaaagcttgtttattgactatccctacattggaagtgaaaataggtggaaagcgtagtcctttgatggttgctgttggacaaacaactgcatcattgtataagtgttttgatggagaattacgtcgtataagttatcccgaacgttaatggatcgttttagtgaatatcgtattatgtgggtacttgttctttttgatttaccaacggagacgaagaaagataaaagagcctatgctgattttagaaagaatttacagaaagacggctttactatgtttcaattttctatttatgtacgacattgtgctagtagtgaaaatgcagcagtacatataaaaagggttaaatcctttcttcctgaatatgggcagattggaattatgtgcataactgataaacaatttggggatattgaacttttttatgggaaaaagatacagatggtgaatacgccaggacaacagttagaactattttaaaataaaaaatcccgtagaaaaaacgggattttttgttaaatacagcttcttttttatttcctatattaggctttagtatgttgtgctacagttagatatgtagattctgctgtattcaatggctcaaagatactaatttgaaagcaaatcacaacttacgaaaccgaaccttgcaatgaccccaagctgtattcaatggctcaaagatactaatttgaaagcaaatcacaaccgtatcgttgaccaaaacggtgaacggtagctgtattcaatggctcaaagatactaatttgaaagcaaatcacaaccagcttatacatcctgtttatcgctttttgctgtattcaatggctcaaagatactaatttgaaagcaaatcacaactgtttaatgcctcttgtttccacagctcgagctgtattcaatggctcaaagatactaatttgaaagcaaatcacaacttcagttgtagtcccattgcttgttgctgtgctgtattcaatggctcaaagatactaatttgaaagcaaatcacaactgtttaatgcctcttgtttccacagctcgagctgtattcaatggctcaaagatactaatttgaaagcaaatcacaacttcagttgtagtcccattgcttgttgctgtgctgtattcaatggctcaaagatactaatttgaaagcaaatcacaactgtttaatgcctcttgcttccatagctcgagctgtattcaatggctcaaagatactaatttgaaagcaaatcacaaccatatatagattaccattctttaattgtttgctgtattcaatggctcaaagatactaatttgaaagcaaatcacaacggattagtgtttcgttaccttttttgtgtagctgtattcaatggctcaaagatactaatttgaaagcaaatcacaacgattttgattgttattactaaataatgaagctgtattcaatggctcaaagatactaatttgaaagcaaatcacaactgatgcctactgataactacggctttgctgctgtattcaatggctcaaagatactaatttgaaagcaaatcacaacgtgggtcgatatatgtggtcaagtcttttgctgtattcaatggctcaaagatactaatttgaaagcaaatcacaaccagatgccagtccatgatcggagcaaatgggctgtattcaatggctcaaagatactaatttgaaagcaaatcacaactttgtttaagtaataattccaataacatcgctgtattcaatggctcaaagatactaatttgaaagcaaatcacaacgcctgcttcagttggctgctccggcacatcgctgtattcaatggctcaaagatactaatttgaaagcaaatcacaaccttgcatccacatgttagctttccatacgagctgtattcaatggctcaaagatactaatttgaaagcaaatcacaactataaattcctatggtttgataaatgacgggctgtattcaatggctcaaagatactaatttgaaagcaaatcacaacaagatgatagggggcgataaaatgaaagacgctgtattcaatggctcaaagatactaatttgaaagcaaatcacaaccatatttcctcctttcctttaaagtgttcggctgtattcaatggctcaaagatactaatttgaaagcaaatcacaacttatttcggcttctttcaatctaagctcaagctgtattcaatggctcaaagatactaatttgaaagcaaatcacaactagcgaaagcgtgcgagaaatacggaatcagctgtattcaatggctcaaatttagatataaattgcgatttatatgccagtgtaataagaaaaagtcaagcccacccctatctttatggcgtgagaggtatcgatggacgagcctcaaaataaatgtttgacgagctcatagtctcaaaaatgttatctccaatgagaatagtatgtggtcttgacgttcacaaagatagtgtatttgcctgtatcttgaatgataatggcgacaaactagaattcaaatatggtgttttgacgcctgagttggaagagttacatcaagttagtgaactcttatttcatcaagtagttgcctggtaggaagagtgatgtccgtgatgcggcttggattgcggaatgtaccatgaaggatttgatccgtggaagttttgtttccggcactattgttcagcgtatgcggcaatataaccgtcgtatattttacttaaataaagaaatcgtttacaagcttactaaattggtcgctgttcttcaatattgtaacattcgcataagtaactatgtttcctcgaccgatagcaaaactacaaagaagtagtccgtcttatttcagaagctatcaacgatgccaattatctttcctgtgttattcatgggcgcacagtaaaccgtgtgggtaaagatgttattatcaactaattgacgtgcgccatatcggaagttgacattgatttaattggtcagtatctggaagaaatagatctttttcagaggcataagcaagagaagctgactcaaatgtgccagaatgaatttcccaaagagtttgaaaatctccagactatcccgggagtcaaggaacgttccgccgcctccatattagcagaaataggagcggacatgaaaatgtttaccgcatcatccctagtgtcatggtgcggcttcaaacctcgaaatgaagagagtgtaggagaaatcaaatcgcgtagaatccgcatggtaataaatatattcgaaagataatgattgaatgtgcatggggtgcagcaaaacccagaactgtttcttctcgaaatttagttatacacaaactgttatcagaaagaaaaatgctatgaaagtcaaagtggctgtcgctagaaaaatgtaaatggctatttggtatgtattatcagaaagcaagccttatatcgattataagaagcctgatacaataggctactcataatataccgcttattgtaaggccagtatctttgtggtagttttttgacaccgtcttgtaaatagactgatgctttgcggcttaggatgccagtgctgggacgtgagagcccgaagaggaaaacgaagaataaaaagcaacaagactaccctgctaaaggtgcccaagaaactccatgtgcctcaaagaagaagaaaagacaagcgggaggcataaagacaggcgtgatcttgacttaaattcgttttcttagagaaaagatactaattttgaaagtaaatcacaacatgctctatatctatttgggtatgttttaatagattgaaaactctgtttccatcgaatcttttttatatgtcaatccatggatttttgtcatccactgaatataataattgggagccggacgaatcattcggtatatcttatctacaattttccctcctctgacaatgactaccccaatgctatatacactggtaagtttaccgttggccgtttcaaagttgatagctgcgaagttttccattatttccgatgtttttaattgtaaatatacaaattagcatttattctctttatatttgcgtataaaatataccgatgtacacagaatatcagccctcttacttacttgctccctatatcgataattattgggaatttaagggaaaaccggaatatggtatgcgtatccatattttgccggatggttgtaccgattttatttttacgttgggagatgtggtgagtacggtcaaagaagaaacgctggtcatgcagccttatagtgcttactttgtaggtccgatgacgaagtattcggaacttgttacttatgccgaatctgtacatcagttcggtgtccgttttctgccttgcggattatcctgttttacaaagttacctttgcatgaatttgcgaaccacagaatcagtacgaatgagatgcaggcagttttcgatattacctttattgaaaggttgtgtgagcaaaaccacgtgcaaggcaggattcaggtcgttgaagaatatctcttgacgtatcttgcacataattaccagcctgttgactctcaggttgctgtagcggtggatatgatcaatcaatccggtggaaaacgtacggttcgcagtctgatgaatgaggtatgcttgtgccaacgtcattttgaacggaaatttaagtactacaccgggtttacccctaaagaatatagccgcattgttaagttcagaaatgcagtggaattactgaggaatacgacatcagtcaatttactgactactgctattgatgccgggtattatgatttggcgcatttctcaaaagagatcaagtcattgtcgggcaatacaccttcatcgtttctctcgcttacggttccggaagatagaacgctgacatatatcgagccgtagatcccaatgagtgaaagtcgattttttacaacagaacggtctcatgtactcttatctttgtagcgaaataatataaatacaataagagtatgtcaacaaaaacgatgaaagagaaagctgcggaattattgcagaaatgtgaaattgtagtgctgtcttctgtgaataaagaaggttatccgcgtcctgtaccaatgagtaaaatcgcagcggaagggatttctgctatctggatgtctaccggagcaaattcattaaagacgattgatttcttgtcaaatccgaaagccggattatgctttcaggaaaagggggacagtgtggcattgatgggagaggtggaagtcgtaacggacgagaagttaaagaaggaactctggcaggactggtttatcgaacattttctcggtggtcctacagatccggggtatgtattgctgaaattcacagccaatcacgcgacttactggattgaaggtacttttattcataaaaagcttaattaatcttgttgtagagtgattgtgaaataccggacttgatgagtatcggtacacttgtatgagaaaaaagagaaaaacagatcctcttacagacggattgttcttctcttttatgtttggactgaatgatttatttcgtcagcctgaaactcatttagaattcaaacttttccagcttcatttcagctaattcctgaatgatacctacgtattgggcaaaatgagcggatttctcatgagctgccaatacttcggcattctgccatgtttcgcaaatcatgaaaacatcacggcgggtactactttcaaaagtatcataagcaatacatccttcttctttcaaagaacaagctgtcagttcttttgctgcttcaatcgctttttcgcggtttgtttcgtttacacgaacaaaaacatttaatctgatcatagtctttttgttatttatatgattaaaaagaacggtttcatcactgtgtctgtgaagaaccgaaggcaaagatacaatttttctgtagcttccaacaggctgttttcaaaatttcatataaacttcacataatcaaaaaaaacggctatatttgcatctaaattctaaaagcagctattttgggcacaattcttaaatttgttatagcttactattagcctcataaaccacaggctaatttcttttgtttgagtagttctacttgaaccggtttttcattttatcaattttattattcactgtatcggtttttacaacggatgcaattgggtattcaggcttttagtcagattccttttgacggtcagaaagctgcggatacatggagaatgaatggaaaatttcgtaagaaatactaaactgaacatagaagaagaaataaaaaggatagagcaacagccgattgaaactcttgataagataaagaagatcatcgatgtcatacaggtttcgcttgctttgctgaaaacggccgttatcggatatcaatttcaaaatcctgaagaagagattcttttctttaaggtctggaaaccgcagatttccgggctgctgatgttttatgtccgtttatatcagattgaaaagaaccgtgctgacaagtccctgtcagtccaatgcagatatttaaagatggaactggagaatatacagaagtcttttttgaataatagcttttatgattattaccgtgccggtcagactgtacttgacaaccaatattttatccgtgcgaattatgatattctttctgacattcattatcatttgctggacagggattcctcttttaccactttgcacgattcaagtgtcgcaatgattctggcaaatcagcatttgatagaatatatatcgggtgaaatagattcgctatcggaaaaattacagcttaaattcatctccatagtagacagtaagttgctgcaatggacggatagtaaagtggctttggtggaatttatttatgcactgtatgcagggaaatgctttaataatggaaataccagtctgaaggacatcgctttctgttgtgaggctcttttcaatattgagattggcgacttttatcgtatctttctggaaatcagaaaccggaagaagagccgaacacaatttctggataagttgaaggataaaatacaaaagatgatggacgaacttgacggataaatttcatggtatcttgtgacatcttgtgaattttacaaatggcttatatccaactttgcggagacaaataattgattcacaaagaaagataacagatttgtatatttatggatgcaacatttacctgggagataaaagcaaagaactctcctttattaattaagaaatgcagtcattgtgatagtgaccggttctattgtagtgataagtttagaatgaatgcgcagaagaagaacattgatgtctggctgatatatagatgtgtgaaatgtgaccatacgtgcaatattactttgttgtcgcgtaccaaaccggatctgatagataaaactctgtttcacagcttttccatgaatgattggaaagcggcctggaaatatgctttttcagctggacttgccggcaggaataatctgaaaccagattatgatagtgtggagtatgaggttgcagggcatttttcaaaagaagatataactcatgtatctgatgagacaataaagattcaggtcagatgtgagtttgagtttaatctgaaactgtcctccttattaaaaaggaattttcttctttccagtactcggttaaagcgtttgttcgaacagggagtgatttcgcttctttccggtaaagtaccacagaaatataaagtaaaggatggggatatcatattgatagacaaagaatatttgcttggtatgatggattttgttgatagctttattgcaaaatagggcattgattaatttattattactacttttgttttatgaggaatagatgagttcataaactaagtaatattataaattcagaagtatgagaaagttatttttattagtttttgctttatgtgtatggagtgtctttgccgatgctcaggagggtgcgggaagatatattgaggtgaccggttcttctgaaattgaagttgttccggatgaaattcattttttgattcagataaaagaatattggcaagaggagttcgttccgaaatcgaagccggaggattataaaacaaaggttccattggaatggattgagaaggatttacggcgggttttgagtagagccggaatctcggatgaggctattcgtgtacaggaaataggagattattggcgtcagaaaggaaaagagtttctgataggtaagcaactggatatccggctcacagattttgaacagatcaatactatcattaagaaagttgatacgagaggcattgagtctatgcgtattggagagttgaagcacaaggatttgccgaattatcggaagcaaggtaaaatagaagcattgaaagcggctcgtgaaaaggcctcttatcttgtggaagcgatgggacaaaaactgggtgaggtcattcgtatcgtcgaacctgcttcgagctatgtaagtccttatactctttttcaggcacaaagtaatgtcagtatgggatcggctgccaccgagcaatatcgtgttatcaaactacgatacgagatgacggcccgttttgctattgaataataatgaatgaggcgaaaatacccacaagaaagtattttcgcctttatgattactcataagagagtactacaaaaaatactgtcacaatcttatttatggtagttttagcagatagacgtcatcaggagaaacgacttgtccgtcagtatacagtttccagtctgtgattagtcgggtggggtaagtaccgacagagccttcgtgcatatttttaatataatatggttcctgaataagca

SEQ ID NO: 1091 - DNA, 24581 bp, synthetic construct
  source 1..24581: mol_type = other DNA
  misc_feature 1..24581: note = Synthetic
ttgcggcaatcaatttggtgtcgtagtttgcgaatgtggcaacatcatgtgctcagacggtcaaactaccgcttgtccgtggtgtggaatggaaggttctttaggagcaatcggtgatggcggtttggatataacacggggaagaggctgattatgaacattgaaaaagtaatagacctcctaagcaatggagaatccgatgaacacatgagcggcttcatcaaatattatgctaacaagctatgggctgaatataatgaatatcttatgaatgaatttgttgtgatagagaataaggtaaaagaactgcctatcgttatacctaatgcgtctatcagaaagccgtataatacgattgtatcaataccgtgcgaagaaatgaccgacataacattatccggtctcacagaagaagcgcaagggcttaaaattgagaagcaggaggatggcaagtcttttaggataagtggaactcccaaggaaagtggaacttttgatgtcacgttaagatacaaatatcgtggcttgtctgttgagcgtccttatctggaacgtatgttacaaattatcatcaatccagacccaagggatttatggaaagatattcctgtacccgaagatatggagtatccgaaagataatacggcaaaagaatatgtaaaagttgctgcactttccgatggaactccacaaaaagatattgtcgctgcaagcaaaagaggccgttcacatgcacaagaaggtaagccacgtgatgacgatttccgtttgtatcatgacgaaaaaacgaattggtatgtcattgccgtggccgatggagcggggtctgcaccctattcgcgtgaaggttcaagaatagcttgcaatgtggcagttgagcattgtaaagaacaattggctgattctgaaaattttgatgatgacatcaatctctatcatcttgaccaaaaatcggaagcggcaggtaaggctattagtgcggatatatacaaaatcgtaggtaatgccgccttaaaagcgcataaggcaatagcggcagaggctcaactaaaaggtcgcaagaccaaggaatactccacaacattgttactgggcatctgcaaaaaatatgattttggttggtttgttgcttcattctgggtcggcgacggagcaatatgtctttacaaccaagcagataaaacagcaatgatgctcggtatgcctgatgagggtgagtatgccgggcaaacacgttttcttacaatgcctgagatattttcggattccaataaattctaccaaagaatgaattgccggattgttccggactttacagctttattccttatgacggatggcgttagcgaccccaagtttgaaaccgacgctaatttgaagtcttatgataagtggaatgaattatgggctgaccttaaagagaatggagtagaattaacggatgataatgaggaagctgcaaatcaattgttgaattggttggacttttggtcaccgggaaaccatgacgatagaaccattgcaatattgtattaaacgtaaggcataatggcaaataaaataactctgacagcaaatgacggaagtatcgttgagttttatgatgaaataaaagctcaaggtggggttaaggatgtttattttagtcctgacaaaacctatgttgtcgctttctatcgcaagccaatcaatgctaatgacagggagcgtatcaccaatattgttggtatctatcgccagcggattttcgatactccagaggggaattattggaaaaatctgtttgcatggcctacaaaaatggtagaatggaatggaaagacaggcataataatgccattttatgacaaaaagtttttcttctcctcagggccattcaaaggcaaagaaaaagagggaaagtggtttgcttccgctaaattgcgtaacaaatttttgcctgctgaccaaaaagggaattggctgaccaatcttcatatgtgtatcaagatagcacgtgctgtccgacggcttcacgcagcaggattggcacattcggatttgtcttacaagaatatactggttgacccgattacaggaagtgcgtgtattattgatgatgacagtttagttgttccgggcaaattccctcctgaggttataggtacgccagattttattgctccagaagtcattgaaaccaagcatcttgcattggatgataaacaaaggaaactgccgagtatctatacagaccgtcatgcattggctgtcctgatatatatgtacctgcttaatagacatccattaagaggcggcaaggtgaatgatgtcaatgacagtggacgtgatgaagaattgtctatgggtgcaaaagccttgtttattgagaatccaacagacaaatccaatagggttaaagcccaacaactatcccctgcagagttgccacaaggcgacccagcaaagatgccatatactatttgtggcccgtatctgaagaaattgtttgaccgtgctttcgtagaaggtttgcacgacccgtcaaagcgtccgagtgcagcggaatgggaagatgccttggtcaagacaaccgatttggtacagccatgtcagaatcctaattgtgacgccaagtggtttgtatttgacaacactaccaagcctaaatgcccgttttgtggccagccatatcatggacaattgccgatattgaatttttattatgctccctcacatggcaaattcatatcggaaaattatcgtttgatggtatatgacaagcaaactctgtacaaatggcacgcaaataatttagtatctccaagtgaacggacatctgaagctgacaaaaagcctgttggggattttcatttcttcaataatcagtggattctgataaatcgtaatcttcctgacatgatggatgttacggagaagaagcctatcgctataggcgaatatgtgccgcttacagaaggcaggcagatattgcttgacaaaggacagggaggacgacttattgttgttcaacttgttaacaattagaacgataatagccatttataaaatcacgaagcaatagatataaagcaaaatgaaaaaatcaatcgctctgctaattggtattgcattaattttattaggtacgttgacaagaggcaattgggttatcggactgaaactattatgtgccatatttctggttatgctcgtactttattggaaaatagccccctttaagcaacagctattccctaaatatcaaaaggcttttggcataacagaaagaatattcgtgagattacagaatatcttaggctttattcccaaaatacaaatggggcaacgtttgcagcttgacacttcgttgattgtatgtatcttttttacgcttttgatattagttgttttgtgaaaacattgactgtatcaaccaaacaggataaatcggaactaataatatggcaaagaagaaaatcgtaagaataccgggagtaagtttttcttggaaacgtgcgttgggcataacccaagcgaaacagaaatttgcccgtcaaaccggaataccaacatccaaggctggattggagcgtaaattaggaaaagctctactcaaagttttatttggcaaataattattaatcataagtttttcagtatatgcaacagaaaaagcattacattggcttgacagatgcagaagtcttggagagccgtaaaaagtatggagtaaacatccttactccaccagagaaagaaccgttatggaaacaatttctggagaagttcacagaccctcttatcatcattctaatgatagcgggcgttttgtccattggaatttctttttacgagtatttcggactcaatgaaggtttcactgtattctttgaacctattggcatttttgtggcaattttacttgctaccgggttagctttctattttgaattaaaggcggataaggagtttgccatattaaaccaagtgaatgatgacgaactggttgaagtcatacgaaacggcaatgcaactcaaattcccaagaaagatgtggttgttggggatattgtcatcattaatactggtgcagaagtttctgctgatggtgaactgctggaatgtgtcagtctgaatgtagatgaatccacgcttacgggagaaccgatgtgccataagagtgttgatgaaaaggattttgacccggaagcgacatatcctaccaatcacgttcttaaaggaactaaggtgatggaggggcatggtatattccgtgtgactgcagtcggggataaaacagaaaacggcaaagttttcgtagccgcgcaaattgatgacagtgtaaagacaccactcaatgaacaattggatgggttaagtgacctgataacaaaattaagctatggatttgcggcattagtagtcgtagggcgtttgctgatttactttttgggagacaactcaatggaatgggcacatattacggcatatgtactccaaacattaatgatagccgtcactttaattgtcgttgctgttccagaaggattgcctatggctgtcacgcttagccttgcatatagtatgcgtaggatgttgaaaacgaacaatcttgtacgcaagatgcacgcatgtgaaacgatgggagccacaactgtaatttgcacggataaaaccgggacactgacccaaaatcaaatgagcgttgaggaaactcaattctacggtttgactaatcaggcattggggacagatgaaacaagccgtttaataaaagaaggcattgcgcttaattctacggcatcattggatttaagtaatcctgacaagcctgtggtattgggtaatcccacagaaggagcattgcttttatggcttagaaaaaacggcattgattatcgtaagttgaaagaagatgctaatgtagtagaagaattgcctttttctacagaaaggaaatatatggcgacagttgttgagtccgcccaactgggaggaaagaaaattctctatgtcaaaggtgctcctgaaataatccgttccctctgcaagcaaatcgacaagaacgtgaatactgccgatattgacaaacaactgacagactatcaaaatcgtgcaatgcgcactttaggttttgcatatcaagtattgaatgacagcgatatggctatcgcagatggtaacgtgattgctgaaaaccttactttcatggggattgttgccattgctgaccctgtccgtaaagatgttccagcagccgtgcaaaagtgtatggctgcaggcattaatgtgaaaattgtaaccggagatactcccggaactgccaaagaaattggacgacaaatcggactttggactaaaaaggatagtgacagtgcaataataacaggaacggagtttgagaaactttcagatgacgaacttgataagaaagtgcttggattgaagattatcgctcgtgcccgtccaatggataagaaacgtttggttgaatctctgcaaagaaataatcaagtggtcgcagtgacaggcgacggtacgaatgatgctcctgcactcaaagcggctcatgtgggcttgtcaatgggtgacggcacttccgtagccaaagaagcctcggacattaccattatagataactcattcagcagtatttgtcgtgcagtaatgtgggggcgttcgctttatcaaaacattcagcgtttcttactgttccaacttacggtcaatgtggctgcatgttttatcgtgttggtgggtgcgttcatgggaacagaatctccgttgaccgtgacgcaaatgctgtgggtgaacttgataatggatacattcggtgctatggctcttgcctcattaccaccttcacaatctgtaatgaaagacaaacctcgtgaccgtaaagccttcatccttacaaaacctatgatgaaagacattctcggtgttggcggatttttcttcttgctgcttgttgtgttcctttatatattccagcacactgaaatcacgcaaatgacagacctgttgcattgcaagttcggtgaagccaatggattgtcaccatatgaacagactctattgttttcaatttttgtgtggacgcacctttggtatatgttcaatacccgttcatttgaaacaggaaaaagtttcttccaacttaagatgagcaaagagttctttactattgtcgccattattttcatcgggcagatagcgatagttgaagttctttatgatttctttaactgtactccaatgaaacttatagactgggtaataatagttgttctttcctcattggttctttgggcaagagaattatggcacttgttaaccaagagaggataaggtgtttttcagaaaagcaagcaaagaggatatgaggaataaacctatatcctctttttctatattcaggtcgcccgacttcggaggagcaaccaaacggcaaggctttcggggagtaacccgaaaggttttgagtaactcaaaacataccttgctgctgccacttttcggcagtaaccgaaaagccttcgggttactcgaaggacaccttgctgatttctcgtgaaatcaataatccgccagcaaacggattggaatttgtgctgttattctcatccttaaagcatcgtttcccgatgcccaagctgcctaaaagaagaaaggggatgagggcggtgtgcaagcctgcatcttattgagattacaggaaacaaagccggcttagaaacaggcaatagtgtcaattcgatgtcaatatgtgccaatcacagccaaaactgacattagactaataaggaaatgctattttgagcaaatacatcctcgcttgtttacaagctcagcgaaccaatggtttgctaaaacaatgaagaacagaacccgacaaccaagaaagtaattcaatgcagataggaagcaacatagtttcaatgatatgctggtttgctgttgtgctggtttacaacagcgaaacttcaaataaaggtatcagcaatggaatgtggctttagagaggtggagtttgaatgatataaatcggtggtacaatacatccgtctatcaacgtagtaatgaagcaacaaaagaatggtgcaataaacaaaagcatataggaatacgcacgctggcctgcaagcctgcccgcgctccaaccgacctgccgtcctgcttgcctgccgaccggtctgccggcgtgcctgccggcgtgcctgcctgccggcacacagacaggcaaacctaccaacaggctatttgcaaatgggcaggctcaaatataatgtggaaacggtatggaattaaaagcaagacagtgctaccgattttcatcaccaagatgtgcaacaaatgtacaataatgataagatgtttgattttctctatttttcagaggaatagctttggcaataaggaagaaaaacactacttttgcaaatgagagaagcgttcttttgattgatgcagaacattgcagaatagagaagcccgctggtttccaaatcgttagctgttaagctgacaatctttgtaagttccttgttttcaatgggtaagaagaattgatatgtcttgcgcaatgccagcttatgtgcttatctatcccggctcttttcacccaacgcttgacggatttgcagcaactttcatacgaaggcaggttgaagatgagagcgtctttgttaccgtctgccggcggttttcccacaagcgaaagaagaccgtcattgagcggaatgaccacaccgctactggcggaatgacctttggtcttgttctgctcaaattttagcagcttattagcgtagtcgatattcttataggtaaggtctttcacatcacagaagcgcaagccacaatacaggcaaaagataaacgcacgccttacgttggggttctcgttgtcataatggcacgcaatcaaccgctggatttcttccggcgaaagcacgtccttgcgtagtatctggctatccgccttgcaggtaacgcctttgcaggggtctttcagcatcacatcgtggtcaatcgcatagtggataaccttcttgaaacgctggaagatgcttttagccccttcgcccacgctccgggattgcagataagctacgaactgttccatcatgtccttcgtgataagttccggcttgatgccgaactcgtgcatcgggtaatgctccttcaaaaagtccttgaaacggcttagggcgatttgcaccatccgaatgtctttcttggtgtagtcattgatataggcttgaaaataatccaagaaattcacgttccggtcttttttcagacggtagcccaacatactttccttaaactcctgttcacgttcggtacgtatttttacagcaagctccagtgtttccttgttctgctggcgttccgcaggggtacgtggcttctctatcagatacaggctgaggttctcttttcgcctgtgatgcttgatagcgaacttcggctttccctgcatcttaccgctttcataatacacctgattaccgttttcatccaatacaggcttttcctctctacccaaataatactccagatacaaactaattctgccgtccgacagcctgttttgctccaatttagggttttctttcgttttattttctaactttgccattgtttagaggttttatcccgatttagataccgtaaccgggtgattacgctaaataattgattttcttttgtttttcgatattgcaaaggtacaaaagaaaatggaatttcaaagtgtactaaaagtgtactgaataacagaaaatgggcaaaatatggcaaaaatggagaaaataagaaagatgcaaatgactgataataaggaagataaattcttttattttcctatgatttctatgccttgtaccggctctgggtacaagggaggagaaggacggttgtctttctcctttttctttttgcatattggcgaccggttgccggcaagtctcttgccgacatgcgttttattataacattatggggctgtttagctttcatgaacgttcgtcaacacacgctggagatacaatctataacaaaacgcggaatgtatgcttacaatccgaaaagccgccttttggactgcaaaaggcggcttttcgcaagccaattggcggcctttcgcaaggcggaatacggcctttcgtaaatacattacagcactaaacggacgccgaaacgcagcgcaacattatttttttgacgcaaaatcgaaaaaagtctggctgtgacttgatttttcacctgctgacaagtaactttgcagaaagcaggcctgaccgtcagacagcctgaccgccacaccaagccatacagggccgtggctgcctgcaaaacgcattgatacagaagggaacaccattcaaggactgaacttcatagccatcgacttcgagacggccaccggccggcgcgcctccgtgtgcgaggcgggcatctgcgttgtgcgccacggccgcattgcggagacgcgctcgtggctcgtacgcccgccgggcaatgtgtacagctaccgtaacgtgcagatacacggcatacggccggaggacacggagcggtcgcccgagttcccggaggtgtgggccgaaatatcggaatacatcaaagagtgccccgtgctcgtggcccacaacgccgcgttcgacatcggctgcatacgcagctcgctcgagctgtacggcatcacgaagcccgacgcagcctactactgctccctgcgcgccgcacggaggctctacgacttcggctgcaacacgctcgaccatctctgcaaccagtttgaaataacctgcggccgccaccaccgcgcaggcgacgacgccgagatgtgcgcccgcctgttcctccgcgaggtgaaggatgccggctggccgcagctggaagagatgggcttttgcagcggaaggctgtaaaataagaacattatgacttgcagtttgtgataattcactacctttgtaaatgacaactgttaaaaaaaagacataccatgaaacagatacttgggcttgaccttggcccgaacagcataggctgggccatagtgaatgagaagtatgacggcgtaatgccggaagtagaaaaacatcttgaggcttgcggaagccgcataatacccatggacgccgccatacaaggcgactttgagaaaggcaactcggtgtcgcagacggccgagcgcaccggctaccgcggcatacgccgcctgcgcgaacgctgccttttaaggcgcgaacggcttaacagggtgctcgacgtaatgggattcctgcctgaacactactcgaccgcgctgacacgctacggcaagttcaaggatgccgacggctgcaagctggcttggcgcaagggtgaagacggacgttatgagttcgttttcaaggagtcatacgccgaaatgcttgccgacttcaggctgaaccaaagtgcatggctcgctgacggcgcgctcgtgccttatgactggactatctactacttgcgcaagaaggcattgacgcaagccatcagcaaacaggaactggcgtggctgctgctgaacttcaaccagaagcggggctactaccagctgcgcggcgaggagaatgatgaagacaagagcaagcttgaggagttttacgccctcaaggtagtcgacgtgagggacacgggagagcgtaagggcaaggacacgtggtatgacatcgtgctggagaacggcatggtgtaccaccgcgccgctccggctccgcctgactggaaaggcaaagtgaaagagtttatcgtaacgacgcagctcgacaaggacggcaaccccaagctcgacaaggacggaagcgtaaagcgctcgctccgtatgccgggcgagaacgactggaccctcgtgaagaaaaagaccgaggcggacatagacaattcaggaaagaccgtaggcgaatacatctacgacgccttgcttgtcaacccaaaacagaaaatcaagggcaaactcgtgcgcacgatagagcgcaaatactacaaagaggagctggaaaagatactcgaagcgcaggcccgcttcatcccggaattgacagacgacagtctctataacgcctgcataaacgagctttacccctcgaacgatgcctaccgccactccatcgagaggcgcgggttcacctacctgtttatcgacaacatcattttctaccaacgaccgttgaagagcaagaagtcgctcattgacgactgcccctacgaatcgcacgcttacacggacaaggaaacgggcgaaaggaaaaccgccgccgtgaaatgcgccgcaaggtctaaccctctgttccaagagttccgcatgtggcagttcgtttcaaacctccgcatattccagcgtgagaaagaggtggacggcctgctgcgcaccgacatcgacgtgacgggcgagttcataagctcgacggacgacgtaataaagctgttcgactggctaaatgaccgcgagaacataacgcaagacacgctgttcggctcgtatttcaagataaaaaagccgaaaggcaaggaaacaccgtacccataccgctggaactacgtagaagacaaggcctatccctgcaacgaaacgcggggccttatgctgaaacatctcgacaaggcaggcgtagacaaagacgtgcttacgcccgaaacggagatgagcctctggcacattctctattcggttgaagacaagcaggagttgcaacatgcgttgactacattcgccgggaagcacggtcttggcgaagaattcgtagaggcgttcgccaaattcccgccgttcaagaaagactacgcctcttactctgaaaaggcgataaagaagctgcttgcgcttatgcgcatcggtcgacgctggagcgaatcagacatagacaagaatacgagggaacgcatagagaaactaatcaacggggaatacgacgaaagcataatcgacaaggtaagggagatgacccagagcatgacaagggtggaagacttcagcggactgccgctgtggaaggcctgctacgtggtctacaaccgccactctgaagccaaagaagttgtaaaatggcgcactcccgacgacgttgacgaatatctcaggcacttcaaacagcactcgctgcgcaacccgatagtagagcaggtggtgacagaaacgctgcgcaccgtgcgcgacatctggcgcatgtacggcaatattgacgagatacacatcgagatgggccgcaacatgaagcagaccgccgagcaacgcaagaaggccacacagctgataaccgacaacgagaacgccaacataagggcgaaggtgctgcttacagaattcatgaaccccgacttcggcatagacaacgtgcgcccctactcgccgagccagcaggaactgctgcgcatctacgaggacggcgtgctaagcagcataggcgaaatagacgacggcataagcgagataataaagaagctcggcgagaccgacgagaagaaacggccgtcgcgctctgaagttctgcgctacaagctgtggctcgaccagaagtatcagtcgccgtacacgggcaggttcatacccctcgcccgcctgttcaccaccgactaccagattgagcacatcataccgcagtcgcgctatttcgacgactcgttctctaacaaggtcatctgcgagtcggcagtcaacgctttgaaggacaaaatgctcggcatggaattcatcaaggaaaagcacggacaaatagtaagccttggcaacggctccgacgctacgatactaagtgtcgaggaatacgagcggctcgttaccaacgtctataagaataaccgtgcgaaaatgcgcaaactgctcatggacgacatccctgacgacttcatcgcacggcagctgaacgacagccgctacatcagcaaactggtgaagacgctcatgtcgaacatcgtgcgcgaggacggcgaggagcaggacatatcgaagaacgtcataaccactaacggcacgataaccgacaggctgaagaaagactggggcgtgaaggatgtgtggaaccgcatagtgctgccgcgcttccgccgcctcaacgagcttacaggcacacgcaagttcacaacgacaagcgccggtggacacgagatacctgacatgccgcttgaactgcaaaagggattcaacaagaaaaggattgaccaccgccatcacgccatggatgccgtcgtgatagcctgcaccacgcgcagccacgtcaacctgctcaacaacgaggcggccatgtctggcaacaacgccaaccgctaccaactgtcgcgcaagctaagacgctacgaacagacggaaatcgtaaggaacggcgagagaaagacgattgaaacggcgcgcgagtttttgaaaccgtgggccacattcaccgccgacttggaaaaagccctgcaagacatcgtggtaagtttcaagcagaaccttaggataatcaacaagaccacaaacgcataccaatgcttcgtcgacggaaagaaaaccgtcgtacatcaagtgaaaggtgacagctgggctgtgcgcaagccgctgcacaaggaaacggtctacggcgaggtgaacctaagaagaatccgcgaagtgtcgcttaaagaagccatgaggcagcgtaaggccatagtggacaaagacatgaagcgcaaaatcaccgacttcgttaagctcggctatgacgagaagctcataaagacatactttgccggccacaaggacgcatggcccgacttcaacccgtcgaagataaaagtatattacttcacgcaggatgtcttgggaaaggatggcagcgtgaaagaccgttactttgcaacgcgaaagccacttgacacaagattcaaccgcaagcgcattgaagactcggtaaccgacacgggcatacaaaagatactgctgcgacacctcgagttgtgcggctgcgacaccgagcgcgccttctcgccggaaggaattgaagaaatgaaccgcaacattgtaagcctcaacaacgggaaacatcatcaaccgatatacaaggtccgtgtgtatgagaaggccgagaaatacgccgtaggcaaacgcggcagcaagtctacgaagttcgtagaggcggcaaagggcaccaacctgtttttcgccgtatacgaaaccgaggaaactgacaaagccacaggtctgcccgtaaagaagcgctcttacgccacgatacctctatatgaagccgtgaagcgagcaaaagagggcctgcccatagcacccgaaaacgcaaacggccaaaagcccacattcgtgctttcacctaacgacctcgtatatctcccgacgaaagaagaaatcgacaagggaacgataagcagaccgctggataagagcaggatttacaaggtggttagctgcacaagttcaagactttacggaataccttttagtgttgcaaattctataattgacaaatttgaatttacacaactaaataaattagagtttacggatttgaaagaatcaattaaagaaacctgcataccgataaaggttgacaggataggaaatattatagagataaacggaaagaaattatgattaagcgaacattgtgttttaccaatcccgcctacctttctttaaaagacagacagatggtaatccgcctgcccgaggtggagaagagcgacatgccagacgttttgaagaaagagagcgtaaggactattccagtagaggacatcggtgttgtggtgttcgacaacaggcagataacaattacgcacggactgctcgaggctctgcttgagaacaactgctccgtggttacttgcgacagccgcagtatgcccgtggggctgatgcttccgctatgcggcaacacagtgcagagcgagcgcttccgcgaccagctcgacgcgtcggtaccgctgaagaagcagctttggcagcagactgtcaaggccaagattgacaaccaggcggctgttctggccgcctgcgccggggcagagacgggatgtatgcgccggtggtcggccgacgtgcgcagcggcgaccctgacaaccttgaaggccgaacggcggcgtattattggaaaagcctcttcgccggcgtgccggggctttccgactttacgcgcgaccgccagggcataccgcctaacaacctgctcaactacggctatgccatcctccgtgcggtgatagcccgttcccttgtgtcaagcggactgttgcctacgctcggaatacaccaccacaacaggtacaacgcctactgccttgccgacgacgtaatggagccttaccgtcctttggttgacagccttgtgttctgtattgtcaacgagtacggcggcgacatgccggaggacattacgaaagaactgaagatgaggctactcggcatacccgtaaccgacgttaggattggcggcaaacgcagtccgctgatggttgccgccacccagacaacggcgtcgctgtacaaatgcttcactggcgaggcgcgccgcatagcctatcccgtaatgtaacgattcggcggcgtacgcgctgcgccgccgaatatccgccatatcaccttattatatattatgaccgaccgtttcagcgaatacaggattatgtggatacttgttttcttcgacctccctaccgaaacaaagagggacaagcaggcctatgctcttttccgcaagaacctgcaacgcgacggtttcacgatgttccagttctctatttacgtccgccattgcgccagcatggaaaacgcccaggtgcatataaagcgcgtaaaatcgtttcttccgaagtatggtcatgtcggcgtgctttgcataacagacaagcagtttggtgccatcgagctgttctacggcaagaagcctgttgagccaaacgccccgggacagcagctcgagttgttctgacttttttattgttatttaacagtccggttttgtcgcaatcctttatttccgcatcttcatgcgttatttatttgccgtaaagtttttgccttaaaacaaaaaatccggcatcagccggactttttgttgttagacaaccatcattttttattttctaatttattacgcatatcactgattttcaacatattatcaaaatcgtgatgtttgtcttagcgcaaagatacgaattttaaagcaaatcacaaccgtcattcggcaaatcgctgtaatgctccagatgtttgtcttagcgcaaagatacgaattttaaagcaaatcacaactcattcggcacgtgctcgacggcaaaaacggatgtttgtcttagcgcaaagatacgaattttaaagcaaatcacaactcggtatcatccgattgtacgctgttaaaggatgtttgtcttagcgcaaagatacgaattttaaagcaaatcacaactcgttcggcacgtgctcgacggcaaaaacggatgtttgtcttagcgcaaagatacgaattttaaagcaaatcacaactaaagagcgtcagtctattattgaccttcggatgtttgtcttagcgcaaagatacgaattttaaagcaaatcacaacgggaacgataaccgccgccagcaatcagaagatgtttgtcttagcgcaaagatacgaattttaaagcaaatcacaactggatatgcttggctattcgtctcgttggagatgtttgtcttagcgcaaagatacgaattttaaagcaaatcacaacttctcttgtagatagtctttattgtcctccgatgtttgtcttagcgcaaagatacgaattttaaagcaaatcacaactcagataccctctaagcttgctaatgtcatggatgtttgtcttagcgcaaagatacgaattttaaagcaaatcacaacataacgaagtatatgttaaaacaatatgacgatgtttgtcttagcgcaaagatacgaattttaaagcaaatcacaacaaaggagcaattacttctggcattggtagtgatgtttgtcttagcgcaaagatacgaattttaaagcaaatcacaacaagtcccgtcagtggaactctatcgttcaagatgtttgtcttagcgcaaagatacgaattttaaagcaaatcacaacgacggtgtaatatatcttgtggaacggctggatgtttgtcttagcgcaaagatacgaattttaaagcaaatcacaacgtagttcactacaatgtttccacccgtatgatgtttgtcttagcgcaaagatacgaattttaaagcaaatcacaactacgacggctttttcaagatacttggcatgatgtttgtcttagcgcaaagatacgaattttaaagcaaatcacaacataggaacatccgttgcatttgctgggggtgatgtttgtcttagcgcaaagatacgaattttaaagcaaatcacaacaagacttggcaggccgacattgaccttaaggatgtttgtcttagcgcaaagatacgaattttaaagcaaatcacaacattcgcaccatggataaaaaagaacttttggatgtttgtcttagcgcaaagatacgaattttaaagcaaatcacaacctacttcctcaccttcaaggcggtcaacgggatgtttgtcttagcgcaaagatacgaattttaaagcaaatcacaacggattgtaagagataagccaaacaaagatagatgtttgtcttagcgcaaagatacgaattttaaagcaaatcacaactcgtgttcagttgtaagtccaattgtgtgggatgtttgtcttagcgcaaagatacgaattttaaagcaaatcacaacctcgttgggacagaagttaggttctcttccgatgtttgtcttagcgcaaagatacgaattttaaagcaaatcacaactaaaatcagcaaaatccttgccatacgcaagatgtttgtcttagcgcaaagatacgaattttaaagcaaatcacaactggtagtaattctgcctatggttctgaaatgatgtttgtcttagcgcaaagatacgaattttaaagcaaatcacaaccaagaataataatatatttttggaaatgacgatgtttgtcttagcgcaaagatacgaattttaaagcaaatcacaaccatcttgaaagtttcaaatgtttggtagaagatgtttgtcttagcgcaaagatacgaattttaaagcaaatcacaaccaagatttgtagctatatcggcagcactctgatgtttgtcttagcgcaaagatacgaattttaaagcaaatcacaactaactcttgcttgcagccattataaaagtgatgtttgtcttagcgcaaagatacgaattttaaagcaaatcacaacatcgtctgcatacttatacgtctatcaacgatgtttgtcttagcgcaaagatacgaattttaaagcaaatcacaacgtaggtctgagtcttctcttaatcgtgctgatgtttgtcttagcgcaaagatacgaattttaaagcaaatcacaactaatatcggtatgtctccgttgttccttttgatgtttgtcttagcgcaaagatacgaattttaaagcaaatcacaacttaaattcataatttatctactctttagggatgtttgtcttagcgcaaagatacgaattttaaagcaaatcacaacggtagcattccaagaccaaacggctttgccgatgtttgtcttagcgcaaagatacgaattttaaagcaaatcacaacggtagcattccaagaccaaacggctttgccgatgtttgtcttagcgcaaagatacgaattttaaagcaaatcacaaccccccccaaaaaaaacaagaaacaaaaagcaagaagtatatttgttttttcacaaatatactaaaaagcggcataaaattttgtgtttcggatgtttttcactatcttagccgacagaattttaagcaaatcacaataaggattattccgttgtgaaaacatcaggttggcccgtcgtccttcaacggcgggcatttttcatcccaacagcagggcaatggaaaatccgcggaggctttctttcatgaggatagccaccgcggatttcgcgttttactgtatgtttcaccaccttccgccttacatcgcctcgggcagtttgacggccacgcagggcacgaggctgcggccgttgttgctgccgcggcctgcgttcttgccgaagccccagtgccaggagccgttgctctcggcggtctgtatgcaccagaagttgtggtaggtcgatgtctcgtattcgctcgaggtcatgtagattatcgagcctgtcgtggggaagattggctcgaggccgagcgcctcgacgggggcgttgacgcgctcaagaacggacgcgtccgtagaggtgtatatggagctgttgttctggctgatgtccacctccgtgtccccagtaaggcctgcctggccgaggttgttgagtatttgcagcatctggcctatgccgggcatgaaccatccgctcgtcaccgatgcgtctatcgggtggcgtgtggagtagtcgctgatggcctggaaggccgtgccctgcttgtcggcgagggcctgataggcgtcgctcgtccacatctgtgcggtcttccagtagccgtcgaggtcggccaaggccgacgcccagtcgtcaacgctcgggtttacggcatcggcgaagccgaacttcacgtccgtcacgcgctccactcccatggcgtaagcgttgtagccctcggccgcgtcgccctcgctcacctgcgtgctgaacaccacggcgattacgtccttggcgttgtcggcggtcaggcggtcggccttgatgaacgtgccatgcgacgtgaggtagtcgcccacgccgtagacgagcatctcctcggcgtcgcccgtaaggtcttcgcccgtgtcgccccatccggtcacgtagctgccgtagggcacaagaccttcgcttgtgagcctcatcgagtagacatactccttgcctgcctcgaaggcggcggcctccggcaggttgtaggcaaacgtctcgccgtcaatggcgacgcttaccagcggctcgcctgcctcggctgtgcccggggctacgattgccgacgccgacgcgcggtaggcgttgttcgccggcgagtaaggtgttatgtcggccttaacgccgtccacggtagtgactgtgccttgggcaaggtcggcggtgacggtggtgaggcgcgagggcatggtgaggcgcgcggcggtaaggtcgtagttgccggtcacgtcggttatgtgtacggtcagccgggccatcttgtgctccatcacgagggccgccctgccgcctgcgacggtcgtgaggggcgacatcatgaggtcgctggcgcggtagcctgcctcggccgactggtctgtctgcacgccaaactgcaccggctcgccgtaagtgtcggccgtccatagcgtggcggggctgtaagctgccagcgtcatgccgtcgtgcatggcagccagcagggcgtcaacgcctgccagcggctgcgctgccgacgccgttgcggtggccgtataggccgtggtgtcagcggcggtgacggccatcaagcccacctcggtgccttcttcgggcgcggccgtgccgtcgccctcggccacgcttacggtcagcgcggcctgcgtgcccgtatctccgccgcctccctcgccgtcgtcgccgcaggccacgaaggccggagctactgccagcagcgcgcaggccatggccgccttgagtgtagttaagttattcttcatgtctttcttgtcagttgtttgtaatcagtagcataaccgcctgtggttcaatgcgttgcaaaaggccgtcttttgcattgcaaaacatggcctttcgccgcgtgaaaggcggcctttggccgtgccgtttgccgcctttcgcatttcaagggttatcctgtgttctccggaatagccgtccggcaggctccgtcataagcatttgcagcccgtccgtgcaggcatagccgccttgctgaaacatggttttagcggattgcaaatccttatatcaagctccggcggattgcaaatccgccggaactgatggtgacgttgcaacttactcgacagcgggcagcttcacggcgacgcaggggatgatgctggtgtcggtctggccgttcttgttcaggccgcggccgaagccccatgtgctgaacacttttccgccttctccgtccttgttctttacctgtatgccccaaaggtattccttgtattctgtggatgaggccacgttcaccgcgccgccgtcgggcagcggagccgtaatgccgcaagctgtaaagtattcgttaaggttggttattgccgatttgtcttcggttttccaccattcgctgccatagttgccgctctcgacgggtgtgtttatatcgatggttgcgccgccaaggttgttgacaacctgtatcaactggcctatggccggtatgaaccattcagaactttccgcataagttatctcatgacttgtcctgtatgcctccaacatacccaacatggatgcaggctttacgtcctcgccaagtcctgcataagcttgtgatgcaagcatggcctccgtatgctcgcgtccgtcaaggtcggcgagcacattttcaaacttgtctacgctgccgacaatcacgtcctggaagctgagcttgcccttgacgcgccacagtcccattgcataagcgttgtatccatcctctgcgtcagtctcgcttacctgcttgctgaagattacggctactactttcgacttctggtcgtcggtgagttcggcgttctttacgaacgttccgtcgctaagcatgtagtcgccgatgccgtaaaccactgcttcctcgggctcgccggtaaggtcgtcgttgccgtcatcccagatatcgagcacgctgccgagcttcagctctaccgttacaggcacattgccgccgccgttgaactgcgcggtgtacgtatatttcttgccttcggcaaaggttacgtccttgttgagcttggccttgtactgcgtgccgtcagctgtttcgatgagcacaaagtctgtctggccgagcactgcctgcggaacgaatattgcgctggccgagaacgtcgtcgcgtcggcggcgaacttggccgcggttatctccatcacgttgccctgtgcgttgccaatagtgccttcgccaacgttcaccgtggtggtgccgaccacgttcatcacgcttaccgtagcccccttgaggtctactccgctctggccgacgttgaagtcgaggttgagcttcgtcagcttgtgcttgaagtccagctgtattgcgccggtggtcgatgccacgggattgccctccgagggcgtgccgagtatcaagtcggcagccaggtagccatcgtcggtgctctggtctgcgggcacggtgaactcgttttcgctgttcagctggcctgtccatgcgctgttgtagggagcgtatgcgtagattgacacgtcgccttcctcggggaagtacatcgttgtgccggtgaacgcgcccgcgccgtcggccgtcagcatgttgttgtcgccgttctcaatggccgtggcgttgctctgggcgaacacgccgacgtttacgcccttggcaatctggtcgtcctggagcgtctggctgactgaacgtgtggctacgctgctggtcagcgtgatgggcgtgcggccgtcgaggggctgcccttcgagcacgtcgtcgttcgaacatgacgtgaagcctgccgccatggtgagcgcggcggccagcgagatgaaaagttttctgtcttgcataatctttattgttttggttaaataaatcggtatagccagtgtcaagtgttagtttccatgccggctttcggttgcaaagatagattatgcgcgccgcatacaatattttatttgtttcatcggctgcccgatttgtatcgcatttgtttcatcgggctacgtttttgtaaaggggaaagacttaaaaggtgagaaggtgggaaagtgagaaggtgagaaaacagaaatataccgacttaattgaaataaagcaatattgttttctcaccttctcactttcccaccttctcaccttaccttgaaccagtcaacgtcaacgtggccccctgcggccttcgtggcgtagcagtagacggcgaagcgcgtgcctgtgaagaagcggcggtagtcgaagcgcatcttgaacgccggaccggcctgcgtccacgtgtcgccgtcgaggctgtaatataggcgggccgtgtccttgttcaggcggaagtcggcgtcgatgcgcaggtagaccgtaggctgcgcgagcggcgtgcgcatgtgttcggtgcggctgacggcggtcaccgccttgtccttgtcgcgcagagtgacgctctcttcggtcatcacgagatgcttctgtccgccctcgcagactaccgacagcagggcggcgtcgccgttgaacgcgctgaatccggccacgtcgccgtccttcatgccgctcacgtcgagctttatttccgccgaacaccgcggccctgccatgcgctgcgtcagcgtgttgggggcgaggaagatgttgtcaaccacgcgctgcgtggcaagccgcagccagcccggccgctccgtaaggctccatgcgtcatcgacggggttgtggttccactgccagcgtatgtcaagtttgtctttgtcgaaaccgtcgcttgccatgagcggcacggccttttgcccctcgacgggcttcggcatcacggcgggcacgcgccccgaggcgtcgcccagcatgggccaaccgtctttccaagtgcacggcatgagtgtgagcacgcggcctacggcgttgcggtcctggaaaataacgccgtaccagcggccttccgtgtcgtcaacgatgcagccctgcgccacgtacgggaagtcggcaaagttgtcttcgaggattacgcgcttctcgtaagggccggtaatcttgtccgcccggtagcacacctggcggcggttgccgtccttgggccacgaaatcatgagcaggtaatacttgccttggtactttatggcgcggctgccttcgagcaggttgttctccgacgcgtcacgctcaaagattttcatgtcaacgcctccgggcttcacgccggtaaggtcgggcttcagttcgcgcagctgtcccgtgccgtagaacatgtaaacacggccgtcgtcgtcgaagaagagggacgcgtcgtggaagtgaggcaggcgcgagtgcagcgtccagccgcggcgcgggtcgcgtgtggtgtagacatagccctgccaaggctcgtcgttgggcgagaagtaggcgtagaacgtgccgtcatggtagcgcagtgacgtggcccactggccgcgtccgtaggccgttccctggcgcaggtcgtagcgcggggtgtcgtcgaggcggtcgtagatgtagcttacaatctgccagttgacaaggtccttagagtgcatcacgggcgcgccgggggtgtagaacatcgttgtgttgaccatatagtagtcgtcgcccacgcggattacgtcggggtcgggcgtgtcgagccacatcacggggttggcgaaggtgccgtcgccaaggtcg

SEQ ID NO: 1092 - DNA, 24581 bp, synthetic construct
  misc_feature 1..24581: note = Synthetic
  source 1..24581: mol_type = other DNA
atttgattgtaaagttgttaaagttcatatagtttctcctttcttttatcttgttttagggtgtcgtccggagtaggggaattaccttgtccgttgcacgacgctaatagattctcaaaatctttgccaatgtcggaaaagaaggtaaaactgtctaattgtcagtgtgttaaggctttattctgcaaaaatgtcctaaagaaaggaaagagactgcaaaaatgtcttatgtaagtcgggatatagtaggaaccggaggaaatacagagttgtgcaaattgattttattaccttaaagctattggggaattggataagattgtcggtatggaatcggataataaaaaaaggcatagttgactatgcctttgtgagccgaaagcgggactcgaacccgcgacttactcattacgaatgagttactctaccaactgagttatttcggcaatatcggtaactgttttgtcgcccgatcgtgatgcaaatttattgttttcttttcacaagcaaaaaggaatagaagttttttttgagaaaattgcttgttctgtttttttatggaatatatatgcagaaagccgtttgaagaaaggaaataattattctgatatgaataattttaaaaaacatatataagaatatgccaagtaattcgtatatttgcaccccgaatagtgatgtggcataatctgatgtatagtttggtgaaacatataaaagggcaaagtgcatatcctggaagggacatttttaccgcacttctgcaggcaaaaggaaacgggcagtcaagtttcgacctctttccctttggtttttctcttttttaccatcctgtcaatgtcactctttttttttgttccttatcgaacttaatttgtaatttgtttatactaactgacacccggaattgctttcggcatatccgggcgtcttttcatatatacgtatggaaccactaaagcatgaatgtggagtagtcatgattcgactgctcaaaccgttggattattttcagaagaagtacgggacttggatgtatggtctgaataagttgtatctgctgatggaaaaacagcataaccgtggacaggaagctgccggacttgcttgtgtgaagttgcaggcaaatccaggtgaagagtatatgtttcgtgagcgtgccttgggagcgggagctattactgaaatttttagtgccgtgcattccaattttaaagggcttactccagagcagatgagtgacgctgaatatgctgagaagtgcttgccttttgcaggagagttgtatatggggcatttgcgctattctactaccggaaggagtggtatttcgtacgtacatcctttcttgagaagaaataactggcgtgcaaagaatctgttgctttgcggaaactttaacctgaccaatgtggatgagattttcgaagagattactgctgctggtcagcatcctcgtaagtatgccgatacttatatcatgctggaacaggtgggacaccgactggacagagaggtagagcgactgtttactgagtgtaaggccgaaggactggaagggatggatattactcatgctatcgaagaccgtattgatttgacgaatgtattgaaaacatcgagtcctaagtgggacggaggatacgtaatctgcggcttgacaggaagtggggaaacatttgctgtacgcgatccttggggtatccgtccgggattctggtacatggatgaggaaatcatggtattggcatcggaacgtccggtaatacagacagccttgaatgtgccggctgacagtattcacgaattacaaccgggacaggctattctgctgaataagaaaggagagatgcgtttggctcaaatcaatgaacctaaacagaaaaaggcttgttcgttcgagcggatttactttagccgcggaagtgatatggatatttatcgcgaacgtaagttgttgggtgagaaattggtaaatcctatcttgaaagctatcgactacgatgtggtccacactgtattttcgtttattcctaatacggcagaagttgctttctatggaatgctggagggctttgataactatctgaacgaattgaaagtgcagcgtatagaggcattgggacataagcccagccatagcgagttggaacagattctttctcaacgcatccgtagtgagaaggttgctattaaagatataaagcttcgtacgtttatttcagaaggtaatacaagaaacgatcttgctgctcatgtatatgatattacttacggaagcttgattccttatgaggataatctggtcattatcgacgacagtattgtgcgaggtactactttgaaacaaagtatcatcagcattctcgatcgtctgcatccgaagaagattgtcattgtttcttcttctcctcaggttcgttatccggactattatggaattgatatggcaagtatggagcagtttattgcattccgtgctgctatcgcattgctggaagaacgaggtatgcagtcggttattgaggaagtataccgtaagtcgaaaggacagctttctttaccgaaagaacagatggtgaattacgtgaaagagatttatgctcctttcaccgatgaggaaatttcggcaaagatggtagaactgcttactccggcaggtactcaggcaaaggtggaaattgtttaccagacattggaagggctgcatgaagcttgtccacagcacgaaggcgactggtatttcagtggcgactatcctacgccaggtggagtgaaacgggtaaaccaggcgttcatcgactatgtagagcaagtctatcagttctgatgaatgtaaataagtgaagaataataaatttaaacgatatattagtattataataaggtaatgagaaatgtaacattaatcctcgacgacgggagccgtttccatggcaagtcgttcggttatgagaaaccggtagccggtgaagttgtgtttaatacagcaatgaccggttatccagagagcttgaccgacccttcgtatgcaggtcagttgatgactttgacttatccgctggttggtaactatggtgttccaccgtttacttttgaagctaacggacttccgactttcatggagagtgaaaaaatccatgccgaggcaattattgtcagtgattatagtgaaaaatacagccattggaatgctgtggaaagcctggctgactggttgaaacgtgagcaggtacctggtattacaggtattgatactcgtgaactgactaaggttttgcgcgaacatggggtaatgatgggaaaaatcgtattcgacgatgaaccggacaatattcctgaggctgcatatgccggagtaaactacgtagacaaggtttcttgcaaggaagtgattcgttacaacgaaggtgaaggcaagaagaaagtggtgctggtagactgcggtgtaaaatcaaacattatccgttgccttttgaaacgtgatgtggaaatcatccgtgtaccttggaactatgacttcaactctttgcagttcgatggcttgtttatctcaaacggtccgggcgaccctgatacttgtgatgctgctgtacagaatatccgtaaggcaatgcagaacgaaaaacttcctatcttcggtatctgtatgggtaaccagttgctgtcgaaggcaggtggtgctaagatttacaaattgaaatatggtcatcgcagccacaatcagccggtacgtatggtaggtacggaacgctgcttcattacttcacagaaccacggttatgcagtagacaacaatacattgggagcagattgggaacctttgttcattaacatgaatgacggttcaaacgaaggtatccgtcataagaagaatccttggttctctgcacagttccatccggaagctgccagtggtcctactgataccgaattcttgttcgatgagtttgtaaaattgttataagtttgttggtttgttagtttgatagtttgttgatgcaaactgaaaaactcaaaaactgaaaaacttgaaaactcacactcaaacttaaactcgcaaactcaaaaactcaaaaacttaaaaactcaaattcatgaaagaaaatataaagaaagtattattgttaggttctggagcgttgaaaatcggtgaagctggtgagttcgactactctggttctcaggcattgaaggcgttgaaggaagaaggtattgaaaccatccttatcaacccgaatattgctaccgtacagacatcggaaggtgtggcagataagatttacttcttgcctgtaactccgtatttcgtagagaaagtcatcgcgaaagaacgtccggatggagtattgctgtcgtttggtggacagactgcattgaactgtggtgtggctctgtataaagctggtgtattcgaaaaatacaatgcgcaggtattgggtactccggtacaggctatcatggatacagaagaccgcgaacttttcgtacagaagttggacgaaatcaacgtgaagactatcaagagtgaggcggtagaaaatatcgaagacgctcgtcgtgcagcaaaagaactgggatatccggttattatccgtgctgcttatgcactgggtggtctgggttctggtttctgcgacaacgaagaagaactgaacgtattggctgaaaaagctttctctttctctccacaggtattggtagaaaagagtctgaaaggctggaaggaagttgaatacgaagtggtgcgtgaccgtttcgataactgtatcactgtatgtaatatggaaaactttgacccactgggcattcataccggtgagtctatcgtaatcgctccttctcagacattgaccaacagcgaatatcataaactgcgtgaactggctatccgtatcatccgtcatatcggtattgtgggtgaatgtaacgtgcagtatgcgttcgatccggaatcggaagattaccgtgtaattgaagtaaatgctcgtttgagccgttcttctgcattggcatcaaaagctaccggatatcctttggcattcgttgctgctaagttgggattgggatacggtctgttcgatttgaagaactcggtaaccaagactacttctgctttcttcgaacctgcattggactatgtagtatgtaagattcctcgttgggacttgggtaagttccacggcgtagaccgcgaactgggttcttcaatgaaatcggtaggtgaagtaatggctatcggtcgtacattcgaagaagcaatccagaaaggtctgcgtatgattggtcagggtatgcacggctttgttgaaaacaaagaattgcagattgccgatgtagataaagcattgcgcgaaccgaccgacaaacgtatcttcgttatctctaaagcgatgcgtgccggctatactgtagaccagattcatgaactgactaagatcgataaatggttcctcgataaattgatgaacattatgcagacttcaaaggaactgcatgaatggggaggaaaccatacacagatagcacaacttccgaaagatttgctgtacaaggcaaaacgtcagggattctcagacttccaggttgcacgtgccatcggttatcaaggcgatatggaagatggaatattggaagtacgtaactaccgtaagagccagggcattgtaccggtagtaaaacaaatcgatactttggctgccgaatatccagctcagaccaactatctgtatctgacttatagtggtgtagcaaacgatgttcactatttgggcgaccataagagtatcgtagtattgggttctggtgcataccgtatcggttcgtctgtagaattcgactggtgtggcgtacaggctctgaatactatccgcaaggaaggctaccgttcggtaatgattaactacaacccggaaaccgtatcaaccgactatgatatgtgtgaccgtctgtatttcgatgaattgacattcgaacgtgtaatggatatcctcgatttggaaaatccgcacggtgtaatcgtatctactggtggtcagattcctaacaaccttgctcttcgtcttgatggtcagaaaataaatatcttgggtacttctgccaagagtatcgataatgcggaagaccgtgacaaattctcggctatgctcgaccgtatcggtgttgaccagccagaatggagcgcattgacttcgatggaagatatcaacgcatttatcgaaaaagtaggattcccggtattggttcgtccgtcttacgttctttctggtgctgccatgaacgtatgttctaaccaggaagaattggaacgcttcctgcagttggctgccaacgtatcgaagaaacatccggtagtagtaagccagttcattgaacatgctaaggaagtagaaatggatgctgtagcacagaacggtgaaatcgttgcctatgctatctcagaacacattgagtttgccggtgtacactctggagatgctacaatccagttcccaccgcagaaactgtatgtagaaactgtacgtcgtatcaagcgcatcagccgtcagattgcaaaagaactgaacatctctggtccgttcaatatccagttccttgcccgtgaaaacgatatcaaggtaattgaatgtaacttgcgtgccagccgttcgttcccattcgtaagcaaggtattgaagattaacttcatcgaattggctacgaaggtaatgttgggcctgccggtagaaaaaccaagcaagaacctcttcgaattggattacgtaggtatcaaggccagtcagttctcattcaaccgtctgcagaaggccgaccctgtattaggcgtagacatggcttctaccggtgaagtaggatgtatcggtgaagatacttcttgcgcagtactgaagtctatgttgtctgtgggttaccgtattccggaaaagaacattctgatgtctacaggtactccgaagcagaaagtagaaatgctgaaagcggctcatgaattgaaggcaaagggttacaacatctttgctaccggtggtacttctaaattccttgcagaaaacggtgtagaaaatacccgtgtatactggccaagcgaagaaggacatccgcaggcattggaaatgttgcataacaaggaaattgatatggttgtcaatatcccgcgcgacttgtcggcaggtgaattggacaacggttacaagatccgccgtgcagcagtcgacttgaacattcctttggttacaaatgcacgtctggcaagcgcctttattcatgcattctgtaccatgacaatcgatgacattgctatcaagagctgggaagaatataaataatccttccttttgataaggcattgaatatatagcgcccgcagacttcttcgtgaggtttgcgggcgctttttgtttaactaatggggaggaacaagacgatactttataataggacttattaaaatcctgcaatccgcattgtatctgtaattcttgaatcatctcatattattgcgtttttggggtacattccactgtatagaatctgtcttggaaagaagaaaagacatatcatcattctataatattttttatcagactatttaaaaatcaatatattttttttaatttagagcattgataatgaaaacctgaaagagtatgaattaccttagtctgattattatgttactggtagcagcgattcttgtaattgctggaacagccatagtgaaacagccccaattgctgtccaattatcattcgtttacggaagaagaaaaggccagtcctgcttttcaccgttatctgaaaagtgtccgaaatataatgattgccatagccattgccttagttggaggagagtggctttctaaatggtttgattcaaatttctatagtatcctgtcgatattgggtgtatgtatattgcttttgtatttgctttatgtacaaggcaagatatccagtcgtatgaaacggaaaagccgtatctatggtattttcgtctttgtattaattgcggggcttattattcttcctctgtgtcgtggaacatctgtcagctatacgaatgaaaccctacgtatctcgggtatgtatggaaccgagataccacataccgaaatacgtcgtgtatcgttagaacagacattaccggagataacctggcgtaccaatggcttgtcggtgggagatgtaaagaagggatattttcgtactggcgatgataggaaagtaaaactctttcttgcatcagataaagctccttttctgcatgtacagactatatggaatgaagatatttatatcaattcatcccatcctgaagaaataaggaaactctatctgcagatggaaggaaaatattcgattcgttaggtaaagattagggagtaaaagataaccccttcctttcttttttatatgaaaagaaaaagccaatcgttttgtcgtaacataaaacgattggctttctttattttcggtctctttgttcttttagaaaagtatctgtatcaacagcagtcccacagctatggctacaccagtagaaatcagtcctggcatcatgaacgaatggttcagaatatactttccgatgcgggttgtaccagtactgtcgaagttgatggctgctactaccgtaggataattagggataaagaagtagccgtttactgcaggaaacagtgctatcagcagcaaaggagaaattcccagtgcaatacccaaaggtactacggcacgtacggttgcagcctgactgtaaagcaagatagacattacaaacaaggctactccaaagagccaaggcatggaatgaatcacctgatcgatggtagatgtcagttgttcgatgttaccggaaataaacgtatctcccatccatgcaataccaaagattgcaatgacggcctgcatgccggcagggaatatattgccttgtacagccttgataccatcaatacggcatactaacaggatgatagccgccgtacataacatgatgatttcaatcagagccggcatatcaagcatggttatctttccatcgtgcataaaggtagggcgaagtgattctatagacccaaacagtacaatcaggaaagtagccagcaagaagataaatacagaaaggcgtgctttcttcatattctgtatttcactagtctgtacagaactgtttttaatgagtccttctttcagtcgtcttaaatactccgggtcatcagacagttcttttcctgttcggagtgaacagaatgctcctaccagcactccgatgaatgtggcaggaatactgattttcagaatatcaaataaggtaagatcaaacccggataggagtcccaatagggctactgttgcagccgatataggactggctgtaatagcttgctgggaagcaataacagcgatacccaatggccgttccgggcggattttggtttctcttgccacttcggcaataactggcagtacagaataggcaatatgtcctgtaccggcaataaatgtaaacaggtaagtaacgataggacttagaatcgttacgtgttcgggatggcggcgcagaatacgttcggctattttcaccatgtactccaaacctccggcagcttgcatgcacgatgcagcagtaactacagccgcaatcatcagcattacatcaatgggaggggtggtaggttgaatgccaaatacaaaagtcagtactgctactcctagtccgcctgtgactcctagtccgacacctcctaaacgagctcccaatacgattgctcctaatacaatgattaattgtaataataacatacagttgtctttttcttgaacttgtttttgtgaggttgcaaagttacttattttgcctgaattgctaaagtgattgtagttgaattgagggacaaaaagaaagcgacctttttcaagaccgctttagatgttttcacaacggaataatccttattgtgatttgcttcaatttaatattgcaaatatataaaaataatttgattattagtatattttgtactcattttttatctttgaaaaaattagataaaagtattattatgaaaaagattctggggttagatttaggaaccaatagtatagggtgggcggttattaattcgtctgtagatatagaaggtaaagaacaattaaaaaagatttctgcttctggaagtcgaataataccaatggatgcagctacactgggagattttgataaaggaaattccaagtcacaaacagccgaacgtactcggttacggggagttcgtagattattagagcgtagtttacttcgtagagagcgtttacttcgtgtattatctgtgatggaatttttaccagaacattatgcttctcaactaaatcgttacggaaaatttatttcaggtacagaacctaagttagcctggtataaaacatctgatggtagatatactttcttatttcaagactcgttttctgaaatgttatcagattttcagtctcatcatccgcaattgttagaaggagggaagaagataccatacgattggactttatattatcttcgaaagaaagcattgttcgagaaggtaaccaaagaagagttagcttggattctattaagttttaatcagaagcgaggatactatcagttgcgtggagaggaggaacaagaagatgataaaaaacaggtaaagtactatgctttaaaagttgtttcggtagaagattctggcgaccgcaaaggaaaggatatctggtataatgtatatttggaaaacggttggaaatatcgtcgtgcaagcagtattcctttagactgggttgggaagattaaagagtttgtagtcacaacagaattggatgatactggaaatctgaaaaaagataaggatggagaagtgaaacgttcattccgtgcaccgaaagaagacgattggggattgttgaaagccaagactcaagagcagattgatcaaagtggaaaaacagtaggtgcctatatctatgactcattgcttgatactcccgagcaaaaaataagaggtaaacttgtacgtacgattgagcgtagatactataaagatgaactttatcgcattttgaagaaacagcaggagtttcattccgaattacgtgattcttctcttcttgcagcttgtatagaagaactttatcctcataatgaagttcatcgaaatatattgtatactcaagattttgcatattttttagttgaagatattttattttaccagcgtccgcttaaaagtaagaaatcattgattgatgattgtccttacgaatcgcgtgtatataaaaaagaaggggctttatgtaatgttccgttgaagtgtgttgcaaagtcacatcctttgtatcaggaatttcgtttatggcaatttatttctaatttgcgtatttaccagcgtgaaaaaacagttgatggttcgcttaaaacagatgtggatgtaacaggagattttttgaaggacgagaatggttatgtagctttgtttgaatggctttatgaaaggaaaaatgtagatcaaaaagctttgttaggctataaaccatttgggataaataaaaaagagcagacagcctatcggtggaattatgtggaagataaatcttatccatgtaatgaaacgcgtgctattattaaagcaagattagaaaaggctggtgttaaagatagcttcttgacaaaagaaagggaagaagctttatggcacattctgtattctatatctgataaacaagagttgttgaaggcattagctactttttcagataagcatggattagataatgctttcgtagaagcttttgctaaaattcctccatttgagaagagttatggagcatattctctgaaagcattgaaaaagttgctatcgttaatgcgtatggggaaatattggaatcaaaatgctatagatggtaagacgtgtgagcgaatagagaaaattttaactggggagtatgatgaaacaatacgaaatagagtacgtgaaaaggcgatgcattttactgacttatcttctttcagaggtcttccactttggttggcatcctatgtcgtttacgaccgacattcagaagcaaaagatattgccaaatggaaaactccagaagatattaatgttttcttgaggggatttaagcaacattctttacgcaatcctatagtagaacaggttattacagaaacattacgtacagtgcgtgacatttggaaaaaagaaggtcaaatagatgaaattcacgtagaacttggtcgtgaaatgaaaaatcctgcagataagcgtaagcagataactgctcagattttggaaaatgaatatacaaatttgagagtgaaagccttacttacagagtttatgaatcctgaatttgaaatagagaatgtacgaccttattctcccagccagcaggaaattttacgcatctatgaagatggtgtttttgccggtatttctgataaagaaattccagaagacattgcctctatattgaaaaagtttaaagatagcgatgtgaaaaaatacccttcccgttcggaagtattacgatataaattatggcttgatcagcgatatcgttctccttatactggtagaatgattcctttaggaaaactgtttactgcggaatatgagatagagcatatcatccctcagtcccgttattttgatgattcgtttactaataaggttatttgtgaatctgcagtcaataagttgaagggtaatttacttgggtatgaatttattaaaaaacattcaggtcagattgtagaattaggtagaggagatgttgttcctgtatttactgtagaacagtatgaacggtttgtaaaagaatcttattttaataatgcgaagaagaaagagaaacttttgcttgaagaaattcctgatagtttcattgaacgccagttgaatgatagtcgttatatcagtaaagtggtaaaatcgctgctgtcaaacattgtgcgggaggaaggagagcaagatgctgtttctaaaaatgtaattgtatgtacaggaaaagtaacagaccgattgaaaaaagactggggaatacaagatgtttggaatcgtattattcttccacgctttctgcgtttgaatgaattgacagattcttctgattataccataatgagtacaaatggtaatattattcctgctatgcctttacatttgcagagaggatttaacaagaagagaatcgatcatcgccatcatgcgatggatgctattgtgattgcttgtgcaagtcgtaatattgtaaattatttgaataatgcttctgcaaaaaaaggtgccaaaatctcacgttatgaccttcagtatctgttatgcgataaagtaaaaacagatgctgctggaaattataaatggatgcttcgtaaaccatgggagacgtttacacaagatgtatatgctgcgcttatggatattgtagttagttttaaacagaatcttcgagtaataaatcgtaccacgaattattatcagcattataataccgaagggaaaaagataatggtaccacaggcaaaaggagatagttgggctattcgtaaacctatgcataaagatacggtatatggagaaataaatttgcgtaaaattaaaaccgtgtctttgaaggaagctgtcaaaaatccgttgcgaattgtagataagtcatttaaacataagttacaagaacttcttcatactggatataatttgaaagctattactaattattttgaaaataataaagatgtttgggcagatataaacttgaagaagataagtgtatactattttaccaaggaaacaaatgaacgttattttgcaactcgtaaagccttggatacaagttttatgcggagtaaaatagaagaagagattgctgataccggcattcagaaaattttgttgaatcatttgcaggacaatgacaataatgctgaaattgcattttctcctgatggaatagaacgtatgaatcaaaatatagtagcattaaatgaaggaagatggcatcaacctatttataaggttcgtgtatacgagaaagcagataaatttccgataggagagaaaggaagtaaatctgcaaaatttgtagaagctgctaaggggacgaatcttttctttgctgtatatgaatcggtgagcgaggataaaaagacgggagaattagtgcgtaagcgaacttttgcatctattcctttaaatttggtaattgaacgccaaaagaaaggtttaccgtcggctcccgcagatgcgaatggtaacttgccaatctttgtattgtctcctaatgatttggtgtatctgcctactgaggaagaacgtaaaaataatactttctctttccctttgaatagagggagaatttataaaatggttagttgttctgaaaatagattgtttttggtacctttttatgttgcttctatcattagagataaatatgaatatacatctaaaaataaaatcgaattgacagacgataagctctcaataaaagagatttgttggcctataaaagtagatcgattagggaatataaccctcaagtagaaactttatagattgatactatgataaagaaaacattgtattttggaaatcctgcttatttgtctttaaagaacaatcaactggtgattaagttgccggaagtggagcataatgcttcacttccggacagatataaaagtcagtcagctataaccaagccaatagaagatattggcttggttatattagataataagcagataaccattactactggagtactggatgctcttttagaaaataatagtagtgtgattacttgtgatagtaaaagtatgcctgttggtttactattacctttatctggaaataccgtgcagaatgagaggtttagagatcagttgtcggcaacacttcctcttaaaaaacaattatggcaacaaactattaaggctaagataacaaatcaggcaaccgttcttctgaactgtttgggagaggaaagtaaatgtatgcaggtttgggcagatgaagtaagaagtggagattccgataacttggaagcaagggctgctgcttattattggaaaaatcttttttctcatattccggaatttactcgtaatagagaaggaatatatcctaataatctgttgaattttggatatgcaatacttcgtgctatcattgcgagagccttagtttccagtgggttgctccctacattaggtatccatcatcacaatcgatacaatgcttattgtctggcagatgatataatggagccttatcgtccgtatgtggatgaattggtctttcggttagtgcaaaaacataaaggagaaatggaactaaccaaagaattgaaaggagtacttcttacaataccaacattagaggtaatgataaatggaaaacgaagtccattaatgatagcagccactcagactacagcatctttgtataaatgttttacgggtgaacttcgtcgtattgtttatccggaaaagtaatatttagaatggaccgttttagtgaatatcgtattatgtgggttcttgtattttttgatttgccaacagaaaccaaaaaagataagaaggcgcatgctctttttcgtaaaaatcttcaaaaagatggtttcaccatgtttcaattctctatgtatattcgtcattgtgccagtatggagaatgcttctgttcacataaaaagggtaaaatcttttttaccggaatatgggcaggttggtattatgtgtataactgataaacagtttggacagattgaattgttttatggtcagaaattgaaagaaccgaatgctccaggacaacagttggaattattttagaaataagaaatcccgttctacaaaacgggatttcttattaggaacagttctttttctttttctaatatttgagttaagtagttgattgttattgatttgtgtggaattagctgttccttatagtacaaagttattaaattgaaagcaaatcacaaccgctgccgtgatattcgcaacactcaacggctgttccttatagtacaaagttattaaattgaaagcaaatcacaactcccaatccaatcagtacaaattacttcacgctgttccttatagtacaaagttattaaattgaaagcaaatcacaactattctccaatgaatgctggtgagttgttggctgttccttatagtacaaagttattaaattgaaagcaaatcacaactcgcgcaaagcgcgagcgtacctccgtgacgctgttccttatagtacaaagttattaaattgaaagcaaatcacaacatgtttggtgattccgatctgcgctaaattgctgttccttatagtacaaagttattaaattgaaagcaaatcacaacatccggccgcttttaagtgttttatttgatgctgttccttatagtacaaagttattaaattgaaagcaaatcacaactcgcgtgccgatttgtctgctaagttatttgctgttccttatagtacaaagttattaaattgaaagcaaatcacaactataaaatgcaggtagacgtgttctcatgtgctgttccttatagtacaaagttattaaattgaaagcaaatcacaacgtattttttccgttccatgtaaaagtagctgctgttccttatagtacaaagttattaaattgaaagcaaatcacaaccatagtcagtttcggttatttcgttgataagctgttccttatagtacaaagttattaaattgaaagcaaatcacaacaaagttgctatacggtaaaagttcccaccagctgttccttatagtacaaagttattaaattgaaagcaaatcacaacagaggttggggaggaatacgcagcgcaagcgctgttccttatagtacaaagttattaaattgaaagcaaatcacaactttggctccatggattttctgtgcttggatgctgttccttatagtacaaagttattaaattgaaagcaaatcacaacaagtccaataatcaaaagaaaaatccgcaagctgttccttatcatacaaagttatcaaattgaaagcagttttcttattcctttattatattatgtggtaaatcttcttcattttttgactaagtacatacataaatctgtaataacttttaggacagatactttccatatgagattgaccaagaaagaacggacaatatatctttattacacttctttcatcaagataagccggggcagtccaccatatttcaagacttgttttacacagcggtatccggctttttccatattgatacgtgagaagcaattgtccggatgtacggtacataaaagatagcggtaacctgcggcccgtaattcttcttccgcttttgctgtaagtttacgttgcagaccatagcctcggaaagaagggtggactactacagtatccatatgcgcaaccagatttaattcgtgttcaggaagataaatatctcgtcccaggttatccggattgtcttttcccggatatacgataagaaacaatccggcaattttttccgaagcagtgtctgtagctatccatgcgactcctttttcttgttcaataagttggcggatgtagttttctccttcttctggagcaaaccattcctgctgttccattccgttccatacttcccgaatgagtgaagtcagtagggaagcctcttccgctttcgctttggtcagttgaaattccatgtttagataaaatgtattgacttttacagcaaatataaaagatccggatgaaaagataaaacttacataaaaaatttatgaatatacatataatgagctaatatcaaagtagatacctctccgaaatgattcgaaatgtcttcttatggttttgacaaaataacattatatataactttttacacaagaatttatctgtatttttaggttatttctcttaatgtacttatatttgccttacaaaatgataaaacgcaggtgtctgcataaaatgtttatttaaacgaaaagaataacatgatgaaagaatttggaaagactcgtatagagagcgatttaatcggttctcgtgaaatagcagatgaattattgtacggtgtacagacattgagaggactggaaaacttctctatcagtaaatttcatctgaatgaatatcctttatttataaatggacttgctatcacaaaaatggcagctgcccgtgccaatcatgaattaggtttgcttacagaccagcagtttgaagcgattactcaggcttgtcaggaaatattggatggaaagtttcacgatcagttccctgtagatatgattcagggaggggctggaacaagtaccaatatgaatgcaaacgaagtgattgccaatcgtgcactcgaaattatgggttatgcacatggagaatatacctattgttcgcctaacgaccatgtaaaccgttcgcagtctaccaatgatgcatatcctactgccattcatctgggaatgtatgccactcatttgcgtctgatcccttgtctggaaaacctgatagaggcttttcgcaagaaaggacaagaatttgcacacattatcaagatgggacgtactcaattggaagatgcggttcctatgacattgggacagacttttaatggctttgccagtatcctgactgatgaaatcaagcatctgaatgaagctgctgccgattttctgacagtcaatatgggaggtacagccattggtaccggtatttgtgcagaaccgggttatgcagaaaagtgtattgctgctttgcgcgatattacaggctgggatatccgtttgtctgatgatttggtgggagcaacttccgatacttcctgtctggtaggttatgcttcggcaatgaagcgtctggctgtaaaagtcaacaagatctgtaatgatcttcgtctgttggcaagtggtccgcgttgtggtttgggtgaattgaacttgccggctatgcaaccgggttcttccatcatgccgggtaaggtcaatccggttattcccgaagtgatgaatcagatttgctataaagtaataggaaatgagttgtgtgtaacaatggcgggagaagccgctcagatggaactgaatgcaatggaaccggtgatggcacagtgttgcttcgagtcggtagatttgctgatgaacggattcgatacactacgtaccttgtgtgtagagggaattactgctaacgagcaatattgtattgaagaggtacaccacagcattggtgtggtaactgctcttaatccgattattggatataagaattctacaaaaattgccaaggaagccttggaaaccggaaagagtgtgtatcagttgattttggatcatggtattctttcgaaggaggatatcgatacaaccttaagtcctgaaaatatgattcatccggtaaaactggatattaaaccgaagaaataagattcatcttcttgtcacgatactggtgataagtgataaaaatattgcccgtccactgtctgttcagtggtcgggcatttttttatgtttcagacttccactcttttttatattcgcaatcggaaagtatatctttcttcagagtcttcctttctgatacaatctgctgctgatatttattcttttctgtattcgacgacgttgattgtacagccagcgtcgccgatttgacagacgatgccgtgggctgtacaaccaacgacgtgggctgcagattgtgattgatggtatgaagttacgatagccttgttttaaaagttgaatatttataactcctttttgtgaagaatggttgtaaatgttataagtatacgctaataagttattttctattaaaatgtatttaaaatattgcctttagtagacaaacgagaatagtataccatatttttgcgactaattgaaagtgaaaggtaaaaagaaaagagatggtttatgacattgaaatgatgagaacgttttacgcatcctatgcaatgcgcgtagatgcagtacaacgtaaattgggcaaagcaatgactttggctgagaaaattttatatgcacatttatacgatgaaaagacgctttgtgcttttcgccgtggagaggattatgtcaattttcgtccggaccgtgtagccatgcaggatgcaaccgcacagatggcactgcttcagtttatgaattccggacagcagcgagtggctgtaccttctactgtacactgcgatcatttgattcaggcgtacaagggcgcatcggcagatttgcctgtggcgcaggaaaccaacaaggaagtgtatggcttcctgaagagtgtagcttctaaatacaatataggcttctggaagccgggtgccggtattattcatcaggtagtattggagaactatgcatttccgggaggaatgatggtgggtacagattcgcatacccccaatgccggaggattgggcatgatagccatcggagtaggcggagccgatgcggtggatgtcatgacaggaatggaatgggagttgaaaatgcccaagcttattggagtacatctgaaaggtagtctgaacggatgggcttctccgaaagatgttattctgaaactggccggactgcttacggtgaaaggagctacaaatgccattatagaatatttcggagaaggtacggcttcactgtctgctaccggtaaggccactatttgtaatatgggagcagaagtgggagctactacctctatctttccttatgatgcagagatggagaaatatctgtgtgctaccggacgtgaggaagtggcaaaaatggcttcggaaaatgcttcgtgtctgagagcagacaaggaagtggaagctgctccgcatctttattatgaccgggtaatagaaatcgacttgtcggctttggaaccttatatcaacggaccgtttactcccgatgcggcttgcccgatttcggaatttgcggagaaggtaaaacagaatggctatccgcagaaaatggaagtgggactgattggttcctgcaccaattcttcgtaccaggatttgagtcgtgcagcctccttggcacgtcaggtcaaggcgaaaggtttgaagatggctgccgggctgattatcaacccgggttcggaacaagtctattgtactgctcggcgcgatggcatgatagccgatttcgaagcggtaggtggagtgattatgaccaatgcctgtggtccgtgtatcggccagtggaagcgagtgactgatgaccctatgcgggttaattctattgttacttcctttaaccgtaacttcgccaaacgtgccgacggcaatcctaatacccatgcttttgtagcttctccggaagtggcaatggccctggccattgcaggtgatttatgctttaatccgctgactgataccttgaccaatgaacagggtgaacaggtacggctggatgctccggtaggagataccttgccggaaaaaggatttactgtagacgataacgggtatgtagctcctgctgccgacggaaaagatatcgaagtgtccattgctcccgattctgcccgtttacagcgtctggctccttttgctccctgggatggtaaagatttggagcagatgcctttgcttataaagacgcagggtaagtgtactacagaccatatctcgatggctggtccgtggttgcgcttccgtggacatctggagaatatttccgacaatatgctgatgggggctgtcaatgctttcaatggaaagaccaatagtgtatggaaccggctgactggcgaatatgatgccgtatcggctgtggccaagcaatataaagcaaaggccatcccttctattgtggtagccgaggaaaactacggcgaaggctccagtcgggaacatgctgctatggaacctcgtttcctgaatgtgcgggttatccttgccaaaagctttgcccgtatccatgaaaccaatttgaagaagcagggaatgctggcattgacttttgctgacaaatccgattacgataaaatacaggaacacgactgtatttctgtctgtgggctggatcactttgctccgggaaaacctttgcaggtggtagtaacgcacgaggatggaacagaagatacattccttgccctgcatacctataatgaaatgcagataggttggtttaaagccggttgtgctttgaataccttccgaaaataacttaagaacttacaaactcacaaacttaaaaattatgtccaaaatagatatgaaagacggtcggctgatagtacccgactgtgtgaccgttccttatattgaaggtgatggagtgggagcagaaattactcctgtatgtcagaaaatagtaaacgaagctgttaaactggcttatgatgataagcgttctatcgagtggaaagaagtactggctggagaaaaggcattcaagcagaccggagaatggcttcctgaagctacaatggatgcttttcgcgaataccttatcggtataaagggacctcttactactcctgtaggcgaaggcatccgttcgctgaatgtggcactgcgccagacactcgatttgtatgtttgtctgcgtccggtacgttggttccgtggagtggtttctccggtaaaggaaccgcagaaagtaaacatgcatattttccgcgaaaatacagaagacatttatgccggtatagaatgggaacaggggactccagaagctgaaaagttctatgcttttctgcgcgacgagatgggagtgaagaaagtccgtttccctgagacttcttctttcggtgtaaagccggtatcggtagaaggaaccaaacgattggtacgtgctgctattctgtacgccctgcagcatcatttgccttcggttacattggtacacaaaggaaacatcatgaagtttactgaaggaggattcaagcgttggggatacgaagtggctgaaacagaatttgcccagcagacttttaccatgaaccgctacaatcagctgaagaaggagttgggagaagagtctgccaaagctgctttggcagaagccatgaatttgggtaaagtaattgtcaaggactgcattgcggatgctttcttgcagaatacattgctcactcctgaagattactcagtcattgccactttgaacttgaatggagactatgtatccgaccagttggctgcgatggtgggtggtatcggtattgcaccgggagccaatatcaactatcagaccggacatgctatttttgaggctacacacggtacggctcccgatattgccggaaagaatatcgtaaatccctgctcgctgctgttgtcgtctgtcatgatgttggattatatcggatggaaagaagcttctgctttgattatccgtgcgttggaggacctcttcgaggctggagaggcaacttcggacctcgcacgctttatgcctgatggacatgtattgacaacagaagagttcggacagcgtgtgattgaatcattgtaaatattaataaagatagcttgtatatgaaaaaagaatacatcgtatataaactttcggagtgtgccaaacaggcatgtcgtattgataatgaattgtttgcaaaatataatgtaaaacgtggattgcgtaatgaggatggtacaggagtattggtagggctgaccaaaatcggaaatgtagtaggatatgaacgtacggaggaagggctgaaaccgattcccggtaagttgttttacaggggatatgatttggacgacatcgctcatgcactgctcaaggagaagcgtttcggatttgaggaagtggcttatctgttgctttcgggagaattgccggataacgagcagttggcttctttcaaggagctgatcaatgataatatgccgctcgataagaagacgacgatgaatatcatcgacttggaaggtcagaatattatgaatattctggcccggagtgtcctcgaaatgtatacattcgatcccaatcccgatgatatctcaagagacaatctgatgcgtcagtctattgagttgatttccaaatttcctacaatcattgcttacgcatacaacatttatcgtcacagcacacacggacgttcgttgcacattcgtcatccgcacgaaaatctgtcacttgccgagaatttcctgtatatgattaaaaaggaatatactccgttggaagcacgtatgctcgacttgctgctggtgcttcaggcagagcatggaggtggtaacaactctacgtttactgtacgcgtcaccagttctacccgtaccgatacgtattccagcattgctgcaggcatcggttcgttgaaagggcctttgcacggaggagccaatatacaggtggttaaaatgttccatcacctgaaagaagtgatatccgactggacgaatgtagatgagattgatacttatcttacccgtatgctcaataaagaggcgtatgatggtagtggactgatttatggtatcggtcatgcggtgtataccatttctgaccctcgtgccgtcttgttgaaagagctggcaggagaactggta

SEQ ID NO: 1093 - DNA, 24581 bp, synthetic construct
  misc_feature 1..24581: note = Synthetic
  source 1..24581: mol_type = other DNA
tcggtaaagaacggattggctcacgtaaccactccgggattggttggtgttcatgatggggtacgcccgtttgtttcccgggaagttatagcccgttgttatgaattggcggctgaaaaaaaggcggtgattcccgtgatagatgtggtggagactgtacgccatctcaaaggagaagaaagcgtgactgtcagccgggatgagtataaattggtacagactccccaggtgtttgatgccgatttactgaaacaggcctatgaacaaccttatacttctttctttacggacgacgcttcggtagtggaagcgatgggagtatctgtatacctcgcggcaggtaatcgggaaaacattaaaattacgactccctttgatttgaaaatagccgctgctttgttggattcatgtttgatttagcttctcgtgacataaaatacctgtcgggtgtagggccgcaacgtgcctcagtactcaataaggaattgaatatctattcccttcacgacttattgtattatttcccctataaatatgtagaccgtagccgtatctattatatccatgagatagacggtacgatgccttatatccagctgaaaggtgaaatcctgggctttgagacgattggagaaggtaggcagcgccgtctgattgcccatttttcggatggtacggggattgtggacttagtctggtttcagggaattaaatttctcgtcggtaagtataaggtacatcaggaatatatagtatttggtaaacccagcgtcttcaacggacggattaatattgctcatccggatatcgataatgcttcggaactgaagctctcgaccatgggattgcaaccttattataatacaacggagaaaatgaagcggagttccctcaattctcatgcaattgagaagatgatgagcgccgtagtacagcaactccgcgaaccgttgcccgagacgctttctcccgctatactggcagaacatcatttgatgccgctgacggaagccttgatgaatattcattttccggcaaatccggaattgcttcgtaaagcgcaatatcgcttgaaatttgaagaacttttctatgtgcagttgaatattctccgctatgccaaagacaggcaacggaaataccgtggatatgtatttgaaacggtaggagagatattcaatactttctatgccaagaatctgcctttcgaactgacaggtgcccagaagcgtgtactgaaagaaatacgacgggatgtgggcagcggtaagcaaatgaaccgtctgttgcagggggatgtaggtagtggaaaaacgctggtggcactgatgagtatgctgatagcgttggataacggttaccaggcttgtatgatggcgcctaccgagattttggctaaccagcattttgaaacaatccgtgagttattgtacggaatggacatacgtgtggaattgctgaccggttctgtgaaaggaaaaaagcgggaagccattctcaccggtctgttaacaggagatgtacgaatactgatcggtacgcatgccgtgatagaagataccgtgaatttctcttcactggggctggtcgtgatagatgaacagcaccgtttcggtgtggcacagcgcgcacgtttatggactaagaatgcacagccaccccatgtgctagtcatgacagctacccctattccgcgtacgctggccatgacattatatggtgatcttgatgtctccgtcattgatgaactgccgccgggacgtaaacctattgtgaccattcataaatatgatgcgcaccgtgtaagcttgtaccaatccgttcatagacagattgcagagggcagacaggtgtatattgtatatcctttgattaaggaaagtgagaaaatagacttgaagaacctggaagaaggctacctccatatttgtgaggagtttccggattgtaaagtctgcaaagtgcatggcaagatgaaagcggctgagaaggatgcgcaaatgcagctttttgtttcgggcgaagcacagataatggtagcgactacagtgattgaggtgggcgtaaatgtgccgaatgcttccgtgatgattattgagaatgcagagcgcttcggtttgtcacagctccatcagttgcgtggtcgtgtaggtcgtggagcagaacagtcttattgtattttagtgaccggatacaagttggtagaggaaacccgcaagcgcctggaaattatggtgcggacaaatgacggctttgaaatagctgaagccgatctgaagctacgaggtcccggtgatttggaaggcacacagcaaagcggtattgccttcgacctgaaaattgccgatatagcgcgcgacggacaactgctgcaatatgtgcgcaatgttgctgaagaagtggtggatgctgatcctactggtattcgtccggagaatgaaatcctgtggcgtcagctaaaggcacttcggaaaactaacgttaattgggcttccattagttgaataacggttaaacatacactttatttgcatttttatgttgtaaaacatgttagctcttaactttccgatatacagggagttagggaatgttttaatatgtatcttttagtcccttaccgaaaaaatagttaagaacagccttttcatttagagaagaaatactacctttgggagaattttttaaaagaatgacgaaacggaatgaatttcaattgcattaaaacgatcctaatagctgcgacggcaatggtcagcctgaattctttttctcaggatttgattgcccgacaagcccccatcgacaggaaactaaagagcgttgactcgttggctttacagaaacagatacgtgctgaacaatctgcttatccaggtctaagtctatatccgacttggaacaatgagtatgtacaagcttatggcgatgctatcgttcctgaaagctataaagtggacctgacaggtttctgtatgcctacaacgcatacgaagattacagatgtcttcggttatcgccccagaagacgcagaatgcactatggcttggatgttaaagtattcatcggtgatacgattcgagctgctttcgatggtaaagtacgcgtagtaaagaatcagggacgccgtggctatggtaagtatatcgttattcgtcatgacaatggactggaaactgtttacggacacttatccaaacagatcgtagaaattaatcaattggttaaagccggagagcctatcgctttaggtggcaataccggacgttctaccggttcgcatcttcactttgaaacccgtttcctgggaattcctatcgaccccgctttaatgttcgactttgaaaagcaagacgttgttgctgatcattatactttcactaagaccaagacttcaaaaggaactgctcgcagtatggcttccggtgaaggtttgttctataaagtaaagagtggagatacattgtctaagattgcatcccgtcagggagtatctattgataagctctgtcagttgaatcgcattacacggaaaacaatcttacgtccgggacaggtattacgttgttcgtaagatatcaataaacccataaagaagagggcactttaatataatttagagtgccctcttttcttttttctttaattatttctacctttgcaaccaatttgtaaggaaatgaaagataccaaacaacaatttgaacatgtcattgccatctgtcgtgatttgttctccaagaaactacatgattacggtccggcatggcgtattctccgtccggcttccgtgactgaccagatattcattaaagctaatcgtatcaggagtattgaaaccaaaggagtgacgttggtggacgaaggaatacgttccgagttcattgcgatagtcaactatggcattgtcggattgatacagctggagctgggatatgcggaatcagccgatatcacaaatgaagaggcaatggcattgtatgacaaatatgctaaaacttcattggagctgatgcttgctaagaatcatgattacgatgaggcatggcgcagcatgcgtgtcagttcatacactgatctgatattgatgaaaatctaccgtacgaaacagattgaaagcctgtcaggacagactttggtttcggaaggagtggatgctaattatatggacatgattaattattccgtattcggtttgattaagattgaatttggagactaagcagaaacatataatgtggaagagctgggtgaatgtttgccgctttttactggcggtggtattcatcttttccggctttgtgaaggcagtcgatccgttaggctctttttataagattcaggattatctgacggcttttggaatggctgcatggtttcctacatatttgcagttactgtttgccatcgtattgtcagcgttggaattctcagtgggagttttcctgttcttcggtatacggcggaggtttgctacaactctggcactgatgctgatgatcgtgatgacaccgctgacgctgtatctggcgttagtgaatccggtgtccgattgcggttgtttcggtgatgcatgggtgttgacaaactgggaaacgtttggcaagaatgtagtattgtttattgcagccgtatctgtcttcaaaggtggaaaacaaattatcccctttattacggcaaaaatggcatggatgatttctatgtatacgttctttttcgtgtttgtgctttcgttctattgcctggacaatctgcctattctggatttccgtccttacaagatcggaaagaatatcaaagaaggtatggatatacccgaaggagcaaaacccagtgtgtttgagagcaagttcattttggagaaagacggaaaaaagcaggaatttacactggataattacccggatagcacatggacgtttgttgaaacacgtacggtgttgaaggaaaaaggatacgagcctccgattcacgacttctctattgtaagtctggaaaccggagaggatttgaccgatagcatcttatccgataagggatatacattcctgttggtagctcatcgcattgaaaaagctgacgatagcgatatagatcttattaacgagatctatgattatagtgtggagcatggttacggcttttatgccctgacttcttcgccggaggaacaaatagaattatggcgtgacaagaccggtgcagaatatcctttctgccagatggacgacatcactttgaagactattatccgttccaatcccggactgatgctgataaaggatggtgtcattctgaataagtggagtgataacagtttgccggatgaatacgtgttgacggatagtctggataaactggaactcggtcagcagaaacaagaaagtgatttgcgcacgattggttacgttcttttgtggtttatcattccgttgctgatggttatcggcgtggacatcctggttgtgaagcgcagggaaagaaagagagcgaaaaataaagtgattagcgatggagtgatgagtgataagcaagagattcctcagccataagtcacaaattataaatcaaaaatacattaacccttttaataaataaaaaacaaaatgagaaaaaacattgttgcaggaaactggaaaatgaacaaaacccttcaggagggtattgctcttgcaaaagaactgaatgaagtattggctaacgaaaagcctaactgtgatgtaatcatctgtactccttttatccacctggcatcggttactccgttggtagaccctgctaagattggtgtaggtgctgaaaactgtgctgataaagaatcaggtgcttacactggtgaagtttcagcagctatggttgcttctacaggcgctaaatatgtaatcttgggtcactcagaacgtcgtgcttattatggcgaaacagttgccatcctggaagaaaaagtaaaattggctttggctaacggcctgactccgatcttctgtatcggtgaagtgctggaagaacgcgaagctaacaagcagaatgaagtagttgccgctcagttggcttctgtattctctctgtctgctgaagatttctctaagatcgtattggcttacgaaccggtttgggctatcggtacaggtaaaactgctactcccgaccaagctcaggaaatccatgctttcatccgttcattagttgctgacaagtacggtaaggaagttgctgacaactgctctatcctttacggtggtagcgctaaaccgtctaacgctaaggaattgttcgctaatcctgacgttgatggtggcttgatcggtggtgcagctctgaaggcagcagacttcaaaggtatcattgatgcttttaattaatagataatggaagattgataattgataaccggtgaagtgccggttgtcggttatcagtttctataatcatattatcaaccgtctattattttattattcattatgaagaggcttggtttacttttaattgcatgctttgctttcgccgcttttgctttggcgcagaataacattgtgaagagtttggaacgcaatgtgccgggacagggtaaggtaaccatccatcaggatgcccgcatcgaggtcttgataggtcaggaatatattcccaacggaacggagaacagagtgcttaaaagtcagggtttccgtgtacaggtgtatgccggaaacaataccagtagagccaagaacgaagctcacgctgtgggctcacgaatcaaagaatatttcccggaactttctgtttatacctctttccactctccccgctggctgtgccgtgtaggagacttccgcagcgttgaagaagcggatgccatgatgcgccagttgcgcgctacaggcgtattcaaagaagtttctattgtgaaagagcagataaacatccccttataaaaacttactcatgttaggaaaagaagaaatcgtatctcctgcactggacgaactgaaagaacactatcagcgtattatcactttattgggcgaggatgccgaccgcgaaggactactgaaaacccccgaccgcgtagcgaaggctatgctgaatttgacaaaaggctatttcatggacccgcacgaagtgctccgctctgccaagttcaaggaagaatacagtcagatggtgattgtgaaagacattgatttcttctcactttgcgaacaccacatgcttccgttctacggaaaagcgcacgtggcttatatccccaacggttacattacagggctgagcaagattgcccgcgtagtggatatcttctcccatcgccttcaggtgcaggaacgcatgacgcttcagattaaagaatgcatccaggaaacactgaatcctctgggcgtaatggtggttgtggaagccaagcacatgtgtatgcagatgcgtggggttgaaaaacagaattccataacgaccacttccgattttacaggtgctttcaatcaggcaaagactcgtgaagagtttatgaacctcattcgtcagaattcattcacataacaatcccgtacgttatttcatgaaaggaaactgcagttcccatgaagggggactgtcgttaccattaaaggaaacgcgcgtttccattaggggaaactgtagttcccattagaggaaactgccgttcccattagggggaactgtcgttcctgtatgaggaactgtcgttctcattaagcgtaaggtgatttaaccgagtacaactctgtctcccaatcgtttggccataatacttttgatctcacgcagttctgagtagcgtttcatgatagaggtacattgttcttcatcattggctactgcagggtcttgcaaggcatacatcatgtgttttatttcttcactgatgatggcgaacttgaaattaatcatgagcgtaggcaccaattcgaataggcgttcctcatcggtcaccaatctttgggctttggaatgatacttgctcagttggtagcggtcggcaatcaactctgtgcttagcttactgatagtagaatcaggatgcgccaggaaataccgttctgcggtgaatccttcactgtgtatatgttctgctgcttccgtcagtatctttctatgtaaaggattatggaaggccagttcgtcctctttcaagtcattgactacgtattccgttactgtgacgggaatttctttcccttcctcatcgggaacgttgcacaatactttctctccgtagcgtactaccatttgcaggataaggcgctcgtatttgtagaattcctgtccttcttttccttcctgcgggatataagatacgtattcggcagcttccggtggaagcggtgcaccgccgtcaggcatttctccattcatgggataaggaggcatgtcttcagggtagggaggttgcatgccgtcggggagcggtgcttgtgcagcgtcgcgggcagcattgttcttccttgtttcccggtttctttgttccgcctgcttctcagcctgagtttcgcgtcgtttggcaacttccgaaaccagcagcttgtcttctacgcgaagcaactggctgcattctttaatatatacgtcgcggacaattgcctccgggataatagatatactttgtacaagattgctgattaactccgcacgcttgatgggatcttttcctgcatcttccagcagaagattggttttgaaacgtataaagtctgtttcattatcttgtatgaatttctggaattccgtagcgttgtgcttgcgggcgaaggagtccgggtcttccccgtcgggaagcaggcaaactttgatattcattccttcttccagcagcatgtcgataccgcggagagaagccttgatacccgccacgtcaccgtcatagagtaccgtaatattattggtgaagcggtgaatgagttttatttgccccggagtcagtgccgttcccgaagaagctaccacattctccacgcctgactggtgcatggaaataacgtccgtgtatccttccaccaggaagcaacggtcttgttttacaatcgcctgtttggcaaaataaatgccatacagctcattactcttatgatagatttccgattcgggagaattgacatatttaactttgactcccttcgtcgcactgctaagcacgcgcccgccgaaagcgactaccttaccggaaagtgtgtgtaccggaaaaataacgcgtccccaaaagcggtcacgcaagcggtgatcgtccgtttcgtagcaaagccctgtcttgacaagatattctttcttgaatcccttcttgatggcttcctgagccatggcgtcgtgactttcggtgcaatagcctaactggaacttttcgatgatatcatcccggaaaccacgattgcggaagtatgccataccaatgctacgtccgtccacatggtttttaagtatattttggaagtaatcacgtgcaaagttattcacgatgaacagactttcacgttcgctctgcatcagcttctcttcgctggacagttctcgctccttgatttcgataccgtatttctttgccagatatttcagggcttcggggtagctcatctgctcgtgctccataatgaagtgcaccgcattaccacccttaccgcaggaaaagcatttgcacaaccctttggaaggcgacacgtagaaagatggcgtcttgtcatcatggaacggacacaagcctacataattcacacctcgcttacgcaacgtaacgaagtccgatacaatgtctacaatctgtgcggcatccagaattctgtctatggtaggttggtctatcattggataattgtttttgcgaatgcaaagataaaaaaaatcccccgttgaggacgagggaacctaatgttttcacaacggaataatccttattgtgatttgcttcaaactagtgaggcaaagatatgtgtttttctttaataatcattaggatatatggaaaaaaactgtagttttgtgtaaaattataaagaaaagagcggtatgaagaagattttgggtttggatttgggaaccaacagtataggttgggcacttatagacggtgaagaaaataggatattagggatgggtagccggattattccgatgacgcaagacgtgttggatacgttcagtgggggaaatccattggaaacacaaacggcggtacggacagcttatcgtggcgtacgccgactgcgcgaaagaacattattgcgtcgcgagcgtttgcttcgcgttttgaatgtaatggcgtttttacccgaacattatgcttttcagatagattttgaaaagcggttaggacaatttcttgatgaaaaagaaccaaaattggcttggaggcaaaatgatgatgggaagttcgagtttatcttccagcaatctttcaatgagatgatagaagagtttaagaataatggagtggttgcgggggataaaaaaattccctacgattggactatttattatctgcgtaagaaagcactttcccaaaagatagagaaagaagagttggcttggattttattaaatttcaatcagaagcggggatattaccaactgagaggggaagaagaggaagaaaattctaacaaatcggtagaatattattcattgaaaatagccgatgtcgtagccgatgatagatcgaacagtaagggcgagacatggtattctttgcatttggaaaacggatgggtttatcgtcgttccagcagaataccgctctttgactggaaagataagacacgtgattttattgtcacaaccgatctgaatgatgacgggacggtgaaaaaagataaggaaggaatagaaaaacgctctttccgagcaccaagcgagaatgattggacattattgaaaaagaagacagagaaagatatagaaaagtctcgtaaaacagtgggtgcctatatctatgagacgttactacagaatccgatgcaaaaagttcgtggaaagttggtacggaccgtcgaacgcaaattctacaaggatgagttgaggcaaattcttgagaaacaaaaagagtttcactctgaattggggaatgaggacttgtacaacgattgtattagggagttatatcgcaataatgaaacttatcaacttattttgagtaaaagagacttcgttcatttgcttttgaatgatattctgttttatcagagaccactgcgcagccagaagtcttcgataagtgattgtgcacttgaatttcaaacctataaagataaggatggtaatgaaatcaaagagcatctgaaagccgcatcaaaatccaatccgctttatcaggaatttcgtatatggcagtggttgtataatctgaggatttatcggaaagaagatggtgaggatgtcactgcacaattcataacaggcgttgaggacaaagaacaactgtttgattttctgaatgatagaagagatgttgaacagaagccgttgcttgactatttgataaaagcaaagggtttgaaaaagcaagtaaagacggatacatatcgatggaactatgttgaggacaaggcatatccctgcaacgagacaggagtaatgatttccacacgtttggctaaagtggaaaatatttccgatgatttccttaccaaagagatggaacaaaagctctggcatatcatttattccgttaccgataaaaatgaatttgagaaagcattaaaaacttttgcaaaaaagaatggcttggatgttgtttctttcgtggatagtttcaaaaagttcccaccctttaaatgtgaatatggggcgttctctgaaaaagcgataaagaaactgctgcctctgatgcgtttggggaaatattggaagtggaatgatattgatgacaatactcaaaatagaatatctaaaataattacaggtgagtatgatgaaggcattaaggatatagttcgtgaaaaggttgttaatctaaccaatgaaaacgatttccagggattgcagttgtggttgactcagtacgttgtttatggaagacattcggaagctgacattgcagggaaatggcgttcggttgctgatttggagaaatatctggatgattttaaacagcactctttacgcaacccgattgtggaacaagttattacggaaaccttacgggtggtcagggatatttggaaacaatacggacggggtgcggaagatttcttcagtgaaattcatgttgagctggggcgtgatatgaagaacactgctgatgaaaggaaaaggcttactaatgttatagttgaaaacgaaaacacgaacctgagaattaaagctctgctgatggagctgaaaaataatgctgatggtaaattggagattgagaatgttcgtccttattcacccatgcaacaagatattctgaaaatatatgaagaaggggtgattaattccggtatagaaattgatgaagacatccggaaaataagtaagactgcacaacccacagcggcggaattgcaacgttataggctgtggctggagcagaaataccgttctccatacactggtaaggtcattccgctcggcaaactgtttaccgaagaatatcagattgagcatatcattcccaaatctcgttactatgatgatagcctcagtaacaaagtaatttgtgaggctgctgtaaataagctaaaagataagtacttgggatttgagtttataaaaaactatcatgggcagatagtggaaataggtttcgggcaaaaagcaactatctttgatgaaggagaatatcaagatttcgtaaaacggcattatgcccataatcattcaaagagagcaaaacttctattggaagaaattcctgaaaaaatgatagaacggcaaatgaatgatacacgttatatcagtaagtttgtttttcctcttttgtcgaacctcgttcgtgcagagaaaggcgacgatggggtaaattcaaaaaatgtattgcccggaaatggtaaaattaccactatattgaaacaagactggggcttgaatgatgtttggaatgacttgattcttcctcgttttgtgcgaatgaataagctgacaggcactactgcattcaccagttggaatgaacaatatcagaaatatttgcctactgtcccgttagatttatcgaaagggtttcagaagaagcgtatcgaccaccggcatcatgcaatggatgctttggtgatagcttgtgctactcgtgaccatatcaatctgctgaataacaagcatgcgaatacggatacaattcgatatgatttgcaacggaaattacgactctttgagcgggtgacatataccgacccacacacaaaagagcaagtgacaaaggatattccgaaggagtttaagaaaccatgggatagtttcactgttgatgcccgcaatgaattgggaaaaattgttgtaagttttaagcagaatctgcgtataatcaataaagccactaatatatatgagaagtatgaagacggtgaaaaggtgaacgtaaaacaaaaaggaattaattgggctattcgtaaacccttgcacaaagaaactgtgtttgccaaagtatcacttcgtaaaataaaaaaggtacgtttgagtgacgctttgaaagattggaaaaagatagtggataaaggtctaaaacaagaaatagaacggcttgtttgtcaatatcatagattcaatcccgatgaaatttgcagatatttcaaagctcgggggaatcagtttggaggagtagatatatcaaaggtagatgtgtattactttgatgaagagaatgcggctgtacgaaagaatgtagatacttctttcactgagaagtttattcgggaatctgtaacagataccggaatacaaaagatattgattaatcatttaaaggcaaagggggacaagactgaaatcgcattctctcctgaaggcattgaagagatgaacaaaaacatagttcaacttaatgggggaaagtttcatcaacctatacttaaagtaaggatatatcaagctttaggtaataaatttcagattggaacaatgggaaataagaaagataagtatgttgtggcagaggctgggacaaatcttttttttgttgtttatgagaaagatggtaaacgaaattatgaaaccataccattaaatgaggtgattgaacatcaaaaatggcgtggcacattatcaaaagaagaacaacagaagattcctgtaattcctatcaaaaatgacagaggtatgtttgtgttctatttgtcgcctaatgatttagtttatgttccaacagcagaacaacttggtgatataaatataagcgttaatgatataaagcctaacagaatttatagattcacagattcaagtgatactagagctaattttatacctatgtctatcgctgaagttttatttaattgcaataaggacaaacaaaagaaaataggtattgagtattctattcagaatgaaataggaataggtagtcaaggttctaaaaatcaaaaaagtataaatggtgatatgattaaggacatttgtcttaaattgaaaatagaccgcttaggaagtattaaagaaatatccggtttatgaataaaaacactaactataccattcaaaaaaaataggagtgagtcggacatatatcaatatcaataaattaaaataaaattagcatggaacagaatttaaaatcggaaggcaagtgcctgtattgtggaaaaatgtttgctaaggcgggaattaaccgtcatctgattaagcatttggaagaaaaagaagtcaatggacaccccggacattctttcttggtgaaaattgaacaaaatccaagctgggggagggctccctatttcctttcactttgggtggacggtgaaacaaaaatgaaagatattgatgcctttctacgggacatctggcttgaatgttgcggacatttaagtgcttttcgtaatccgaagaaacgtatgagtggcggttgggattattttgaggcaatggcattgatggagcagggtagggtgaaggaatatgagaaacttatggaaaattgtgcaggtgagataccgatggatcgtaaagtgaagaatgtgttttgtaaggggctgaaattggaatatgagtatgattttggaagttctacggagttgatcgtggaaattgttgcggaatattctgtaaaagctgatgataaaatcgtgttgctttcacgtaatgaaccgataggatggctttgtgaaaaatgcggaaaggcaaaagcgactttgatatgtacggtttgtgtgggaaatgaagaatctatgttttgtggtaagtgtgccaagaaacatgctaaagaatgtgaggattttgctgattatgcggcaatgccgatagttaattctccaagaatgggagtttgcgcctatgagggaggatgcattgatacggaaaggaattaaaacagaatagtggaatgataaagaaaacgctttactttgggaatccggcgtatttgtccttgaagaatgaacaactggttatcaagttaccggaagtgacgaatagtgattctgtacctgagcactttaagaaacaggcggaagtgacaaaaccgatagaagacatcggagtggtggtgcttgataacaagcaaatcactgtcacatctggtgtcctggaggcattgcttgagaataattgtgccgtaattacctgtgacagccgaagtatgccggttgggttgatgttgcctttgtatggtaatacgacacagaatgaacgtttccgccggcaattgggtgcgtctgtgcctttggtgaagcagttatggcagcaaacgattaaagcgaagattgaaaatcaggcggctgtattgaaaaggtgcaggggagaagaatcgaaatgtatgaaggtgtgggctgccgatgtgaaaagtggcgattccgataatttggaggctcgtgcagcagcgtattattggaagaatctgtttgacataaaggaatttacaagggatagggaaggcactcctcccaacaatctattgaattatgggtatgctattttgcgggctgttgtggcgcggggattagtggcgagtggtttgctgccaacacttggaatacatcaccataatcgttataatgcttattgtctggcagacgatatcatggaaccatatcgtccttatgtggatgagctggtatatggtattgtaaagagcgggcaagactatacggaactgaccaaggaattgaaagcaaaactgctctctgttcctgtgttggatgtggtgattacagggaagcgcagtccgttgatggtggcagtgggacagactactgcatcactctataagtgttttgacggagaaatccggagaataatatatccgagttttgaatgacgatcttatgaaatactaattgtcgtcctgtcatggaaaggttcagtgaatatcgtattatgtgggtacttgtattgtttgacttgccaactgacactaaaagagacaagaaggcttatagtgatttcaggaagaatttgcagaaagatggattcacgatgtttcagttttctatatacgtacgccattgtgccagtagtgaaaatgcggaagtgcatataaaaagagttaaatctttcttgcctgaatatgggcaagtcggaattatgtgcattacggacaagcaatttggcaatatagagctttttcatggcaagaaattgcagtctgtaaatacaccgggtcagcagttggaactgttctgaaagaggaaatcccgcctattggcgggatttctcttacggaaacaatctcattttttaatcttaattcgatttgtaaatgattggaatacagtcaataatgaataatctgttgtttccaatgggtcaaagatactaatttgaaagcaaatcacaactgccctgataacagacactctttttattagttgtttccaatgggtcaaagatactaatttgaaagcaaatcacaacaaacaaggcaacttctgccgcagcgagatagttgtttccaatgggtcaaagatactaatttgaaagcaaatcacaactaatagtcctgcataccgtccgaatcatcagttgtttccaatgggtcaaagatactaatttgaaagcaaatcacaacgaggtcgtttatagtaagtttcttccggtgttgtttccaatgggtcaaagatactaatttgaaagcaaatcacaaccccgctctagtgtcccactaaggtacgaaagttgtttccaatgggtcaaagatactaatttgaaagcaaatcacaacaagtagacgtccttattaaaggggatttgagttgtttccaatgggtcaaagatactaatttgaaagcaaatcacaactatagcattaataggttcactttcaaagggttgtttccaatgggtcaaagatactaatttgaaagcaaatcacaaccaagtcgccgcgcgtcttgtttatcaactcgttgtttccaatgggtcaaagatactaatttgaaagcaaatcacaacgtgttaccgttgttccaattgaatatccacgttgtttccaatgggtcaaagatactaatttgaaagcaaatcacaaccgacggtgggtttttaaaagacaaacaagggttgtttccaatgggtcaaagatactaatttgaaagcaaatcacaacgtggcagctgaccggtatccggtgttggtgttgtttccaatgggtcaaagatactaatttgaaagcaaatcacaacgttcgatccggaagacgggtacaattatcagttgtttccaatgggtcaaagatactaatttgaaagcaaatcacaacgttggaacctgggacaatgtagaatgtttagttgtttccaatgggtcaaagatactaatttgaaagcaaatcacaacagcccatacaaaggagccacaagtcagatagttgtttccaatgggtcaaagatactaatttgaaagcaaatcacaacatacttccgcaatagcgtttgaatgtagaggttgtttccaatgggtcaaagatactaatttgaaagcaaatcacaacgaacggtgcgtatggattgtttttctgccgttgtttccaatgggtcaaagatactaatttgaaagcaaatcacaaccacctatcgaatagttcacataaccgtcaggttgtttccaatgggtcaaagatactaatttgaaagcaaatcacaacggggcggcgcacaaagtggcggaaaatacggttgtttccaatgggtcaaagatactaatttgaaagcaaatcacaacagaacttgagtctcagaagagaccgtaacagttgtttccaatgggtcaaagatactaatttgaaagcaaatcacaacatacaagcgcacgatgttagcaagactgctgttgtttccaatgggtcaaagatactaatttgaaagcaaatcacaacctatccgtcgatacatcttcaagtcgcaacgttgtttccaatgggtcaaagatactaatttgaaagcaaatcacaactcaatcacggtgctgccatcaaatccgtatgttgtttccaatgggtcaaagatactaatttgaaagcaaatcacaactttgccttataggtaagtcgagtggaagatgttgtttccaatgggtcaaagatactaatttgaaagcaaatcacaattgggacgtaaatcatttgaggttatgatgttgtttccaatggttcaaagatactaaaatgaaaataagtcacaatattgatgtattggggaaatactattacaacgctgttttcttatggttcaaaaatactagggtaagaacaaatcataacagaattgcatatcattcctaccaagattcaaccatttttaataattttagaaataagtatgctcccccaatatcctaaatatcatcccctctctttattaacaaattgaagagagaagccccacttccttttccgtacctctcctctcttcaatcccttaatcccacctgtctattttatcttttccctaatcttcgtcagatattgcttcatcccttccgcatccttcgtactgataatttccaataaatttttcagttccagacgaatattttccacttgcgagggcgtgcgcggattaaaaagaatttcctgaagcaagtaatcatcctcactcagcaagcccttagcaatagccatgtgcttcttgaacgtagtacccggggcctcctgatgcttcatcaccgctgcaaaaacaaacgtagagacaaaaggaatagacagagaataagctaccgtttcatcatgctcgtcgaaagtatattcgaagatattgaggcggagcgtctggtaaaggtccttgaagaaaatttttcccagatggtcaccttcactgatgatgatagcattctcgctgctcagattgctaaggctggcaaacgtagggccaaacatcggatgcgacgatacataacggaaaccactttcctcatagaatttcttcaagcccgtcttcaccgaggcgatatcactgatgatacaatccttgggcagcacaggcagcactttgcggaatgcgtccagcgtatatctcaccgtggcggcattgattaccaactccggttcgaattcctttatctcttccagcgtggtgaaacgatacgtgttgtagacaaaacgcaactggtgcggattcacgtcgaacactgccgtttcatgttggaaacttagaatatctgtaaagaaagagcccatcttgccggctccgagtattaaaatacgcataaatctaatgttattagctacaagttacgagctacgagctacaagtatcctgcggtatgataacgcagctacttgtagcccgtagcttgtagcttgtcacttattaattatttccatttgttgcctcacactctcctcgtgtatcagctcgaacacttttttgatgaagtccgaatccacgcccagaagcacaccttgtgaaccgcgtttatccagaatttcattataacgtcccgtttgcagaatcgtcatatcgtgctctttcttgaacgtaccgatttcacgtgccacacgcatacgcttggcaagttcttgcatcaggttgttgtcgcactcgtcaatctgcttgcgcagttcgctgaggttttctgtggtctgggtctctttacggatgacgagcaggttcaagatgtaatccagtacgtccggagtcacttgctgcgaagcatcgctccatgcacagtcggggttgcaatggctttcgataatcagaccgttgaaaccgaggtccatagcctgttggcaaagcggtgcgatgagttcgcgcttaccaccgatgtggctgggatcgcagatgatcggcaggttcgggatgcgacgacgcaactcgatggggatatgccattgcggcagattgcggtacaacttcttgtcgtaactgctgaaaccgcgatggatggctgccagacgtttcagaccggcattgttgatacgttccagggcgccgatccaaagttccagatccgggtttaccgggttcttcacaaacacaggaatatccacacctttcagtgcatcggcaatttcctgcatggcaaacgggttggcagtggtgcgtgcgccaatccaaaggatatcgatacctgctttcagacactcgtatacatgcttcgaggtggctacttcggtagaaacgtacattccggtttctttcttcacctccttcagccatgccagaccgtctacgcctacaccttcgaaaccacccggtttggtacgcggtttccagattcctgcacggaatatcttcattcccttttcggccagttgcttggcggtgcacattacttgttcttctgtctcggcgctgcaaggacctgcaattaccatgggacgtttgtcctcaatgcccggcagcaaaatcgattctaattcaagttccatattcttttatttttgttcaattatatttttattgtatagatatttctctgtgtcttctggcccctctgcaacccccgtcgataaagcctttcgaacgtgttaataaatataggcctcgtcttttaaaaacgttgcccttattctttaaaaacgtcgggcacgtttttttaaatggtgagtggcttgtgttataggaatgctttttgtaaatatattacttcatttccctgatacgcttcaatgcctcttccaatttatggtctttgcagcaaagcgagatgcggatataccgttttccgttacttccgaagataaatcccggcgtgatgaacacgcgtgcgttgtgcaacaccttttcggtcagttcttccacgtcggcacagctatcgggaatttttccccagaggaacatgcccacctgtttttcgtcgtacgtacatcccagtgcatgcatgatttctccggccagatggcggcggttgcggtaattcttattgtttccgtcgtaccattcctgttcggcttccagagcgttggcggcagccagttgcatggcgcggaacataccgctgtcgatgttgctcttcactttcagtatccattgcacaaagtcagcgttgcttgccagcataccgatacgccagcccggcatattgtggctcttgctcatggagttgaactcgatgcaacactctttggcgcccggcacactgaggatactgagggggtggtcgttcaggatgaagctatacgggttatcgtttacaatcacgatgtccttgcgtcgtgcaaagtccaccagctttgcataaagttccggggtggcgttagctccggtcggcatgttcggatagttggtccacatcagctttacgcggctcatgtccatcttttccagttcgtcgaagtcgggcatccagccgttttcctctttcaggttgtagttgatgacttccgcgcccagtatcttgctcaatgaggtataagtggggtagcccggattgggaaccaatacctgttcgcccggattgacgaaggccagtgtgacgtgcaggataccttctttcgagccgatgagcggttgtatctcagtattaggattcagctccacaccgtaccatttcttataccaggcggcaaagctgcggcgaagttcggggatgccgacataaggcatataaccgtgtccgtcaggattttgtgcttcgcgacacagggtctgtatagttgcttccgagggaggcatgtcggggctgccgattccgaggctgattacgtcttttccttcggcattcatttgtgccacctctttcaacttcttggagaagtagtattcgctcacgctggccaaccggtcggcgggcttgatcttagatgtttgattttccgtctgcatattcgcctaatattttaagttctttggttagcggtgtgatggccgcgatggattgtttatatctcagtaggttgtcgaaaacaacgtctacgtaaaattggtattcccattcccgcccgatgatgggcagtgactgtatcttggtcaggttgatgctgtagaacgaaaggatggacagtacttgcgagaggctcccttccgtgtggggcagtgtgaataccatgcttgccttgttggtttccgggtgtggatggcggtgtatctcgtccacctgccaagggtcggcaactaccagaaaacgggtgaagttgtgcttgtttgtttcgatgccttcctgcaacaccttcatgccgtaacgctcggcagcggccttggaacagatggcggcgtgtcctttcaggttctcccgcttgatgatttcggcgctgagggcggtgtcttccgcttccactactttcattttcgggtgctgggcaaggaactcgcggcattgcatcagtgcgatggggtgggagttgacttccgtcagatcgttccagtcctcgtcgggcaggcagacaaagctgtgtgaaatgcgtagtttgtattcgcctatgatttgtgtcccgctctgccgcagcaactcgttgttgtgcaacagactacctgcaatggtattctctatcgccaacattcctatggtcttgctgtctttcttcacggctgcaaacacgtcctcaaaagtagcgcaacagattaactctatttcttctccttcgaagtacttgtgtgcggcgatgtcgtgatacgaccctaatgttccttgaatggctattcttttcatactgtttctttaaaaaaaaatcccgcttccatacaatggagcgggattaagtatattactttagttctctattcagttcttaagcatcactgtcacttgacacatacaaactcccgctctactttctggctaaagtaaaagtaaaaaaagaagtaatatgtataagtaaacaaattcatactttcgttttctttttgtttttaatttcgtggcaaaagtaatacttttctcttatatgcaagcaaaaaatgatattttttttatttcttcttcaaaattagctttcagacgagtgcttccgtctgtctttttttgccggaaatctgtcaatcgtcgtgcatgattcccttgatttgctcccatttgttcacggcatcgttggactgtgccttgcccggagtgctacggccttcgcggatgtacttttgcaacaggtctttcagttcgctgactatttcggggtgctcctgatagacatttttgctttcggtgggatcgtctttcatattatagagttgtatcggtgggagctgggcaatggcttccttgtccacacccggtttggggtaactccaaccgccggaactgggggaacacaacagtttccagtctcctttacggatggcaaactctccgcggatggagtggtgcacggtggcttcacggatggttggtgtgtggtgcggattccggatgaggggaagaatgttgtagctgtcttccgcttcgttatctttcagggtataatggttgagggcggcaaaagaggcgtagaagtcgttgaggcagacggtttgtgcacagttgcctcggcctgtaccgttggcccattccacgatggtgggtacgcggtgaccgccgtcgaagaggtcggctttcatgcctcgccagatatagttggcatgatgccccttagcggccatctcggggatacctccggcgggagagcaaccgttgtcggtggtgaagactacgatggtattggagtctatgccgttgcgtcgcagggcttcgcgcacttgtcccactacatcgtccaccatcaggacgaagtcgccgtaatcacccagtccggtttttcctttgaaggctttggcgggcaggatgggggtatgaggggcgggcaggggcagatagaggaagaaggggcgttcgtcttgcgcatggcggttgatgtagtctactgcgcggtgggtcaggttgggcagacagtcctggtggttgaagtcgttgcctatggcgcctgcacgccagaaagctggtttctttcctgcaggtacggtgcctatttgcgtggtggtgggctggcggttttctatatatacatagggagccatgtcgagggagccgcagaagccgtagaagtagtcaaagcctaagtcggcaggaccgttggtgatgggtctagagtagtccacgtcttcgtcgttgaggg

SEQ ID NO: 1094 - DNA, 24578 bp, synthetic construct
  misc_feature 1..24578: note = Synthetic
  source 1..24578: mol_type = other DNA
cacaaaaggttgaatcgtaattattcgtattaatattcatgtcgaaggatcactgggcttttaaattgcatattgcgtaaagcatagattgtgccggctaaatacggtaatttcctataagacggatgggggaaatattttcccaccctgccaaacatacgtatggcccttactttcagcataacaacacatgctttttgtttaataatttggtttaaccgaaacagggctggcttataacaggggactataaacaataaaattagctgataaccagtgaatagcaaaaatcaaaactcagttatattgctataacacgtaccttttacattcaagaaatgcgcaacatgaaaagccttgttctcctttttgccactacactgctattattatccggcttaaaaagccaggaatcttctaacatttcattaattccacaaccagtgtcggttgcccggggtacaggcttttaccagctgaaagatcctcttattatcagcgcccctccgcaaaacgactcggtaaaattcgtagccaactttttaagcaaccggctcgtcaatacaaaaggaggctgggtatccactgaattttcagaatccgccggcaaggcacctatccgcctccaactgcttcccaaagaagataacgaaatcggaaaagaaggttaccacctttccgtttcagaagaaaacggcgtgttaatcaccgccaatacctcaacaggtcttttctatggcgtacaaacgctcctgcagttattacccacagctgccgccggccatacggtagtcgaaggcgtacaatggcagatccccgccgttaccatcaaagactacccacgcttcaaatggagaggtatgctcatggacgtagcacgtcacttcttcaccaaagaacaggtgaaacagttcatcgataacatggccaccttcaaattcaacatgctgcacctgcacctgagcgatgaccaggcatggcgtgtcgaaattaaacgcctgccacgcctcacggaagtaggcgcctggcgcgcagaacgcaccggcagatggggcgaattcaccaaaccatcacccgacgaacccaaaacctacggcggcttctatactcacgacgacataaaagaactcgtaaaatatgcagcagaaagaaacgtgaccatcctccccgaaatagatgtccccggccatagcctcgccgccatagccgcctaccccaacctcacctgtacacccggtacctaccaggttagctccggtgaacgtatcatggtttgggataaaggcaccttctacgccctacaggataataacctctgccccatcaacgaaagggtttactcctttctcgatacagtattcaccgaaatagcagaattattcccgttccagtatatccacatgggtggcgacgaatgctacaaaggcttctgggaaaaaaacaaacaagtacaggcattcatgaaaaagcagggattgaaagatgccaatgaattacaaagctatttcgtaaaacgcgtggaaaagatcatccagtcaaaaggaaaacgcctcatgggctgggacgagatcctgcacggcggcctgccccccgatgctacagtaatgagctggcagggaatgaaaggtggcatcgaagcagccaaacaaggacaccaggttgtaatgtcccccaatagctacgcttatctcgacctctaccagggcgaccccattgccgaacccccaacctattccatggttcgcctaagcaaagcatacgaattcgatcccatgccacccggcgtagactcatcactcatcttgggcggtcaatgtaacctatgggccgaacgcctgcataccatgcgccacgcagaatatatgctctggccccgtgcactggctatctcggaaagcatatggagccagcccgcagccaaaaactggaacagctttataagcaaagtggaacatcagttcaaccgcttcgacgccgcatccatcaactactcacgcagtatgtacgaccccatcttcaaagccggtaaggatagcaacgactctttacaaataacgctctcaacagaaatagaaggactcgacattttctacagcttcgatgaaatgtttcccgaccagttctatcctaaatacacaaccccgctaagcgtccccaaaggagcagccaacctcagggtagtcacctaccgcaacggcaaaccagtgggtaaacaaataaaaatgcctgtaattgaattgaagaaacgcgccggtatcaaagtgaaggaaacgccttaagcctgggtaaaaggcctaggctttgccctcccactcagcataaaactgctccagaaagcgctccatgaacaaatgcctttcacaagccatagccttcccggtagcagtattcattttgtctttaagcaacagcagcttctcataaaaatgattgatggtgggcgctgtgctctgtttatactgctctttggtcatatgaagcgccggcgcaatagccgggtcgtaaatagccctgtttttaaacccaccgtaattgaaagccctggcaataccaatggccccgatagcatcaagacggtcagcatcctgcacaatccccagctcaggcgtataaaaatcagcctggctttcattgctaagctggcccttaccctgccctttaaaatggtttccccccttgaaagaaatatgctgaacaatgttcaccacctgccctatgatagcggcaggcaggtcaagtgtctccagaaaaaaacgggctttaattgggccaatagcctcatcgccattatgaaatttcgcgtcggcaatatcatgcaaaagagcccccagctcaacaaccagtaagtttaccccgcttccatccccggccggctcgggaagcctcgcactttcaccttccgcaattgcacgcgccgtttgccacacccggtaaatatgaaaccagtcatggccggattccgcacccgccagtgcctgttgtacataggctgctgtagtctctattatcttttcctcttgggataattccatgggtatcgtttctgcaaatgtaggcattcaatcattttgctcatttttttatcattgctatattttttagtatttttatctcccatgtgtgatagaatattagagaagctggccattttagccgatgcagccaagtacgatgtcagctgttcttccagcggcagcgaccgtaaaaacaacaaccagggattgggcaatggccataaatccggcatctgccatgcctataccgcagatggccgctgcgtatcgttactaaagatcttactaaccaaccattgcatttataattgcgcctattgtgtcagccgtagcagtaacgatatcaaacgcgctgccttcacagtccaggaagtggtagacctcaccatccagttttaccgccgcaactatatcgaaggcctgttcctaagttcaggcatcttcagagaccccgattatacaatggaacggcttgtccggatcgcaaaaaaactgcgtacagaacaccgcttcaatggatacatccacctgaaagccatccccggagccagcgaatccctgctgcgcgaagccggactgtatgccgatcgcttaagcattaacgtagaaatgcccacagaacaaagcctgcagctgctggcgcccgaaaaaaaacggaccgacatgctgcaccccatgaaatacctatccaacgaaatcacccagtaccagcacgataaaaagatcttcaaaaaaacaccgctgttcgccccggcaggccaaagcacacaaatggtcatcggcgctacacccgaaaacgatatgcagatcctgttcatgtcacactacttctatcagaaaatgcaattgaaacgggtctattattcaggttatatccccatcagctacgacaaccgcctgcccgcaataggcacacccgtgcccatgatccgcgaacatcgtttataccaggccgactggctcatgcggttttatggctttggagttgaagagattgtaaaccccgattacccgctgctggatatggatatagatccgaaattaagctgggctctacgcaacctccatttatttcccgtagatataaacaaagcagacctctcactcttattacgggtaccaggcataggcgtttcgtcagcacagaaaatagtagcggcacggcgcttccatactttacactacgaacatttaaaaaagataggcatcagtttcagcacagcgcggtatttcattaccactaaagccgatggcttcagggaaagagaccttacccctatgcaaataaaacaacagctgttaaccatacagcgaagcaagtaccgccccaacttttccccacagcttcaactcttctaagtaatgcagttactcgtttacgatggcagcttcgccggcatcctttgcgccgtcttcgacgtatttgaatacaaattcaaagaggtaagacttgttcttgccaacacgcaaagtggcctcttgtttggccgggaacataccgttatcaccgatgaaacaaaagccgcacgtgtatttacaggtttaagcaagcgcatatcggcaagagcattaacacagctgcggttagcctacctgtccgaacaggcagatatcgccggtatactggtacattacatgcagtacgccttcacctcaccaacttcggtagaaacagattttagccaccccgccgtattatcagtcgctcaggtagcacgaaaagtaaaccgtgaaaaacaccgcatggaagccttcatccgctttcagcttacaacagaccagatctattatgcagtgatagagcccgactttaatgtacttcccgtcattgcaaatcattttaaagaacggtttgccgatcaggattggctgatctatgatgcccggcgcaaatatggccttcattataacaggcaggagttaaccgttgccaccattacatttgaaggcccggtgcaggcaaaaaacagcagcgcagtatacgatgcatcagaaaccctgtaccaggaattatggcggcgttatttcaataaaaccaatatagaagccaggaagaatacacgcttacatatcaggcacatgcccctgcgatactggaaatacctcgtagaaaagcagcccgtgcgttcataggttagcaataaatgctatagcacataatgtacacaggcgccagcaaccaggcggcagcttgttattcacatcacatatagggcttcagttgcttatgccatatgtcgtaaccactgcttagcatatgaagattatctttcttgaacaaccccggcataggtttgccatccttccccagcatgggtttaaatacatccacaaaagtccatttcgaatacttttgcgatgctatgaaccgcgcaaccaggttattgaactttatagtttcagcactgaacttctcacggctgggacttggcttggcagatataaaatagaactgggttgccggcaaactatcattcatcagcgcaaacacccgcttaaaagtatggaataccgaatcggctttaatacccgaagcaatatcattttcacccgcatacaagaatactttcgaaggcttataggggaagatgatcctcgaagcatataacggaatttcgtaaagatgaccgccgccaaaaccacggcgaaaagtagcatagtccctgaaacgcgtttcaaaatcgtcccagagcctgatagaagaactgccggtaaacaatagctgccctttcttgggaaagctgatactatcctgtcgctcaaatgccctgatctccttttcatgatgcccttgctgggcgttggcagtaaccaggaaacaacacgtgaacagtagcaggaaataatttttcatatgtcttattttcccatgaagttactttagttttttccattgccaggaggccctcaggctggaaacaaaatcatagaaccgccgcaacgcttctgcccccctggccccataatcattggatcttcttcaccattaagcgccttaagaagcttggctgcagatatacgagtaccgcaacccttaaaagataagattattgaatactcgatttaattattaataggtctgtgatcatcatacaaacaaagcatccagcgatagcagcacaatctccgctccctcaaaccccgttaccaattacaggcgtagcccttggctatttcagcacctattccccacaaagcaaacggtacattgtaaaataattcaattgtcacaaaagcctgttcccaggccgctatcgccctatgcctgtggcctacagcccgttccgtatataactggtagaattgttacaaaatgtttatttcctgtcgtcgtaattcatgatccccttttccgcagcgtaactttttagctgctccaggcgaaaacgactccagttatccctttcctcgttactgatagagctgcggaagcacgtcgttgcacagttaggcgtttcatgcaatttgatggaatggagacgcagatcctggtattcaaggaaaagcgcgtctatggccaggaaaagctcttttgccacattttcaacagaagggttgcaatattcaccttcgccgttgaggctcatgagccagcgcctgcttttggtagcgtcggccgctttaatgagttccacatccttcggattgagtataacaccatgatcgagcgtatcttctatccactgcacccctaccctcttaatttccttgaaatcaatggcataacctatttgttccatagcgccgaattcaaagatcaggtcatagagataagtgtggccatggatgctgaaacacttcgttttttcattcataatccggtgcccggcgtcgaaggagccctttctttcaatcaattgtatacccatcacaaagcggttaaaagtagatcccggttcgagataaccggaatttaaccgcaaaggtaatattttacaccgaagcacgccagtgagtaaaatcacccccagaaaccgtttctaccaacgctcatatacacacactccgcctaaagctgcctcccggtagttaagctgtcaaaagaggcacacccaaaaaccgcaaaaccaggccagcatttaacattatttctcacatttaacaatgttaattatctttaccggcgtttaaagcacagatatgaagcataaagaattgcagggacagcggatgcgaggctatttcctggaggcaacaaaggagctgctgaagtccgaaggactacaaagcatcagcgtaagaagcatcgcagataaggcagggtattcctacgcaaccatgtacagctatttcaaagacgtgaacgacctcgtcttcctctgtgtccagtcgttttatgaagaatgcaaacaggaggtaagacaatccctacgcaaaaaagaaaaaggcataaaaagtcttaaggccgcaatccgcgcctatgccgactatttcatccagtatcccggcatctttgaattgttcttcctcgagcgcacaggcggttcaaaagagcagaaagagatcgcacaattgatcagcgcttcactcgacaccatctgcgaagaagactggaaccactgtctcagcaaaggagtaatagaggcagcaactattgaacagctgaaaacccaggtccgttacaccgtgtacggcttattgctgttatacctgaaccggaaaacgcccgcatcttataccgaattcataagcacccttacacgccaggtggatacgatactcgacggtacagccaaagcaattccggccccacctgctgaaagcggcagcaccgttcaaaatgcacttattgcaattaacgtaaaaaaggtaaacaaacatgagtaacaaaaaagagctgaaagaacaatacaaacaaatgaagttcaggatgggcatattccaggtaaggaacaaaacaaccggcaagatctatgtggcatcaagcataaacctcgatgctatatggaaccgccacagaacacagctaagattcggcgcccacccggtcaaagcacttcagcacgactggaacacctatggcgaagagcagttctcctatgaaatactctccatactcgagcaaaaagacgaagacacccacgatcccaaacgcgaactcaaagaactggaacgcatgtacctggaagaactaaaaccttatggcaaccggggctataatagggaataaggccgctggccctatccctgttagcaatcttatattaccacttgccccctaagccataccggcagaaatccatctccgccacctctcctctccgcccctaacgttgccgtctgctccttaacgcgcctgctaaatacataaacaaataaaatatttgttttcccgtaacaatctgtcaaaaaaacttttataatattaccctacataatcaggaatgtgtcgcaatcagttgtttgacacaatagtcatgtgtactgcaaccaattgtttaacataaccagttgtgtagcgctgtcagcttatcccccgttttttgtaagacagattttttaacccatataggtttactatgcttgtcaggaagcctatatcatgcaaaaccctttatctatggatttcaaagacacaatcaagcaacttgccgaacgcattctaaaacacaaagagttagtacataccgaagaggccacgaagcattcattcgttatgccttttttacaggcattaggttacgatgtttttaatccaatggaagtagtccccgagttcattgccgacctgggcatcaaaaaaggagagaaagtagactatgcgatcgtaaaagatggtcaacccattatactcgttgagtgtaaacattggtcggcaagccttgatccgcacaattcccagttgttccgctatttccataccaccaaagcaaaattctccatccttaccaacggatttgaatcccggttctacacagatctggatgagcagaacaaaatggacgagaaacccttcttcatattcgatgttaacgacatccgcgataaccagctggaagagctaaagaagtttcacaaaacctatttcgattcagagacaatcgtatccacagccagcgagttaaaatacgtagggcagttaaagacattactacagggagaacttaacaatccaacacaggattttgtaaggcattttgcaaagcaggtttacacagccggcattctcacacaacgggtaatggatcagtttacccagctaacaaagaaatcatttcaatactatatcaacgacctgattacagagcgcctgaaatcagccttacacaaagaagaaacagagcaggtagtcatttccgccccggaagccgcagcagaggaaaacaagatcatcacaacacaggaggagttggattcatttcaaattgtaagatccattctgcgtcagcacgtgccggtacaaaagatctctcaccgcgatgcgcaatcatacttcgccatcttatttgaagacaacaaccgcaagcccatttgccggatgtacctcaacggcggcaaaaagtatattggattatttgacaacgaaaagaatgaaaccaaaaaagaaattaccaccctggatgacatcttcctgcatgcagacgccttgctaggaacattaatgaactacatgccaaaagtagaggcataaaaaaagcgacttgcgccgctcaaaatgtttacacaacggaataatccttattgtgacttactttcggaataaaggtaaagatttataattaaaaaggagattaattcatttagaaataatctcctgaaagtaaaccacaacactcattgaacataaagcattaaacatgcaacacttaatgatcatagagtcttttaagaaaagatggatgcaagtgatcctcctttggagggagaacccgacagattggcgcctgagcaaattggtagcgacccaaaatcttgtttccaagtcaaatatagaacaattattgttcaatgagtaaaaatatactttttatacttaaaattgccagatgaacagaattctcggattagacctcggcaccaactctatcggctgggcgttgattgagcaggatttccagaacaaatatggtaaaatactaggcatgggtacccgcgtgataccaatgtcacaggatatattaggcgaatttggtaagggaaattccgtctctcaaacaaaagaccgaacccagttcagaagcacaagaagactaagagaacgatatcttttaaggagagaacgcttgcatagggtattaaatatattgaacttcctgccccaacactacgcatcaagcatcgactttgaaaagcgcctgggcaaattcatagctgaaacagaacctaagattgcctacaaaaacagctgggatgaacaaaaaaacaaaaagaactatgaattcatattcaaagatgccttcggcgaaatgcttgaagatttcagacaacatcagccactattactggtagatgaaaaagggcaacctcgcctggtcccctatgactggacaatctattatctgcggaaaaaagcattgaccaggaaaatagaaaaagaagcattagcctggatactactcaacttcaatcagaaaagaggttattaccagcttcgcggagaagaggaagaagagaataccagcaagtcggttgaatttcattcactgaaggtcatagaggtaattgcagatgaaacgcaaaaaggcaaggcagatacctggtacaccctactactggagaacggctggaaatacaggcgctcaagcaaaacacccttatttgactggaaaaacaaagtcagagattttattgtcaccaccgaattaaatgacgatggttctgtaaaaaccgataaagaaggaaatgagaaaagaagtttccgcgctcccggtgaagacgactggacgctattgaaaaagaaaacagaacaggaaatcgcgaaatcgaagcataccgttggtgaatttatttatgacgccttacttaagaatcctcaacaaaagatcaaaggaaaactggtacgtacaatagaacgaaagttttataaagacgaactaagacaaatcctgcaaaaacaaaaggaatttcatccggagttacagaatgaggaactgtatagcgattgcatccgggaactctatcgcaacaacgaagggcatcgggaattattaaacagcaaagagttcgtccacctgttcctggacgatatcatcttctatcaacgtccattgcgaagccagaaatcatctattggcaactgtacgctggagccagccatcacctaccttgataaaggagtagaaaaagagaaacgtttaaaagcaactccaaagtccaatccttactaccaggaattccgcctgtggcaatggatctgcaatctttctatttacaaaaaagagaatgacagcaacgtaacaactgattttctaagcagcccggaagatgcagaaagactgttcgattttttaaacaacagaaaaaacatagagcaaaaaacactgctcaaatatttcctcgaacagaagggattcaaaggcaagctacttgctgcggaaacagaaaaatttcgctggaactatgtagaagataaagattacccctgtaatgaaaccgcagccctgataaattcaaggttggaaaaaatagaaggagtcaatcctggatttcttaccagggaaatcatgcagcagctatggcatatcatttattcagttactgataaaatagactatgaaaaggcacttaaaacctttgctcaaaagcacctgttgcctgaatcgggatttgtagaatcattcaggaagtttcccccctttaagagcgaatatgcttccttttcagaaaaagccatcaaaaagctgttgccattaatgcggcttggaaaacactggtcctgggatagcattgataaagcatcacaacttagaatagagaaactactaacaggtgaatacgatccgggaatcagcgatcgcgtaagggaaaagctcagttcgctcacgaaagaaacagactaccaggccctgcctttatggatggcccaatacgtagtgtataaccgtcactccgaagcagcatctctcgataagtggtcttcagtagcagatcttgaagcctatttgcaagccttcaggcaacatagcttgcgcaatcctattgtagaacaggttataatggaaacactccgggttgtaaaagacatatggatacaatatggccagggagccaaagacttcttcaatgaaattcatgttgagctaggcagggaaatgaagaatacaaaagacgacagggaaaaaatgagcaggcaggtgatagaaaatgagaacaccaaccttcgtatcaaagcattactggccgaaatgatgaacgatggtcaaatgcaaaacattcgcccttattcaccaatgcagcaggagatcctgaaaatatacgaggagggcgttttattgtccggcatagaaatagatgacgatatattaaaaataagcaaaacagcacaaccttcccctgcagatctgcgacgctataagttatggctggagcaaaaataccggtcgccttacaccggcaatatcattccgctgaataagctgtttacacccgaatacgaaatagaacatatcattcctcaaagtcgctacttcgatgatagctttagtaataaggtaatttgcgaagcagcagtaaacaaactaaaaggtaatcacataggcttggcctttatcaaaaagttccatgggcagaaagtagagtgcggactcggaacaatacccgcaacaatttttgaggtagcggcatatgaagaatttgtaaagcagcactactccaaaaatcgcagcaaacgcaacaaattattactggaagagatcccggaaaagatgatagccagacaactgaatgacacacgctatatcagcaaattcatatcttccttactatcgaatatagtacgggcatcagagaacgacgatggtgtcaattcaaaaaacatcattcccggcaacggcaaaatcaccaccgaattaaagcaacactggggcctgaatgacgtttggaatgaactgatcctaccgcgcttcgagcggatgaatgcattaacgaacacatcactatatacagcctggagcaacaatcatcagaagtttttgcctgcggttccactggaagcctcaaggggattttcaaagaaacggatagatcaccggcaccacgcaatggatgccctggtaatagcttgtgcaacgagagatcatatcaacttactaaataacaagcatgccgattctccccagcagcggttcgatctaaacagaaaactaagaaagtttaagaagacatcgtacacacacccacagaccggagaattgatagaaagagacattccggatgattttcttaaaccatgggagagctttacaacggatgcccggaatagcctggaaaagatcattgtcagctttaagcaaaacctgcgggtgatcaacaaagccaccaatcactacgaaaagtacatagaaaaagaagaagggcttgttaaaagcgttcaggtgcagcagggagtgaactgggcaattagaaagcccatgcacaaagacaccgtcttcggcctggtacaattgcgaagaaaaaaagaggtttccttaagcttagccctggatgttataaacgacatcaccaataaagcgcttagaaaagagcttcaatcgatggcaaaacaaggaaaagataaaaaagagatcctcaagtatttcaaagcggccaacaacatatggaaggatatagacataacccgggtagaaattttttatcaggaaaacgacaatgtagcatcacgagtatctctcgacgatagctttgatgaaaagcgaattgaatcaattacggataccggcattcaaaagatcttgaataatcacctggccaactacaagggtcgtttggatgaaaaaggaaaagagatagcgccccccctactggccttctcacctgaaggagttgaagagttaaataaaaatatcaaagcacttaataaaggaaaggcgcatcagcctattttaaaagtgcgtacctatgaacccaaaggaaacaaatttaatataggcgaaaccgggaataaaaaagccaaatatgtagtagcggccaaaggaaccaatttattctttgctgtctatcaaggcaaagatggcaagcgaaattacgagacggtacctttaaacatcactattgaacgccaaaaacaagaactacctcctgtccccttagaaaatcaaaatggcgaccctcttttatttgctctttcgcccaatgaccttgtttacgtcccttcagcggaggaacggactgcagaaaacagtatcaataatggcaattttgatgcgcaacgtgttgccaatatctacaaagtagtaagctttaccagcaatcaaatattctttgtaaggcaggatgtggctacgtctatcgttaacaaagcggagttttctgccctgaataaaatggaaagaaccattaatggcacaatgataaaggaagtttgcgtcaagctgaatattgacagattgggacatataaagctttaaaaatgataaaacgtactttatattttggtagtcaagcatacctcagaacaaatactgagcaaatggttattgaattatcagaaagtggcgagatcaaatcggctcccatagaagatattggcgtacttatattggatcatcaacagataactataacgcaatccttaatagcgaaactgttagctaataacgttgcgcttatcacctgtgataacacacatcatcccgttggccttatgctaaatcttgatggccataccctacaaagtcagaaatttcaatgccaggtagaggcctcggttcctctaaaaaaacaattatggcaacaaacagtcgaagccaaactagttaaccaggcagcggtattaaaagccgaacggataaacaacaaatatatcctaaaccttgcccaaaaagtaaaaagcggcgacagtgacaactgcgaagcacaggccgcttcttattattggaaatatattttccccgacttcctcgagttccgacgcgaacgctacggcccacctccaaacaatctcctgaactatggatatgcacttgtaagagcaatagtagcccgggggctggttgcaagcggactactaccaacactaggaatttttcatcggaatcaatacaatgcctattgcctcgccgatgacataatggagccttaccgtcccttcgttgataaaatagtatgtcaaatcatcagaggcaacggccggttcctggagatgacgccttctatgaaaaaaatgcttttagaaattcctgttatggatgtccttatcgatggacaaaaaagtccgttaatgaatgcagttcagcgaacgacagcaagtttggccaaatgttttgagggaaaaggccgaaagatattatacccggtactggagtaaaatcagccaccgcatgtatgtttaaccgtttaaacgcctatcgtattatgtgggtactcgtattctttgacttgcccactgaaaccaaaaaagatcgcaagcaatatgctcttttcaggaaaagagtactggcagacggtttccagatgttccagttcagtatgtatatccgccattgcagcagccgtgaaaatgctgacgttcacctgaagagaatcaaaagcattttacctcccaaagggcatgttggcatcatgtgcgttaccgataaacaatttggcatgatggaaattttccggggccacgatttggttaacggcccagaaacaattcaacaacttgagcttttttaagaaaacaggaataaaaaaatgtattcaactggcatttttttattcctgtttttccatctaattatttcaatagcaggaacttataaacttcctgctgtgaaagaactaatgtacatcataaattgaaagtaagtcacaacgaggtcctgaatacgaccggcgaagacgggctgtgaaagaactaatgtacatcataaattgaaagtaagtcacaactaagtcattacacaatgagttagagcttttgctgtgaaagaactaatgtacatcataaattgaaagtaagtcacaacctataacgtttacagaatgtgtaaaatgaagctgtgaaagaactaatgtacatcataaattgaaagtaagtcacaactgttccatcgtttacgttttgaaatttcatgctgtgaaagaactaatgtacatcataaattgaaagtaagtcacaacccgcactggcataccaccagttgatttaggctgtgaaagaactaatgtacatcataaattgaaagtaagtcacaacgaggaggtaaaattccctatgcggtgtgtagctgtgaaagaactaatgtacatcataaattgaaagtaagtcacaacttggatggcacacagcataaatggtactcagctgtgaaagaactaatgtacatcataaattgaaagtaagtcacaactgaaggacatgcctaaaccatcgaacccagctgtgaaagaactaatgtacatcataaattgaaagtaagtcacaacctgctatggtattgctcatacagcgcagccgctgtgaaagaactaatgtacatcataaattgaaagtaagtcacaaccgagcaaaccttttcttaattgacttacggctgtgaaagaactaatgtacatcataaattgaaagtaagtcacaacgtgggaacataaggcctgtcttcggttctggctgtgaaagaactaatgtacatcataaattgaaagtaagtcacaacatttttacgggcgtttctattgtacttgtgctgtgaaagaactaatgtacatcataaattgaaagtaagtcacaacgaccaaggttccagtatctttgactttcttgctgtgaaagaactaatgtacatcataaattgaaagtaagtcacaacccaaagcgacataccatttattattaaaagctgtgaaagaactaatgtacatcataaattgaaagtaagtcacaacccatatttaacaaaaggtgtgcaggtatacgctgtgaaagaactaatgtacatcataaattgaaagtaagtcacaactgtctaatgtgaaccatttgaagtatgcatgctgtgaaagaactaatgtacatcataaattgaaagtaagtcacaaccagcgtgacgaagacatggagttaaaagcggctgtgaaagaactaatgtacatcataaattgaaagtaagtcacaactaaaaggagcccgccttatccctgtcctgggctgtgaaagaactaatgtacatcataaattgaaagtaagtcacaacgccacccttatcatccagcagctcttcctgctgtgaaagaactaatgtacatcataaattgaaagtaagtcacaacagatagttgtcggggaatatgttcaataacgctgtgaaagaactaatgtacatcataaattgaaagtaagtcacaaccataatggcaaaagcaaattacagcctttcgctgtgaaagaactaatgtacatcataaattgaaagtaagtcacaaccccataactcaggctttggaacttgtaagggctgtgaaagaactaatgtacatcataaattgaaagtaagtcacaacaaaaattgagatccgaaaaaagatacttgggctgtgaaagaactaatgtacatcataaattgaaagtaagtcacaacgtaatgaaatgcttgatgcaattgaccctggctgtgaaagaactaatgtacatcataaattgaaagtaagtcacaacatgcaggtcgcaggtgatgaacacgatgtgctgtgaaagaactaatgtacatcataaattgaaagtaagtcacaacggttccgtaaactaatattaacgagtaagtgctgtgaaagaactaatgtacatcataaattgaaagtaagtcacaacaactatagcttttcctgcctgcaaaacactgctgtgaaagaactaatgtacatcataaattgaaagtaagtcacaaccgctgcaattcgctggcattcatacctaagctgtgaaagaactaatgtacatcataaattgaaagtaagtcacaactaaatgagaggcaatacgtcaggacgtggcgctgtgaaagaactaatgtacatcataaattgaaagtaagtcacaacaataatgggtatgtatactgatttttgtagctgtgaaagaactaatgtacatcataaattgaaagtaagtcacaacccacttggaataatagttatttttctgcagctgtgaaagaactaatgtacatcataaattgaaagtaagtcacaactgagcatcctcgtttaatttttccaaggcgctgtgaaagaactaatgtacatcataaattgaaagtaagtcacaacgatgaacttcttttgatccgtctgcgttcgctgtgaaagaactaatgtacatcataaattgaaagtaagtcacaactaaccgtaacaccatctcgcaccgttaccagctgtgaaagaactaatgtacatcataaattgaaagtaagtcacaacttataatggaataaatacttttacaaaaagctgtgaaagaactaatgtacatcataaattgaaagtaagtcacaactacatctcaatgtttctcccactcatcttggctgtgaaagaactaatgtacatcataaattgaaagtaagtcacaacgcggcatccttaggcatatgaatagagggagctgtgaaagaactaatgtacatcataaattgaaagtaagtcacaacataacagtcgatgggaagcaaatgaccttagctgtgaaagaactaatgtacatcataaattgaaagtaagtcacaacataataagcagcgtcgtgatgctctcgccgctgtgaaagaactaatgtacatcataaattgaaagtaagtcacaacgacagcgaaggtattggccattgtaaagaagctgtgaaagaactaatgtacatcataaattgaaagtaagtcacaacaagtgtgaacagcttaaagaatgggctgctgctgtgaaagaattaatgtacatcataaattgaaagcaagtcacaacgtcaaaggcttttttccttctcacctaccgcctgcgaaaaaactaatgtacattttaaattggaagtaagtcgcaactataaccaaagattgcaggatgagtagcaaagctgtgaaagaactaatatacatcataaattgaaagtaagtcacaaccaatccagggatgttccctgcgtaaactgtcctgcgaagaactaatgtacatcacaaatcgaaagtaagccagctttctgttattttggagtccgtgaaggaactaatatatcgtataagttaagaaagaacataatacctaaagtctcgaaagaaattaaaaacataacatattgcacccaaaatagcaaaacataccgcatctttttgcaaaaaaatctaaactttagaagaagtcttatacttacgcaagcaatacaaatggggttatacccttccaaaaatctaccactccgccacaaacgaaggcgaaaactccagcgcatttatattatactcctccatcaccgtcttaaatgcttcagacaccactatcctgttatcaaaagaagagcgtacaatatggtattcaatttcatactcctccaatatgccgtcaatgagcgctatcttttcaaagtcgaaagactggtctacagcacttttttcataaacagatctttcaagatcgtagcagggaagtttagtgtaaacattcataacgtaaaaacctgttgcaatatgtccacgatatgcaatatcacactccaggagttgtacctggtgcggaaactgaagatctataagattcttgagcctggtgcttacaattatccccccggaaacagagcgcatagcatcgtactgcagaatggtgtcccacggaagatcactgttgttggcatctgcataatgcagtggctcagtaagaactgaaggattaataaattttccaagatcgatatcattatcgatatcaggattgtttttaccgaatttaacgggatagtctggcaagctcgtgatttcaaggaagtagttcatagtatcgttttctaattagggacttgccttgtaacgaacaaaaatgaaaccaaactacaaagcaacataacagaatttcacgctgccagctgagcaattagccatcgtagctcatcgacacgatcctttttccatcaaacgaaatatccagcaaatgatcctgcgctatctcatcaccgcaggtaatatcggccgtcagctggtgcatacctgcaacggttattctcaccccaaaaatatcaagataattgtaccacgcctcatttacattattctcaaagttcctgttataatagtctatcaactcagctttgcagctgcccagccacttgatataagttagtaactggggaaatacatcttcaagagcaatgttcctttcaagatttatcagcagcggcttgtcatcgaacactttacctaaaatgatattcctgcgcgataccgcaaacaccacttcatccggggcgctattatcttccttcacaaaatcatttagcgtaagctcgggaagatgttgaataggagcaggtttcctcttcaaagcaaaattatcctggtgcgacttagccagctgctccatctcaaaaagtcggcttatatccttacggttgctcttgtcggcaatggcaacaaatatatcataggccttttggtgataacccagtaaagaatacacctgcgaccttaccagcagcgaagttttatcctgcgcgccccctgtttcatccaggaaggcatacaactgcgctatgctttctttcgattgctttgaactcctgaaattggcagaaagatctgcataccgtttcatgatgttttccattaactaagcttttgatgaagaagatgcagcattagcagcaattttcgtgcaaaagcgccgtccccgggcgcctgccagtcctcccgccagatcaaccaatcccggatactgataaatatcagcgccagaaaccagtatagggcttattttgtaacgcaatacaattactatgaaatattttcaactctcccttatccttttagtattactcgctgcgcctgtattggcacacgcacaaacacagtacaattcagcttcagtagttgagaaaggcctaagcctgggctctgttctggcgatcgtaacatcctggtcaagaaataaatccattggatgggctatactgcatgctttgcttagctggctatatgtgttccattttgtaataaccagggcaatgtatggagaataaaacaaaatgggttacagaaggcaacacaccttctgcaacccatttttaaaaagtacagaaactaccttatcaccgtgccttccgtaatctcatcagtagcatgtaaaacaatttcatcatctttagatacatcgccaaagatctccgtttgttcatttgccttaaggccttctttaatgtctgcaaaatgcgccttgccatccaccacttttatgatatactgccgttctgtagagcgcacgatagcatgactgggaaccagcagcgatttcgcgcccgacaagagcggcacctttacttcggcatacatgccaggcttcaattcctggctgctgttgttaacatctatctctatcgcttcagaacgcatactgctaagggcgttggcagtacggctaatgttggccctgttctctttacccggcatgctgttaaaagtaaaactcacctggtgctttaaatccaccttatctacataagcttcgggaatataaacctcgagccttagcttctgaagatgctgcagcaccatcataggcaactcattcgatttaccccctggacccaccagcccgcctgcagaaatattccgctgaacaataaccccatcaaaaggtgccgttatagtaaggtagttaatgatgttcttcattgccgcaacattcgacttttccgacatcacaatggcctcatcagctttcatgcgcgaagccgccatatcaagatcaagcggcgctacagcgccctcttcaagagcagcctctttcaaacgtttatacttctccttactcgctaccgcattctcctgcgcctgcaggtacttggatattgcagcctgcatctgtgattccatttccggggcctccagctgtattaacacctgccctttgcgaaccaccgtaccacgatcggccaacacgtttttaacgaaaccatttactttagcataaatgaacacttcatcataaggcttaagctgccccggaagctttacatagctcgataaaggcatttccatgaccttacctacttcataacgactgctgtcttttttcgttgtatgcccggtcatgtccaccggcttttgattttcatgacatgcagccattgacaaaacgatgcatgcaaatggaagaatatatttgagtttcattttattatttattgaatcatgaataataccagttaccccggccacctattgccttcaggcattacacgtcaccaggttttacactaccgtcaggcgttatacctccttcgggcacaacattaccgtcgggcatcagcgaagatgattgatacgacgcccgctgctgcgtccacgcaaacaccagcggcaacaccaataacgcagccagggtagaagcagcaagccctcctataacagcacgccccagcggcgcagattgctcaccggcttctcccatacccgaggccataggaaccatacccgctatcatagcaaagctcgtcatgagaataggccttaaacgaatgccggcactcgttatggcagatttaacggagtcgcgatagctcatccgcaactgttcagcattcgtaacaattaaaatagcattggctacagatacacccgtactcatgatcatccccatgtacgactgaaggttcagcgtagacccagtaagtaataacgccgccagcgaaccggtaattaccgcaggaaccgtactcaacacagccagcgacaatttaaacgactggtagttggcagccagcagcaggaagatgaccagtacggcaaacaccaaccctgtttgcaaactgcccatggtttctataagcagctgcgacatcccctttacctcagccagcatacccctcgggggatcccccacttctttaagcgctttgcttacttccgcggtggcagtcccgagatcctttttatgaatgttcgcgccaaccgtaagatagcggcgcggcccctgcctgtcgtactcaccgggaacataatccactttaaacgtggcaatatcgccaagagtgaggctgctctggcctttcaccaatggaatttcctttaattcatccatggtgttcatcacaaattcgggaacctgtacctgcacctggtaagtataagctttctcttcatcaagccactgcaccttttcggtaaaacgactggacgaagtacttactgttaccgagcgggaaatatcctttacatcaagcccaagctgtgcagccttcaagcgatcgatagtgatggatacaatcgggaaacgtaatggctgcatgatctgaacatcacgcaggtatggaattttctttaaacgattcacaaccttaccggcataggcttctatctccttcatatcctttcccgccacctgcacttctataggcgttgcagcgccctggctcatgatcttttcagtcatgtctataggttcaaagttcaggcgcaattcaggatgggcataaagtatattacgcctgagcgcatccttcagctcatcggtatttaccttatacttttcatcgaggttcacctgcaccaccgcctcatgagtaccggtgttgaatacataaagattactgataccataactgcttggtataagacctatataagcagagctgatagccaccttatgctgtaccgttgtatctatgatccgtaacacctggcgcagcttttcttctgtccgctccagccttgtgccatcaggctccttaatacgcagttgaaactgcccgctgttcactgcaggcatcatgtcctttcctatgattgcaaaaccgccggcagccagcgcaaatatcaccacaagataggtagctacaataaacttacgacgcggcatccagcgggtaagcaggttacggtagcgcattttaacacgctcaaagaaatcgttctttgcaggctgtgcctcttcctgtttctgatgttcttccacttgcttttgctcctcgctgttaagcgcttcgcccgcatgcgcatgaatagtaccatgatcataatgttgataacgctctgcctttataagccagttggaaagaataggcactatagtttgagccgcaacaaaagaggcgatcatcgtaaagccaatggaaagcgacaacggcaagaacatggcccttggcacacccgtcatgataaacgagggcgcgaacacagccagtatacacaggagtataagcaacaacggaaaagctatctcacggcaggc

SEQ ID NO: 1095 - DNA, 24578 bp, synthetic construct
  source 1..24578: mol_type = other DNA
  misc_feature 1..24578: note = Synthetic
caacgccaagctggtgcatgccaaccgcaattataacgatttcatgcctggattagaggtgggttatgcctttttcctgaacaagaccgttacaatagagccttcggtttattacgaccaatcatttaagaaccattctgactattctaagataggttttaaaataggaataggcgtttatttgtaaaagttggattctatcaattgaatgaaaattttaatgacatgtatactgtaaacgaactggaagacagacttatcgaccttgcctttgccgaggacattggcgacggcgaccatacaacgttgtgctgcatccccgaggatgcaatgggtaaatcgcatttgcttataaaagaagacggcatactggctggtatcgacgtggccaagagggtgtttgctaaattcgacccgactcttaaggtggaagtgcttattgaagacggagcgaaggtcaaggtaggcgacatcgccatggttgttagcggcaaggttcgctcgctgcttcaaaccgagcggctgatgcttaacataatgcagcgtatgagcggaattgcaactatgacccacaagtatgttgagcgtctgaagggaacgaggacacatgtgcttgataccaggaagacgacgccgggcatgcgtattcttgagaagcaggccgttaagattggcggcggaatgaaccataggataggattgtttgacatgatacttctcaaggacaatcatgtagattttgccggcggcataaaaaatgcgatagagcgttgccataagtatctgaaggaaaagtctttagacctgaaaatagagatagaggtccgtaacttcattgagatacagcaggtgattgactgcggcggagtggaccgtataatgtttgacaacttctcggtggacgacactcggacggctgtagagatgatagccggaaggttcgagactgagtcgagcggcggaataacatttgacactatacgccaatatgcagagtgcggtgtcgattatatctcggtgggtgcgttgacccattcggtcaagggacttgacatgagtttcaaggcatgttgaacatagtatggttgaagtggttgaaatgagttgtcgctcgttttaaccactttgacctttcccgaaaatatatgtcatttatcttcacgttgcttttgacgtcggccttgtcgtttggttcgcctgtcaattaccccatgtctttatccggtaatttcggtgagccaagacctaatcattttcatggcggtatcgacgtgcggaccgggcaggtggaaggtaagccaatattttcggtggccgacggttatgttagcaggctgactgttggtttgggtggcttcggcaatgctgtttacgtgcgtcatcccaatggaataaccacagtgtattgccatttgaaaaagtttgtaccgcagctgacagcctttgtgcgtaagtggcaatacgaaaatcagacaagtttcgccgatgtaaagctgcggcctactgattatcctgtggcacaaggccagtttatagccgttagtggaaataccggggcaagcaaggctccacatctgcacctggagtttcattctactaaaacatgggactttattgacccgcttgattatctcaagaattttgtaacagacacgacaaagccgatagtacattcgttcatggcctatccggtagagggcgagggggtgttttgcggttcgcaacgcaaccagtcgtatggctttccgtcaccaaacctcacacgtgagtttacggcttggggcaaagtaggcttcggcatttgggcgaacgattatatggaaggcagttatggcatacttggcgttcataaaacaacgttgacggtagacggtaaaatggtgtttgagagcgttgttgacagtataccataccactgcaaccgcatggttaattcatggggtgattatgaacattactgccgtagccatgtgtggtacatgaagtcgtttgccgacccgggaaatactttgcctgttataaatgtcggaacggccgacagagggattgttacttttgatgaagaacgcgattatcatttgtcatataccgtgtccgatattttcggcaactcgcggcaatatgcttttatcgtaaaaggtaagcggcagaatatatctaaatctcgtcagcagagcgtgatgaacatgctgttctatgaccgtatgaacggttttcagcgtcctgggcttatgttgcttgtcactccggggcttctccccgacaatgttgagttgtcgccaaaagtgacggttaagccggatggcctgtctgacgaatggcgattttatgaccggtcatatccattgttcggatgggcaaagatttcattgagactgaagaagcaggttaaagacccgggaaaattatatattgtgagccattatggagttgaccgtaacatgggtggagtgtttaaggacggctgggtaactgggcggatgcgcgaacttggtgcaagctatgagattgcttatgacgacacgccaccagtattgacggctttcaaggcgtcggcaagaacattacgcgtcgtggcattcgacaggcagagcggtctgcattcgttcaaggggtttgttgacggccgctttgtgttgtttgaatatatggaaaagtccggtgtttatgtgtgcaacttgccgtcagcgcctgtggccaagacaggtggagaacattctgtaaagcttgtcgccgttgacgagcgtggcaaccgtagtgtgtttgatgggaagtttaaatattgatattcattcaaaaccatgtaaaataattactatgaagagattatcatcattactgattgtgttggcggcatacgtttatgccacggcatgtaccaattttattgtcggtaagggagcaagtgccgacggttcggtgttcaccacctataatgccgatgattacggtatgttcatcggcctctgccatttccccgcaggcaagcacgccaaaggagagatgcgtcaaatatacgattgggacaccaaggtgtatcacggccaaattccggaggcaagcgagacgtataacgtcataggtaacatcaacgagttccaagtcagtatcggggaaacgaccttcgggggccgtcatgagatggttgacaccacaggtgtgctcgattacggctcgttgatatacatagcccttcaacgctcgaagacggctcgcgaggctatcaaggtaatgacaactttggctgaaacttacggctattgctcagaaggtgagactttctcaatatgcgacccggaagaggcgtggattatggagatgatgggcaaaggcccgggcagcaagggcgttgtttgggtggcgttgcgcatacctgacaatgcaatatgcgcgcatgccaaccagagccgcatacgcaagttcaaccagaaggataagaagaacgtgatgttttcaaaggactgcataagctttgcccgtgaaaagggatggtttgacggtaaggacgaggatttcagcttctgtgagacatacgcaaacccggatttctcaggaaggcgtttttgtgaagcccgtgtgtggagtttcttcaatcatttttctgacgatatggagcgttacttgccttacgcagaaggcaaggttaaggatgcggagcctatgccgctgtggattgttccaaacaagaaagtcacattacaggatatcagggattgcatgcgcgaccactatgagggcacgccgttcgcccttgacaacgaccccggacagggattgtggggaatgccttaccgcccgacgccgcttactttcaaggttgacggcaaggagtatttcaacgaacgtcctacgtccacacagcagtcgggcttttcttacatagcgcagctgcgttcatggttgccgcgtcagattggcggcatactttggtttggcaacgatgacggcaacatggttgcctatacgccggtttattgcggcaatactgtgcaaccggagtgctacaatacgccaggggcggatgctgttaccttcagcgacaagaatgcatactgggtgtgcaactgggtcagcaacatggtgtacccacgctattcaatgatgttcggttcgctgaaagaggtgagagactcgcttgaagcaagctacgatgccaaccaggctgatatcgaggcggaagcacagaggctttataagacaaacgaggcagaggcggtgaagtacctcaacgcatacagcaacgacaaggcgcagcagatgctggcacgctggaaggaactggccgtttatcttattgtgaaatacaacgacatgaccgtgaagccggaagaaaacggacgtttcaagcgtacagccacaggcattggagcaagggtggagcgtccgggatatacggacaaagccgcacgggagattgtacgtgctacgggtgaaaaatacgcagtgcctgaatgaatttaagaattgaaagttaagagttaagaagtaggaaacttcatttattattatgtttcctacttcttaactcttaatcttatttcacgatttcggcttttattatccttatgtcatcaactggccgagcgttactgtcagtgtcggcccagtcgatttcctttacaacgtcaataccttctattacttccccgaatactgtgtattggccgtcgagatgcggtgtgccgcctatggttttgtaggcttcgcgtatttcaggagtcatttttacagtgccgccggtctggcggtcaagcttcagttgctcgttgtcaagcatggcgtcgttgaacctgcgtccatagacgatgtaaaattgcgaagccgacgattcacgttctgggtttacgctgtcgctttcacgtgccgccgccaccgctccacgtttgtggaagagctgcggatagtgaatttcagcaggtattttgtagctttcgggcgaatcgccaagcacttgccctggccgcgcgttgcggcttgcactgtcaccggcctgtatcatgaagttataaatgacgcgatggaacaactgaccgtcgtaaaatccctcgtttacaagctttataaagttgtcgcggtgcagtggtgtttcattgtacaatgctattcttatgttccctttgcttgtctccaaaagcacctcgcgtcttgtcgtgctgtcgctttgtgctgatgccggagatatggtgagtgccatccaggcggccaacacacacttaattattttcttcgtcatatatcctgttgaatatttgtcttagtttcaatggttgtgcaagcagttccctgatttttttcaggttgtcctcgttgtccgagccaggtatccacaggcggatgtatccatggtttgagtatttgttgtcaaggtgttcattgaagcgccgccattgttcctccctgtttttttcagggtatcgcgcaatcccgaattgtattgtacgtcggaacacagtttccggctcaagttcgcggtcggcttcggcgacaattttgccgtacacgctgcgtggagcgtgcgatgccgaagcgcggtggtcttctacggcttctttcatcaccttgatttgttccggtgaaaaccacttcctcagccgtacatcggcggcaatgatttttccgcttgttatgtggtgtattgcgcgcggtccttcaagcccgaggtcatggtaagccgctattgcgtaagccatgtttacgtcagcgccgatggctttggctagccttaccgacttcttcacgacatttgttacatgcggcaggccgtgggctttgtcgaagttggcataccggggcagtatttccgtttcgacgaacgacatcaaatcaagattgatactattgtctgccataagtttacatgaattgataatttcttgcaaatatacgattaaatgtttacttttgcaagccgtcagtacgtattttgatgcaatacggcctgtttgccggtaaaggtgcggctgtacggttttacaacagcataacttgacattaaatggaagtaaaggttttaccaggttcgcctaaggcgtggatgttggccgcacgccccaagacgcttacgggggctgccgtgcctgtgatgattggcctgtctttggctttcgccgacgttggaggctcgttcaagatactgcctgccgtattgtgcctgctgttcgcgctcgtgatgcaggtcgacgcaaacttcatcaatgattatttcgacttcatccgcggcaatgacgatgaagcgcggcttggtccgcgccgtgcctgtgcgcaagggtgggtgtcgccgcgtcagatggtatgtgccattgccgtaacaacggccatagcatgcgccatcggacttccgctcatcatatacggcggcgtggagatgcttttgattggtgcgttgtgtgtgcttttctgtttcctttacactacgtctctgtcatatctcggacttggcgatttacttgtgcttgtgttcttcggcattattccggtatgcatcgtatattatcttcaggcgggaactgttacttttgaggcgttcatggcatcgcttgcgtgtggttttgtcattgatacgcttctgctggtgaacaattaccgcgacatagaaggcgacgagcgtgcaggcaagcgcactcttgtagtaaggctcggtgcgcgtcgtgggcgcatggcctatctgttatctggagtaacggccgtcctccttggcgtggtgtttgcggtattcggccattggctggcctcagtcctacaggtggcttacctcgcgcttcattatgcggcttaccgccgcatggtgaaaatcaacaagggcaaggcgcttaacgcggtgcttggaataacagcgcgcaacatgtttgtttacggcctgcttgtttctgtaggatttttgcttcattcttaactttctgtttatgttgagatttttgttttctcttatgatgtcggcctgcgttctgttccttcatgcacagcaggcaaccgacgcggagcgcgaccatgtgcgcgtgacgctgaatgacggcagcgttgttgacggttatgtgcagacttattggacacagggtaagctgttcaagaagatgaacacatcattcaccatgtcgcctaagcccgacggtaaggatgccgtaagctacgacgcggaagcggtgaaggccatagactttgttgtgaagacgtctgccgacgggcgttacgaccatcttgagtcgcatctcgttgcgaatccgtcaacgctgcggccgcggcgtgtaagccgccagttcgtctatgttgaaggcggtaacgaagtagggcgcatgtactggtggaacggtgttgaccgtcaggcaatgcagctcggtacggccggcatatctacaatatatggtgtttgccttaagggcgacagcgtaatagtgccgttcatgacgggcaacgttgtcagccttaatgcaatgcgcatacgttacaagaagactcatcccggactcgcggactacgttgaccgccgcgtgcttaagggaggccgccgcctttgggagacgatagcctatagcccgatgctatttctcgatatctgccgtgaataccttgagaaataagatttaacagccaagaactaatgcggcatgtcttgcaaacaagggcgtggaaacattcaaatctctgtgcccggccagcaaaactgtgtacacaagcttggcagtctttgcgtatgcagtgataaagaacccactttacgtaagaagaaacacagcagtaggctcaaaaagttggatgccgcctattattcggtatgccggggactgctgttgaagtaaacattatttttttattcaaaccaagggcatttttaatttccggcgacatgttttgtcgctctgctttcatatctttgccgttgtaaacaatgaaagtatgagcaaacaagttgagggaatgaggcgtatgctcctcatattgaataagttaaggcaaagccgcaggttcgtttcacgtcgcgatttgcttgattacgtgaacgagcggatggacgaacgttacggctaccgccgcattaccgggcgcacgcttgagcgcgacatcgcggacattggcgagctgtttggcgtcaacatagcgttcaaccgcacgcggcagggctatttcatacgcgagaactacggcgagtatgacgaacgtgtatgcgagctgatgatgaattttgacctgctcaacgccattgaccgcgaccagaacctgtcgtcttttgtgcttgccgagcatcatcgtccgctttacagcgaatggctgatgccgcttgtcaaagccattcacggtcagcatcccgtagaatttgactatgttaactaccgtaacgactgcactgaaaagcatttcagcgtgttgccgcattatcttaaggagtcaaaccagcgatggtatttgttggcctatgacggcgcagtgatgaagacgtttggcgttgaccgcatccgcagtcttgacgtgcttgaagataagatgttcgagcgcaacaccgacattaacgtggccgaccttttccgcgactgttacggtctgtggaacgacccgtcaatgcccgtcgaggacatagagctgcgttatgacgcgcttgacgggcggtttgtaaagtccgcgccaatacaccattcgcagcgcatccttgccgacacgcccgacgagctgcgcatatcgctccgcctgcgcatcaccaacgacttcgtaatggaacttctctcgcgcagccgctcgcttgaagtaatcaagcctcagcacctccgcgagcgcatacgccatgtgtacgaagaagcgctgaagcgcaactcgtaatatcatcccatcatcagtgtaaaggccgccaaggcgttgcttacagaccgttaaagccctccgtttgcggcgttgaaaagaaacgttgggcggttcaggccaagcccttttccaactcatgtccttttgcagggtaaaagatggcaaaacgcacggtaaaagacggtcttttgcaggctaaaagatggcatattggaaactctttggaaatgagcgcgttacgaattgctgattaattttatagattgactgacaacacaaacatcatataaaaacaaccccacgatttgtcgtaatggtaaatatgtttgactgataaatatcaatatgaaaacttaaaataaacagattaaaccaatataactatgaatttcgaagacgaaaaacaaagacttgtaggcttaggctttacaggttttacaaccattagtgaacttgttgctaatattgacgttgttccacaacttccgggtgtatatgttgtaattagaaacaatgcaaaccaaccagagtttttaacgcaaggcacaggcggattctttaaagagaaaaatccgaacgtcagcattgatgaacttaaacgtaattgggttggcgacacgtctgtcttatatataggaaaggccggcagctttaagggctgtgcgacgttgcgcagccgtttgagacagtacatgcagttcggacaaggcaaagccgtaggccactatggtggccggtatatatggcagctgcaggatgccaaagacttggttgtctgctggaaagtgactttggatgatgagccacgtgtcgttgaaaaacaaatgattgaagagtttaaggctgcgcacggaggcaagcgtccgtttgcaaatcttgtggattaaatgcagtaaacacaaattagttctttgtgtaactgtaaaaatggatgatggtataggcataaagacaagttcagatattatgttgaacttgatttatgcctattttatgagctgcaggaatacagtgttacaacgggccggtgcataaaaatacccgccgttgaaggtcgacgggcaaacctgatgttttcacaacggaataatccttattgtgatttgcttaaaattcttgtcggctaaggtaatgttttttttgcaaacagcaaaaaaataccgatgattttgtgtatatttgcgaaaaataacatattgtcaatatcaataccatgaaaagaatattgggtttagaccttggctcaaacagtataggatgggctgtggccatacggaaaagtgacagggaagaatcgggagtgaatgaatgtattgaggcaagcggtagccgtattatacctatggacgcagcaatacaaggcgattttgaaaaaggaaactctgtatcacagacggccgaacgcacaagctaccgtggcatgcgccgattgcgcgaacgctacctgctaaggcgtgaaaggctaaatcgggtgctcgatgttatgggattcctgccaaaccactacgctgccgcactgacacgttacggtaaattcaaggcggcagacggttgcaaactggcatggcaaaaggatgatgacggaaaatatgggtttgtgttcaatgactcgtatgctgagatgcttgcagatttcaaacgatgtcagagccaatggcttggtgatggaggacttgtgccgtatgactggacgatttattatttgcgcaggaaggctttgacgcaagctataacgaagcaggaactggcgtggatattgctcaacttcaaccaaaagcgcggatattaccaactgcgtggagaggaagcagatgaggacaagggaaagcaagaggagttttatgcgctaagggtgacagacgttgtagataccggtgaacgcaaaggcaaggacacttggtacgacataaaactggagaacggcatggtataccatcgtccggcgccaactccgcctgactggataggtcaggttaaggaatttatagtaacgacgcaacttgacaaggacggcaagccgaagactgacaaggacggtatggtaaaacgttcgttccgaatgccgaaggaagacgactggactcttatcaagaaaaagaccgaagcggatattgacaagtcgggaaagactgtgggtgaatacatttatgacgcccttttggctaatccgaagcagaaaatcaaaggtaagctcgtgcgtactgtcgagcgcaaatattatcgtaaagaactcgaacgaatacttgaatcgcaaaagaattttattcccgagctacgtgacgaggcactctataaggcttgcatcggtgaactttacggcgtgaatgatgcctatcgtcattcaatagaagggcgtgggtttacttacctgtttgtagacaatattatattttatcagcgtccgttaaagagcaagaagtcactcattgacgactgtccttatgagtcgcacgtttatacagacttggttacaggtgaacgcaagactgcttccgtaaaatgtgttgccaagtctaatcccttttaccaagagttccgcctctggcagtttgtttcaaacctgaaaatataccaacgcaagaaagtgacagacggggtattacggatggatgtggatgttaccgatgagtttctggtaacgacggatgaccgtgtaaaactgtttgaatggcttaacgaccgtcaggacataagccaggaaatcttgtttggaaaatacttaaacattaagaagccacgcggcaaggatgcgcagtggccataccgctggaactacgttgaggacaaggtgtatccatgcaacgatacgcgtggacaaatgttgaagtatcttgaaaaggtaggtatcgacaaaggctttcttacagctgatgtagaaaagagtctttggcacatactttattcggtggaagacaagcaggagttggtacatgccttaggaacctttgccgggaagcatgaacttggcagcaagtttgctgaagtattttctaagtttccaccgttcaagaaggaatatggggcatattcagaaaaggcaataaagaagctgttaccccttatgcgtatgggcaatcgctggaatgaaggtgccatagacgtgcatacccgtgagcgcatagataaaatcataaacggtgaatgcgatgaaactataagaaaccgtgtaagggagaaagctatcaacttgacggaagtgacagattttagcggtctgccattgtggctggcatgctacgttgtttatgaccggcattcagaagcccgtgatgtgagtaaatggacatctccaaatgacattgacgtttatcttaaaaactttaagcaacattcgttacgcaatccgatagtcgagcaggtggttaccgaaacgttgcgtacagtgagggacgtatggaggcaatacggcggctttgacgaaatacatatagagatgggtcgtgaaatgaagcagactgccgagcaacgcaagaaaacgacacagcgcattaccgacaatgaaaatgccaacataagagccaaggtgttgttgacggagtttatgaaccctgattttgagattgccaatgtacgggcttattctccaagtcagcaggaactgttgcgcatttatgaagatggtgcgctgagtaatgttggcgaggttgaagatgatatcagcgaaataatgaagaaactgagtgaggctgacgtgaagaaacggcctacgcacaatgaaataatgcgctataagttgtggcttgaccagaaatatctgtcgccttacaccggtactcctatacctcttgcacggcttttcacaactgattaccaaatagagcacattattccgcagtcacgttatttcgatgattcgttttcaaacaaggtgatatgtgagtctgctgtcaatgcgttgaaagacaggatgctcggcatggaatttataaaggagaagcatgggcaggtggttgaacttggcaacggtggcacggttgagattttaagcgttgaggaatatgagcgtcttgtgacgactaattataaggacaatcagtcaaagatgcgtaaactgctaatggacgacattccagatacattcattgagcgccagcttaacgacagtaggtatataagcaagttagtgaagacgttgatgtccaacattgtgcgcgaggaaggcgaggaacaggacatttcaaagaatgtcatagctacaaatggaacgataactgacaggctgaaaaaagagtggggtattaaggatgtatggaaccatataattttgccacggttcaaacgccttaacgaacttacaggttcgggaaagtttactgtacccagtgcttccgggcacgagatacctgatatgcctcttgccatgcaaaaaggatttaataaaaagaggatagaccatcgccatcatgctatggacgctattgtgatagcatgtaccacgagggaacatgtaaatctgttgaacaacgagtctgccaaatcagagaatgctgtcaaccgttaccaactgtcgcgcaagctcagaagatatgagcagacggaaatcataagggacggagaacgcaagactatatcagtagcaagggaattcattaagccgtggccgacatttactgccgatgtggaaaaagtcttgaatggtattgttgtaagcttcaagcagaatttgcggataataaacaagaccacaaacagataccagcattatgagaatggaaagaagttgatggtatctcaggttaagggcgacagctgggctgtgcgtaagccactgcataaggaaactgtttttggtgaggtgaacttgcgtttcacgcgtgaagtagctcttaaagaggctctaaaacagcctaaggcgatagtagacaaagacctgaagcgcaagattgtgacaatgcttgaacttggttatgacgacaagaaaatcaaacagttttttgaagcgaacaaggaagtgtggcatgattttaatcctgcaaagataaaggtttattactatacaaaagatgttcttgacaaggaaggaaacgtaaaagacagatacttcgctacacgaaaaccgcttgatacaagctttacaagtaagcgcatagaatcagttactgatacaggaatacggaaaatacttttgcgtcatcttgaggcatgcggtggcaatgccgagctggcattctctcccgaaggtattgaggcaatgaaccgtaacatcgtaactctgaacaacggcaagttccatcagcctatatataaagtgcgtgtatatgaaaaggctgacaagtatcctgttggcaaacgtggtggcaaggcttcaaagtttgttgaggcagcaaaaggcacaaacctattctttgccgtttacgaatcggaagaaatggataaagcaacaggtgaggtgaagaagaaacgttcatacgcaaccattcctctttacgaagccgtcagacgggcaaaggcaggtttgccacttgcgccggatgacacaaacggtaataaaccggcttttgtactttcgccaaatgaccttgtatatcttccgacaaaagaagatattgaacgtggaacaataggtatgccattggataaggggaggatttataaaatgatatcgtcttcgggcaatcaatgctttttcttaaaatacgaagtagcaagtgtgattgttgacaaattagagttttctccattaaacaaaatggaacgtgctattactggtgaaatgataaaagaaatatgcgttcctttaaaagttgacagaataggtaatatcattgaaataaatggaaggaagttatgataaaacgaactttatgctttactaatcctgcctatctttcattgaaagacaggcagatggtaatacgcttgccagaagtggaaaaaagcgatatgccagatgccttgaaagtgggttcggtgaggactattccaattgaggatgttggtgttgtggtgcttgataacaagcaaataacgttgacacaaggactgcttgaagcgttacttgaaaataattgttcagtcataacatgcgacagtcgcagtatgcctgtaggtttgatgctgcccttgtgtggcaataccttgcagagtgaacgtttccgtgaccagttggacgcgtcacttccactaaagaaacaattatggcagcaaacggtaaaggcgaagatagataaccagatggctgtgcttgcccggtgcgctggggctgaaacggggtgtatgcgtcgttgggcggctgatgtgcgtagcggcgatcctgataatctcgaaggtcgtgcggcagcgtattactggaagaacttgtttcgtggtttatcgtggcttgcaggttttacgcgcgacagggaagggatgccgcccaacaatcttcttaattatggttatgccatactgcgtgccgtcatagcccgttcgctcgtgtcgagcggactactgcctacgctcggcattcaccatcataaccgttataacgcctattgcctggctgatgacatgatggagccttaccgaccgtatgttgacgaattagtgtatgggattgtagtagagtacggggctgacatacccgacgatattacaaaagacctgaagatgaggctgctcggtatacctgtggttgaagtaaggattggtggcaagcgcagtccgcttatggtggctgcaacgcagactacggcatcgctgtataagtgttttacgggggaaatgcgccgtatagcttatcctgagatgtaaataaaagagcgtgaatatgtccgaccgttttagcgaatacaggattatgtggatacttgttttctttgacctcccgaccgaaacaaagagggataagcaagcctatgctttgtttcgtaagaatctgcaacgcgacggtttcactatgtttcagttctctatttacgtacgtcattgtgccagcatggagaatgcccaagtacatattaagcgtgttaagtcgtttcttccccaatatgggcatgttggtgtattatgtattacagacaaacagtttggctccatagaattattttatggcaagaaaccgttagcaccaaatgctcccggccagcaacttgaactattttgatatttataattatttaaccaactgtttcggattgatttgttcttatgtcgataaaatggatgctttatattctttattctttgtttatataaaaacctgaaatccgattgtttttatcggatttcaggattagacaaccatttttttaatttttgatcatctctgtatcttgttgattatcagaagattattagtgttctgatgtttgtcttggcacaaagatacgaattttaaagcaaatcacaactattctgctttaataccttagtaggatttagatgtttgtcttggcacaaagatacgaattttaaagcaaatcacaacgctattactatacctcagcttcccttcagggatgtttgtcttggcacaaagatacgaattttaaagcaaatcacaacaaaacacacaacctacggtatcgctattggatgtttgtcttggcacaaagatacgaattttaaagcaaatcacaacccataagggatgaaaaaacgccttcagcttgatgtttgtcttggcacaaagatacgaattttaaagcaaatcacaacagctgcctgctcgtcaatccagttcaattcgatgtttgtcttggcacaaagatacgaattttaaagcaaatcacaacgaagtctgattataactcacaaatcggtctgatgtttgtcttggcacaaagatacgaattttaaagcaaatcacaacggcaacattatgactatcgtcttctcattgatgtttgtcttggcacaaagatacgaattttaaagcaaatcacaacctcacagcagtcagctaataaacagaatatgatgtttgtcttggcacaaagatacgaattttaaagcaaatcacaacaaaattttgtccgccattcttgcggtattggatgtttgtcttggcacaaagatacgaattttaaagcaaatcacaacgaaatctgtttgtgttcgcgaataccgtgtgatgtttgtcttggcacaaagatacgaattttaaagcaaatcacaactgtacagctgttcttccgtttccgtcctgtgatgtttgtcttggcacaaagatacgaattttaaagcaaatcacaactaaaccataaggagacatccaagaagacttgatgtttgtcttggcacaaagatacgaattttaaagcaaatcacaacatactttgacggtgaccagaagaaagaggcgatgtttgtcttggcacaaagatacgaattttaaagcaaatcacaacgttgatgctttaggcagagttgtctcataagatgtttgtcttggcacaaagatacgaattttaaagcaaatcacaacacaatttgcaaaggatgtagaattaaagccgatgtttgtcttggcacaaagatacgaattttaaagcaaatcacaactgtaaacctccattttttaatgttgtgtagatgtttgtcttggcacaaagatacgaattttaaagcaaatcacaacgcaaccgcaaccgaagccacaacctgtgttgatgtttgtcttggcacaaagatacgaattttaaagcaaatcacaaccgatattcacaacttcaaaccctaatattgatgtttgtcttggcacaaagatacgaattttaaagcaaatcacaactaatacttaccttaatcctcttggcggtgcgatgtttgtcttggcacaaagatacgaattttaaagcaaatcacaacgcagttaacatgcattccggtgcttctccagatgtttgtcttggcacaaagatacgaattttaaagcaaatcacaactgtttcagatgctactctttcacaagctgagatgtttgtcttggcacaaagatacgaattttaaagcaaatcacaacggttctgctgtcggctatggtgccggcgctgatgtttgtcttggcacaaagatacgaattttaaagcaaattacaacatgtatgttttatcgattaaatatttcaagatgtttgtcttggcacaaagatacgaattttaaagcaaatcacaaccaaaatcgccgctgccttcaacttcgcaaagatgtttgtcttggcacaaagatacgaattttaaagcaaatcacaacgtggaggaagtgatggaagtctgcaaattggatgtttgtcttggcacaaagatacgaattttaaagcaaatcacaactagaacagagtatgtctgatatgttgcgtagatgtttgtcttggcacaaagatacgaattttaaagcaaatcacaacggataagccttatgtttttaatgtctatcggatgtttgtcttggcacaaagatacgaattttaaagcaaatcacaacaggatagattgcgtaagttaactgctgatggatgtttgtcttggcacaaagatacgaattttaaagcaaatcacaacaggatttattattgaagttctacaaatcaagatgtttgtcttggcacaaagatacgaattttaaagcaaatcacaactatatcttacggtttgccccggctttatcgatgtttgtcttggcacaaagatacgaattttaaagcaaatcacaacgccttgacggccgtcctactgtattgtatgatgtttgtcttggcacaaagatacgaattttaaagcaaatcacaacctaatattgaaacgaatcctcttttctctggatgtttgtcttggcacaaagatacgaattttaaagcaaatcacaactagtctaaggtggcagtcgccatcttcaaagatgtttgtcttggcacaaagatacgaattttaaagcaaatcacaactgaagtatcagcatcttatgctatgttccggatgtttgtcttggcacaaagatacgaattttaaagcaaatcacaacgcgacgttccggtcttgctaatggctatggatgtttgtcttggcacaaagatacgaattttaaagcaaatcacaactaacgtaacatagtaattagattttaagggatgtttgtcttggcacaaagatacgaattttaaagcaaatcacaacggctaccaagattttgacgctaacgagttgatgtttgtcttggcacaaagatacgaattttaaagcaaatcacaaccccttgtcgtaaacaaggttgaaaatactggatgtttgtcttggcacaaagatacgaattttaaagcaaatcacaacgaaccaccaaatggattcaatcaataatgggatgtttgtcttggcacaaagatacgaattttaaagcaaatcacaaccgccgtcagaggaaagaaatatacgcggatgatgtttgtcttggcacaaagatacgaattttaaagcaaatcacaactcctcgctaacagtctttccaaactctcttgatgtttgtcttgacacaaagataaataaacatccgttagtggcattatctgtgtccttcttgcggctgatatttacagtttattgcttgtcgtagtttttttattacggttttcgtttgttttcgtcaagtctgcaaaagacgtccttttatgatgcgaaatggtgttttccagaatgcgaaaagccatatcttacagactgaaaggacgccatttgaaacagtaactgtcgccgtgccacttaaaataattccgctcaacgggttgataaggctatatttactaatgaataggcatttttagaatataaaaaatttaaggcggatgcaaccagaacggtggctctgtgcgcttcgtcttcgattttattttgtataaatctgttgtcatgcttttgctttgtcgccatatttgattacttttgcaggacttaattgacatatataaaaataaaaggaaaatatgagaagcaggacaacaacatggtttgagtgcaagatacgttatgaaaagacaatggaggacggcactcaaaagaaggttacagagacatatacggttgacgcattgagctttaccgaggcggaatcaagcattatagaagaaatgtctgcttacattagtggcgagttcgaagtgcgcgacatcaagaaggctgcttatggcgaggtgtttttcagcgacgcgccgtctgctgaccgctggtataagacgaagttgcagttcatcacaatagatgacaagacggagaaggagaaacgctcaaacgtgaattaccttgttcatgcggcgtcgttgccgcaggcggtgaagagcatcgatgaggttatgggcggcacgatgattgactatgtgatagtaagtgtggcagaaacgcagattatggatgtgtttgagcacaacaagattgtcaagaagccagaagtcgatgacaaaccggaatacgagcaaggcggagaggaggtgaaatgatgcagaacatagatgttgcggccaacttgcgtgccataaagggaactttgcctgaaggcgtgacgctggttgccgtgagcaagtttcatcctgctgatgaaatcgaggcggcatacgcggcagggcagcgtgtgtttggcgaaagccatgagcaggaactgacgaagaagcatgatgtgctcccgaaggacatcgggtggcatttcattgggcatttgcagaccaacaaggtgaaatatattgcgccatatatttcaatgattgacgcggttgactcgacgaagctgctcaaggaaatcaataagcaggcggccaagcatgacaggactataaatgtgcttcttgaacttcatatagccgaagaggctacgaaatatgggtttacgctcgatgcttgccgtgagatgcttgcggcaggggagtggcgtgaacttaggaatgtgaggatttgcggcttgatgatgatggcgtcgaatgttgacgacgaggcgcaaatcaggcgcgagtttgaaaccgcggcttctttctttgacgaggtaaaatccgcttattttgccgatgacgactgtttccgtgagcgctcatggggtatgagcggcgactacgagattgccgttgaatgccgcagcactatggtgcgtgttggaacggcgatattcggggaaagagaatattgaaaaggtaaaatggtaaaaaagtaaaaaggtaaaaatacgggtgtttttacctttttaccttttccaccttttcattttttcacctcttcactcttaaaatagtattgtcctttgtgttttgtcattcgcccgtattcaatggcatgtttggggcaatggtgatagcaggcgaaacatgcaaggcaagagccgtcgtgacgccattgtggaatgttgtttacaagcacaatgttgcctgttgggcatgaggtggcgcacaggccgcagccgatacatttttccgtggttacatggaacggtttgtcggttatcatgtgctttgcgaaaaagccgccgataatccggctgttgattttcggccaccgtccgattgtcagttcttcaatgtttttctgtttttcgataatcagccgcgtaaaccgttcaaggtcggccgccgctttgtctttcttttgtttctcgttttctggagtgtctacgtccataaatggcagccctacgtatgattccggcatgataagcgagaacgcgctgtcaagatgtatgttttttgatgcaagatcgctctttaaaatgtcgatggtttcaccgattgtgtcaccggcagtgcatagtgcaaagcagtaatgcagctttgtttcgttgaatgacagtttgcttatgaattttcttaatgccataggcggccgccaaccgtgtacgggaaaacaaaatccaatgcgttcatcttcatcgagtgagtgttgagtctgtattttttctttatctaaaatgttgattaatttttcacctgtggccttggctatgtatttggctgcccacaggctgttgcctgtacctgataagtagaaaatcatgttacatgtttttatttgcaggcaaagataatgcttttgctcttaaatggaactgttctaatgtaaaatcagtatctttgttccacgaagatgggatgcggctcggcaatgtcaaactaaaaaactgtgtttatcgtttgccgttgcgtccgccttttattatctttgtaatcattaatgcggaaatactctgcttaaggaatgaaagtaaacggacaaatacagttatacccagtactgcggattgtgctgttttttgctataggcataatattgggcgttgagttgtttggccatatttcgtcaaaattgtggtatgtggcattcatcatatcgctcgtgttggccgtggtggtaaaaggctacagcatagcgcagactgtcgtgcttttcatggcttgcctgtgtttgggaggttgtcttgccgaacgtgagttgtcgtcgcttcgtgttgatgcgcctgacggagaggtttgttatgaggctgtggtggttagtccgttggaagaggccggcaaggtgatgcgttgcgatttgcttattacgaattggctgagaccagtcaagattagggcttctattttcaaggatgcccgggcggaacagttgaagcccggcagcggactacgggttaggtcgaagttggagaagcctgcaagttttgccggttcaacctttgactatggccgttatctgttatttcatggttattcgttcacaacatttctgtacgtggacgattggagcggagacgttgttagtttggaaaaactgtcaatagttgaacgttctaagataaaggcgttgcagctgcgcggcaaactgcttgacaacttcaagaagttgggtattgacggacaagattatgccgtgttggcggcgatgactcttggcgaacgggtatcgatgtcaaaggaaatgactgacgattattctgtttccggagcgttgcacatcttgtctttgtcgggtatgcaccttggcatcatatatgcaatgttgctgctgttgtttttcaaacgccgtagttcggtgatagtccaggttatcattgtcacagccgtttgggcatacgtttttattgcaggcttgcctgtgtcggcagtgcgttctgcggttatgctttcagtctgttcttttgtcaatttgcttaaccgcgacaagatttcattgaatgtcttggccgtagcagcattttccgtgcttgttgtaagtccgttgaatttatacgatgtaggctttcagatgtcgttcatgtcggtgatgttcataattgttttttatccggtgttttattatgtcatgccgcaacgtataagaaatatccgcgtagtgaattatatttggcagatgacggcggtttcattgtctgcccagttaggcgtagctcctttagtggcgttgtatttcggtcgtttttcttgttatttcctgttggcaaatttcgccgtcattccattgtccgccgttattctctacggtgtggcgttcatcatgttgtttgcatggcagccgtggctgcaaggcatattgtccacaattgttgtcaagtctgtagaattgatgaatacaagcgtttcatttgtagcgtcacttccgggggcaagcatcgatggcatcagtaccaattccgtgcaagtgttgatgttgtatatccttatgttttcaatatatttcttgttgccttatctgcgtaagatatgggcgtataggtaaagtcaaattggttgtggagtggggaacagaaagtttatgttgataaaaataggcaggcaaggtttgaataaaattcgtttcttacctgcatattttaacggttttttatttgtatcttttgtttatataaataaattgtaattagatactttgtaaaagatgcttattgtttctcattagcataatttgagtaacaattccaaattcttcaaaatctttatcatcattaatattgtacatctcaatgaccgtatcaccaaacttaatccaatctttttcactaatatggaaataggataaagcttctttcaatgctgctacattatttttaagatacgtgtcgtttatccaatcatgtatgatgtgttgacgcgcaaattctgtgttctttcgggaaaaatcggaatgttctcgggataaatatctaatgacaccaatgtacaaaagatgttttgctattttctgccaacgatactctgtaagcccaagaatatataaatattgcttaaacttatcgtctacttctaataattcttttaatctgtctttatgcgaataatcgtcaaagcgatatattcttccatttctgtccgcaagtatctcttttgctactctgatttctttcttgcttgcaggttctgctagatcatgcgctacggttgcaattttatttgcagtggaatgggctacataaccaatagcttcaccgtatcgctcttttgctgtttctttttttgaatcttgagcaacaaaatagataaaaaaaatataatggcaataattattatagcagttcccataagttatttaaatagaaagtgtcaagcacaaaacgcagtaaacgcctttgtcatatatgtgtcatcccctcccttctgccgccgggcttccgtaaaggggataacgccacaaagataataaatcttcggtttacggcaaaacaatttgaatagaagatgtgaaattctaaatgaatccgcgtttaaccaatgcgaggagttatagggagttaagaggagttatcactcgctgcgctcgttctgggagttaaaggacaaatgttttgtaaaaagccataaaacgcagtgcaatatatgaccttttacaatatcaaagaccatcttttacaagctaaaa

SEQ ID NO: 1096 - DNA, 24575 bp, synthetic construct
  source 1..24575: mol_type = other DNA
  misc_feature 1..24575: note = Synthetic
ccgcctacgaggtgttcaccggcaagaagcttgacaaggttgacttcaccgaactccgtggcatggaaggcatccgcgacgcttgggttgacttcaacggtacgcccatccatatcggcatcgcccacggtctggccaatgcccgtgctttgctcgaaaaggtgcgcgaaggcaaggaacagttccacgccatcgaggtcatggcctgccccggcggttgcgttggcggcgctggtcagccctaccaccacggcaacagcgagattatcaagaagcgcacggaagccatctatcgtgaagaccttggcaaacccatccgtaagtcgcatgagaatctctccatccagaaactctaccaagagtatcttggcgagccttgtggacacaagtcacacgaactgctgcacacccactatttcgacaagtcgaaacatgttgaaatcagcgagtaattcactaaccagtaaataatagaaaggaaataaaaatggcagttattaaattatcagaatcgaaagtgaacttcgtgaaagaggtttgcaaatcgttcaataacgatggtggcgaagtcatcaacgtgctgcacaaggttcaaggtgagttcggctatttgcctgccgagattcaggaattggtcgccaaagagctgaacatccctgtttcgagagtttacggcatcgtgtcgttctactccttcttcaccatgaccccgaagggcgagcacccgatcagcgtttgcttgggtaccgcttgctacgtgcgtggtgccgagaaggtgttggacgagctgaagcgtcagttgggcatcaatgtcggtgaggttactcccgacggcaagttctcgctgacctgcctccgctgcgtcggtgcctgcggcttggcccccgtcatcgaagtcggtgagaaggtctatggccgcgttactcccgaccacgtgaaggacatcatcgcggaatacagataatccgcacacctattaatattaatagggatacgaaaaatccccgcctggataggtggggatttttttgcttattggactgaatcgtatcgaaaatattcctatctttgcagcccaaaacagaccgcagtccgaaatgattgcaaaatcagcggtttgtgttgataaacaaaagtttaacctcctcgtttgcggcatttcggaacgcaagcgggtacaacaaaaccatcgttttacaatggaagaaaacgaaatcatcatcaacgaggctcccgttgaagccgctgtggaggctcagcctgttgaaaagaaaaccaaaactcctcgcccgaaaccggttcctgccgaagatttcgattggagttcatcccacaagaagttcgacaactattcagccgacgaacgtaccaaactcgaagagaagtatgccggcacgatgaatcaaattgttgaccacgaggtcatcgaaggcactgtggtgtctatcaccgaccgcgaagtcgtcgtcaatattggattcaagtcggatggtgttattccggttgcggagttccgcaccaatcccaaccttaaggtgggcgacaaggtggaagtttatgttgagaaccaagaaggtcccaacggacaactcgtcctttctcacaagaaggcccagctgctcaagtcttgggatcgcgtgaacgcagcttacgaaagcggcgaaatcatcaatggctacatcaagagccgcaccaagggcggtctcatcgtcgatgtgtttggcctcgaagccttcctgcctggatcgcaaatcgatgtcaagcccattcgcgactacgatgtgtttgttaacagcgtgatggaattcaaggtggtgaaaatcaaccaagagttcaagaacgtggtggtttcccacaaagccctcatcgaagacgagctggaagcccaaaaggccgagattatcagcaagctcgaaaaaggccaagtgctcgaaggcgtggtcaagaacatcaccagttatggcgtgttcatcgaccttggcggcgtggatggtcttatccacatcaccgatctcagctggggccgcatcaatcaccccgaagaagtggtcaaattggacgaaaagatcaaggttgttatcctcgacttcgacgacaataagaagcgtattgcccttggtctcaagcaattgtcaccccatccgtgggatgcactcaatgctgacctcaaggtgggcgacaccgtcaaaggtaaggtggtcgttgttgccgattacggcgcattcgtcgagatcgcccctggcgttgaaggccttatccatgtgtcagaaatgtcatggtcgcaacacctccgcacggctcaagatttcttgaaagtgggcgacgaggtggaagccaaggtgctcaccctcgaccgcgaagagcgcaagatgtcgctgggcatccgtcagctcatgccggacccgtgggaaaacatcaccgaccgttaccccatcggctcgaaacacactgccaccgtgcgcaacttcaccaacttcggcatcttcgtcgagcttgaggaaggcgtcgatggtctgattcacatcagcgacctcagctggtcgaagaagatcaagcacccggccgaatttaccaaggttggcgaaaccatcgaagtcgtcgtcctcgacgtcgatcaagagaaccgtcgcctcagcctcggccacaagcaactcgaagagaatccttgggatgtgtttgaaaccgtcttcaccgtcggttcgatgcatcaaggtaccgtcatcaacgcttccgataagggcgccgtcgtttcgttgccctacggtgtggaaggcttctgccccagccgctacatgaagaaggaagatggcagcaacctgaagaacgacgacaccgccgacttcaaggtgattgagttcaacaaagaaagcaagaaaatcatcctttcgctgcccaaggtagtcgaagaaaaggaaacctcggccaagagcgcagaagagaaggccgccgacaaggctgccaagcaaaccaagcgtactgtgaagcaaatcaatgacaacattgagcacagcacactcggcgacctcgaagtcctcgctggtttgaaggaaaaccttgagaagcaagagaaagcccaagctcctgaagagcctaaagccgaataatcttgccaaataacgacgaaaagccgctccaaaagggcggcttttttagtgatgtgtcagaaaaaaagcgtactttcgcagcaacaaaacacggatactcatggcacaaaaactgaaccgaatcattttcaccctccgcgagggcgaggactttatcccgctcatttccttgctcaaggcctgtgacgtggtgtattccggcagtgaggcccaagaggtggtcaccaatggcatggtgctgcgcaacggcgaggtggaataccgcaagcgagccaagattaccgctggggaaatcatcgtctttgagaattatgaaattctcgttgaaggttgggacggataaaacaagtagggctgccacaatgtgacagccctacaattttgtgctaatccttacagattattccgcactgaacttgcaaaccaaattcctatcgccgtaggcatcatcgacgcgggtgacgtgcgggaagtacttgtcctgaacgtcgctcttcattgggaagccagcctcttggcgggtgaaggggaagttccactcgttggccatcagcatctcagcggtgtaaggcgcgtggctgatgatgttattgcccttctcggccttgccgtcctcgatgtccttgatttccttgcgaatctgaatcatggcttcgacgaagcggtcgagttcagcgataggctcgctctcagtgggttccaccatcagcgtttcgtggacggggaaggccacggtaggagcgtggaagccgaagtccatcagacgcttcgcgatgtcgatggcggcaacgcccgttgccttgttgatggcgttgatgtcgagaatcatctcgtgagcaacgtgaccgttgtttccggtataaagaatcgggaagtagtccttcagtctttccttcaggtagttggcgttcatgatggcacccaaagtggctttcttcaagccttcaccacccaacatcttgatatagcagtaggtgatggtgagaatttgggcgctgccaaacggagcggctgaaacagcgccttcttgcttgtcgccaccgcagtggaacaggatgtgcgaaggcaggtagggcttcaggtgttcggccacgccgatggggcccacgccgggaccgccaccaccgtgcgggatggcaaaggtcttgtgcaggttgaggtggcagacgtcggcaccgatgtaaccagggctggtgaggccgacctgggcgttcatgttggcaccgtccatatagacttggccgccgttgtcgtggacgagtttcacgagggtgcggatgccgtcctcataaatgccgtgggtggaaggataggtgaccataaaggccgacaggctgtccttgtattgctcggccttggccttggcgtcgtcgaggtcgatgttgccgttttcgtcgcatttcaccaccaccacttgcataccggccatggcagccgaagcggggttggtgccgtgggctgaagcggggatcaagcagatgttgcggtgtccctgaccgttggcctcttggtaacggcggatggtgagcaatccggcatattcgccgctggcacccgagttaggcatgaaactcatgcccttgaagcccgtgatttcgcagaggtctttctccatctcgctgatgagttcgaggtagccttccacttggtcggcggggacgaaaggatggatgttgccgaactcaggccagctgagggcgtacatcgaagtggcggggttcagtttcatcgtgcagcttccgagcggaatcatgcagcggttgaggctgaggtcgcggttctcgagtttcttcatgtagcgcatcatgtcggtttcgctgcggtacttgaagaacatcggggcctgcatgaacttgctggtgcgctgcatctcagccgggatgccgctgaacttctggcagttcgggtcgcaaacgagttcttcgtgctccttgccaagggcttcggcgatgacgatgccaatttcgttgatgtcttcgcgagcggtggtttcgtcgaggctgatgccgaagtgttgcttgtcgatgatgcggaagttcataccgtgtttctcggcagcttccttcaccttgcaggtgcaagcgccttcgggcagttcgaacaacaacgtgtcgaagaagtgcttgttgagttgcttcacgccgagcttggccagttcagaggtcagttttccggcgaggcagttaatatggtgtgcgatttctgtcaagccgtccggaccatgataaagggcgtagaagcccgacatgatggccagcaaagcctgagccgtgcagatgtttgacgtggctttttcgcgcttgatgtgctgttcgcgggtctgcaaagccagacgataggccggattgccgagggcatcgatactgatgccgatgatgcgaccgggcatttcgcgcttgtaggcttcggtggtggcgaagtaaccggcgtgaggaccgccgaatcccatcggcagaccgaaacgctggttggaaccgagcaccacgtcggcaccccattcgccgggaggcgtgattagggtgaggctcagcaggtcagcggcaacggccacttgcattcctttggacttccagtcggcgactttggcacggttatcgacaatttcaccaaactgtcctgggcattggagcaagattccgaaatattcctcactgcaatcgaacttgtcgatgttgtccacaaccacctcaataccaaggaagtgagcgcgggtcttgatgacttcgatgctttgtgggaacacgtcgtcggccacgaagaatttcttcacgccggccttcacttgtgcgcggctgcgagagtgccagaacatcagcatggcttcggcggcggcggtgccttcgtcgagcaggctggcgttggccaaaggcatggcggtgagttcgctgatgacggtttggtagttcacgagggcttccaagcggccttgcgaaatctcggcctgatagggagtataagaggtgtaccagcccggattttcaaggatgttgcgcatgatgacgcccggggtgatggtgttgtagtagcccaaaccgatgtagctgcggaactgcttgttcttggcaccaatagccttaaggtggctgatgacttcgtactcgttcatgccttcgccgaggttgaggtctttcggcaggcggatttcgggagcgatgatttcatcgacaagttgttcttgcgatttcacgccgatgaccttaagcatcttttcagcgtcggatgcggtggggccgttgtggcgtttgatgaagttgtttttaatcatttttgatatttattttgttgatttttaatcgattagtattctttgagtttttgaacgagagcctcgatggagttgattccttcgagttcgttttgaggaactttcttcagtttgcgataccattctttataagtgtcgaagtttttgagaatcgtaaatcgcagataatcatattcttctccgcttgctttgtccttataattcttgtaaagctcgtcgtaggggtccatcataatggtacgttggtggattaagtcccaaaaagcctgtttgaactgcacgttggggtcatcggacggaacgggctgggtttcgattggcgcgacttgagcggcgacgtgttcttctgatggagttggctcgggttctggggaatggctcggggtcagcgttgtggtgtcaagggcaggcttgacgctgtcggtaaccaaaggcttttcttcttgcggttttggcttgtttttctgtgaaggacttggggttttgaaaatgctgactgtcaatgcgatgatgatgccaatgacagccaatacgcccagcgcgataatcaatccgcgtgcgacagaagtgaagcgttctttccagggtagttttttgtattgggctactaatttcccgtcgtaaatctggttgtttgggatttcgaccaacttgaatcctacaaattcatacccttttggaggtacaatatagtcttttacgtcatgtccgtcttcataaagagagtacgggcatccgttcattttctcgccgtttccggcatcgatactgaaatgcttttccacgaagaagaaagattttttcagttcaatactttgttcatggaaagatagtcgggataggctaattgttggtttccaatgttgatatagggcttcaccttgagcccgacattgacggggttgctacttgcaccagccagcttgaaagccaagtttacgatggcatcggccgactcgccgctgaacaattggaataggtcagtggtgatgggaatcgaaaccgtattgttcgagttggcgggcacgttgacggcttggttcaatgtggtgctgacgacctgttttccgttgagggtcaggatgtagtccatcttggccatcgaggcggcgatgctgttggggtttttcacgtcgaggttcacgttgaacgtcacgggcagcgacttcttggcaatggcattgacgagtgccaacccttgagaaatgttgaggttttctctggtcatgcctttgctcaagttagcgcccagcatttggatgttgttgacgctgtcgaagttgaaagtgcagttggcgaaattggccatctgggctacttgggtcagcacgtcgcacgaggccagtccgagggcgacgcaaagaatcattacggttttctttaactttgacatatctctttaattttgattatcaattgattaataatagaattgatgcacaattaggtgcttgttttcaagtttgcaataatacgaaaaaagtcggacacgcggcccgactttatggaaatattttttctttttttattcctccccacgccgcgaggcgcgtttacgctcggtttcgtcgaggatgatcttgcgcaggcgcaggctcttcggcgttacttcaagatattcgtcgtcgcggatgtattccatgaactcttccaacgagaaacgcacgggcggcacgaggcggatggcttcgtcagaacccgaggcgcgcacgttggttaaatgcttggttttgttcacattgacaacgatgtcgttgctgcgcgtgttctcgccgatgacctcgccggcatacacgtcctcgttcgggttgatgaagaacgtgccacggtcttgcagcttccagatggcgtaggggatggcttggcctgtttccatcgaaatcaaggcacccaagttgcggctgggcatttcgcccttccaaggctcgtagtccttgaagcggtgcgacacgatggcctcgccttccgtgacggtcaaaagcgtgtttctcagtccgataagtcctcgggcggggatgtcgaaatcgaggcacatgcggtcgcccttgggctgcatcgaggtcatttcgcctttgcgcgcgctgacctgctcgatgacgcgacccgaaaagtcttcgggaacaagcacggtcagggcttcaacaggctcgcatttcacgtcgtcaatatatttgatgagcactttgggctgccccagctgaagttcgtagccttcgcggcgcatggtctcgatgaggatgctcaaatgcaggatgccgcgaccgtaaaccatcagtgcgtcaggcgattcggtgtcttccaccttcagagcgaggttcttttcggtttccttatataaacgctcgcgcaggtgacgcgaagtcacatatttgccttccttgccgaagaacggcgaattgttgatggtgaacaacatgctcatcgttggctcatcgacatggatgggcggcagggcttcgggattctcgtagtcggccacggtgtcgccaatctcgaagtcgtcaatgcccatcagcgcgatgatgtcgcccgcctcgacgggcttcttggtgcgttccttgcccaagccttcaaaggtataaagttccttgatggtggagcgggtgacggagccgtcgcgcttcaccaacgagacattttgtccggcttgcaaggtgccgcgtttcaagcgacccactgcgatacgacccacatacgagctgtaatccaacgaagtaatcagcatctgtggtgtgccttcctcgaacttcgcgggcggtatcgtgtcgatgatgacgtccaaaaggtaggaaacgttgtcggtgacgtggttccagtcgtccgacatccagccttgcttcgacgagccgtaaaccgtcgggaaatccaattggtcttcggtcgcgccgaggttgaacatcaggtcgaagacagcctcttgcacctcatcgggacggcaattgggcttgtccaccttattaataacaacgatgggtttcagtcccagttcgatggccttttgcagcacgaaacgggtttgcggcatggggccttcaaaggcatcgacaagcagcaagacgccgtcggccatattcaggacgcgctccacctcgccgccaaagtcggcgtgaccaggggtgtcgataatgttgattttcacgtccttgtagcgcaccgacacattcttcgagaggatggtgatgccgcgctcgcgctcgaggtcgttgttgtcgagaatgagctggccagatgcatcgtccgattccttgaacaattgggattggtacaagatacggtccacgagggtagtcttgccgtggtcgacgtgggcgataattgctatatttctgatattctgcattttagtagaaattgatgtttgatttgaaggtgcaaaagtacaaaaaatcgcttttttatagaataatttagagaactttgtatctcacaggctcaaatggaaaaaatccaaaaagacgaggcgaccgaagtcgccccgtcctaaatgttttcacaacggaataatccttattgtgaattgctgcatatcttgcagctgcaaaggtacaacttttttggattgtgcaattggtttttcgggatttttttgtatttttgacgaaaatttttcaattctgaaatcaatacaattatgaagaagatattaggactcgatttaggcaccaacagcatcggctgggcgatggtgaatgcggacgaaacaatgcgtgagaatgaaacatcttatctgaaaccgacaggcatcagtgcggcaggaagtagaattatcccgatgtcggcagacattttgggcaattttgatgcgggcaattccgtttcgcaaacagcagaacggactggatttagaggcgtgcgacgtttgcacgagcgcaacctgctacgacgtgaacgcctattgcgagtattgaaacagatgggctttttgccagaacattttgccaaacagattgatgagtatggaaagttcattaaccatagtgagccgaagttggcttggcgtaaagatgaacaaggcaagtttgagtttgttttcaaggattcgtttgaagaaatgttggaggattttgcacaacatcagccacaacttgttgccgacggcaagaaagttccctacgattggactatctactacttacgtaagaaagccctgacgcaaagacttgcaaaagaggaacttgcgtgggttttgttgcagtttaaccaaaaacgtggttattaccaactgcgcggcgaggatgacgatgagcaacaagacaagttggtcgaatatatcgcccaaaaagttgtcagagttgaagcaaccgacgacaaaaagggcgatgaaatatggtacaacgtgcatttggagaatgggatgttgtatcgtcgcacgagcaaaacgcccttggattgggcgggaaagataaaggagtttatcgtaactactgaccttgaaaaagacggaacgcccaagaaagacaaggaaggcaacatcaagcgttcttttcgtgctcccaaagaggatgactggactttgctgaagaagaaaacggagttcgacatcgacaacagccacaaaaccgtaggctgctacatctatgacaacttgctgcaaaagcccaaccagaaaatcatcggcaagttggtgcgcacggtggagcgcaagtattacaaggaggaattgcggcagattctcgaaactcaagtcgccttaatagcagaattgaatgacgccactttatataataggtgcattggggaactataccccaacaacgaggcgcaccgcaacaacatcgccaagcccgacttcgtcaacctgttcatcaacgacatcctgttctaccagcgtccgctgaagagcaaaaaatcgctaatcagcgactgcccttatgagagccacttcgacaaggacggcaatgagcatcccgtaaagtgtatcgccaagtcgaatccgctgttccaagagttccggctttggcagtttgttcagaatttgaggatttaccaacgtgagaaaaatgttgatggcaaactccaaaccgatgtggatataaccaacgaattgctgaaaaccgaagaagattacgtaaaactcttcgattggttgaacgacagggcttccatcaaacaggacacgttgctcaattcgtacttcaagttcaaaaaagagaagggcaaagaccaatatccttaccgttggaactacgttgaggacaaggattatccgtgcaacgaaacgcggtctacaatgcttggcggattgacgaaatgcaacattgacgctggtttccttacccgcgaaaatgaaatgtcgctttggcacatcctctattcggtggaagacaaggcggaaatcggcaaagcactgaaaaagtacgccgaaaagaacaaccttcccgaatcgtttgccgaggtgttcgccaaagtaaaaccgttcaaaaaggactacggctcctattccgaaaaggccatcaagaagttgctgccgctgatgcggatgggcaaatattggagtgcggatgccatcgacgacagaacgaaggaacgcattgacaagatactgactggcgaatacgacgaaaacatcaagaaccgagtgcgcgaaaagtccatcaaccttactgacatcaaccattttagggctttacccgtttggttggcttgctacatcgtctatgaccgccattcggaggccaaggaaatggggaaatgggagaagcccgaagacattgaccgttatttgaaggacttcaagcaacactcgctgcgaaatcccattgtggagcaggtggttacggaaaccctacgcaccgtccgcgacatttggaaacaggaaggacaaatcgacgaaatccatttggaactggggcgtgagatgaagaatcccgcagacaagcggaagaaaatgacggagcgcatattggaaaacgagaacactaatctgcgcatcaaggctttgctgatggagtttatgaacgacccagaaattgaaaatgtacgcccatattcgccaagccaacaggatattttgcggatttatgaggaaaacgccctcgacaacttgaccaaagacgacaaggagtttgatttcgtcagcaaaatttccaaaaccgcacagccctcaaaggcagatataacaaggtataagtgttggttggagcaaaaatatcgctcgccttacacgggcgagatgattccgcttgccaagttgttcacttcggcttacgaaatagaacacgtgattccccaatcgcgttactttgatgactctttcagcaacaaggtaatctgtgaggccgaagtgaataaactcaaagacagacagttgggatttgagtttataaagaaccataaaggcgaaaaggttcaaatcagccaaggtaaagtggttgaaattctgtcggttgaggcatacgaaaagttcgtgaaagaccattattccagcaatcgcaccaaaatgaagaaactgctgatggacgacattcccgatggtttcatcgaaaggcagttgaacgacagccgctatatcagcaaactggtgaaaggcttgctgtcgaacatcgtccgcgagaaactcgataacggcgactacgagcaggaagccgtctcaaagaacctgatttcgtgcaacggttccatcaccgaccgtctgaaaaaagattgggggctgaacgatgtttggaacagcattgttttgccgcgtttccgccgtttgaacgaactgacgggcaagaattgtttcacagccatcagcgctgaaggccacgaaatacccgctatgccgcttgaactgcaaaaaggcttcaacaaaaagcgcatcgaccaccgccaccacgcgatggatgccatcgtgattgcctgcgccacccgcgaccacgtgaacctgctcaacaacgaagccgcacactcgaagcacaacgccaaccgttaccaactgcaacgcaagctgcgccgattcgagaaaatgaccatcgacggcaaggagaaagaaatcgccaaagagttcttgaagccttgggattcgtttacaacagatgcaaagcaggcgttggaaaacatcatcgtcagtttcaagcagaatctgcgcgtcatcaacaagaccacaaacagataccagcattacgataaaaatggcaaaaaggtgtttgtcaagcaagaaaaaggcgacagttgggcaattcgcaagtcgatgcacaaagacaccgtttttggcgaggtgaatctgcgtaaaaacgacaaaactgtttcgttgaaagaggtattgaaaaacccgaaagccattgtaaacaaggagtttaagaaaaaggttattgagttgcttgaagagggacgcgatgccaaatacatcgagaaatatttgaaagacaacaaggatgtttggtcggatattgacgttaaaaaaatacaggtctattatttcaccaaagacaccaacgaccgctattttgccacacgcaaaccgcttgacacctcgttcgacaaaaagaaaatcgaaagcagtgtaaccgacacgggcatacagaaaatcctgttggcgcatttggaggcgaaaggcggcgaccccgaacttgccttctcgcccgacggcattgatgagatgaatcgcaatattgttgcgctcaacaaaggtaagttccatcagcctattcagaaagtgcgcgtatatgagaaggccgaaaagttcgctgttggacaaaacgggaacaaggctacaaaattcgttgaggccgccaaaggcaccaaccttttcttcgccattttcggaacggaaaagacgaataaggaaactggcgaaacggaaaccgttcgttcctatctgaccattccgctcaatgtgatgattgactgccaaaagaaatacggttcgcaatggcgcaactgcatcgaaacctatctacaagagcagcaattggtcacatccgaaaccaaactcttgtttgtcctttcgccaaatgatttggtgtatctgccgacgaaagaggaaattaggaacgggatttcgacgattgataggaaacgaatttataagtttgtaagttgcactggaaatgaaggacattttattcctgaaataatcgcaactccaattgtgcaaacaacagaacttggaagtaataacaaggcacagaaagcatggacaggcgaaatgattaaagaaacctgcttgcccatcaaagtggacagattaggtaatgttattgaactaaacggaaagaaactatgagcaacataaaacttttccaagacaagaaaatccgttccgcatggaacgaagaagaggagcaatggtatttctctgttgtggatgtggtggaggctttgacaaattcgcccaatccaaggcaatattggcggaaaatgaaagaccgtgatttgaaagaatatcagtcgtacccattttgggtacaactgaaattggcgagttcggatggcaaaaaatatgctactgattgcgccaacatcaaaggcctgttccgcatcatccaatccatcccgtcgcccaaggccgatgcgtgtccaatcccaacaattatctcccaacgcaaaccaacttggaattagaataagcaaccatgatcaaacgaaccctattcttcggcaatccggcttacctttcgctgaaaaacgcgcaacttgttatcaggctgaacgacgcgcaaacgcaacaggaagtgaccaagaccgtgcccatcgaggacatcggcgtggtggtgctcgaagaccggcaaatcaccatcaccaacggggcgatggatgcactgctgcaaaacaattgcgccgtggtcacttgcgacgagaagcacatgcccgccggtttgttgttgccgcttgaaggccacacggtgcaaagcgagcgtttccgttggcagattgaggcttcgctgccgttgaagaaacagctttggcaacagaccgtccaagccaaaatccgcaatcaggcttcggtgctaaaaagattgagtggggcagaggtgggctgcatgatggcttgggctaataatgtgaagagcggcgacagcgagaacctcgaaggtagggcagcggcctattattggaagtcggtgtttcccgaaatggaacgctttgtacgcgaccgcgagggcgatgcgcccaacaacttgctcaactacggttacgccatcgttagggcggtggtggcgcgtgctttggtggccagcggattgttgcccactttcggcatccatcatcacaaccgctacaatgccttttgcttggccgacgacatcatggagccgtatcggccttacgttgatgagttggtgatagagattttgcgtagcggcgcggattgcagcgaactcaccaccgacttgaagcggcaactgttgggcttacccgtgaaggaggtcgtcattgacggacggcgcagcccgctgatggtggcggttacgcaaaccacggcatcgcttgccaagtgcttcggcggagagttgcgcaaagtggtgtatccgataatggaattatgatggaccgtttcagcgaatacaggattatgtgggtgcttgtgcttttcgatttgccgacggaaacgaaaaaggagcgcaaggcctacgccgatttccgcaagcgcatcatggcggacggcttcactatgttccagttttccatctatttgcggcattgtccgagccgcgagaacgccgaggtgcatatcaagcgggtgaagtcgttcatgcctgagtttggcgacatcggtattttgtgcatcaccgacaagcagtttggcgacatggagattttcagcaactgcaagccgaaggcgatggacacgccgtgccagcaattggagctgttttgaatgggaaaaactgcggaaacaaaagaaaaatcccgctcggaagggcgggatttttcttttctgaaacaacttctaaaatgttgtggctctttttgttacccatatcgtgttgtttcaaagagcaaagatacaagataaatgcaagcaattcacaacgaatattggatgatgataaagaaaaacctagttgtttcaaagagcaaagatacaagataaatgcaagcaattcacaacgttgctccccgtgcttttactactcttccgttgtttcaaagagcaaagatacaagataaatgcaagcaattcacaacgcattttcaaaatgaggctcggccaattgtgttgtttcaaagagcaaagatacaagataaatgcaagcaattcacaacaagacaaggactcggtgtacacataccgcggttgtttcaaagagcaaagatacaagataaatgcaagcaattcacaactagaggcagtcgaaagctgctttccgtcttgttgtttcaaagagcaaagatacaagataaatgcaagcaattcacaaccgtgtcgatgtcgatatgctgcccgcctccgttgtttcaaagagcaaagatacaagataaatgcaagcaattcacaacctctgttgggcttcccgcgcttcgctcgctgttgtttcaaagagcaaagatacaagataaatgcaagcaattcacaacctttatggaaagagtaatcaaattttttcagttgtttcaaagagcaaagatacaagataaatgcaagcaattcacaacccgcgcgcacgtgttttgcaacgacgtgcagttgtttcaaagagcaaagatacaagataaatgcaagcaattcacaacgataccaatcctggaattgtcacgaacaatgttgtttcaaagagcaaagatacaagataaatgcaagcaattcacaacagagtttaaagattgtctatcaagtggttcgttgtttcaaagagcaaagatacaagataaatgcaagcaattcacaaccgaagcgcgtccgattcggcgcgcgcacgtgttgtttcaaagagcaaagatacaagataaatgcaagcaattcacaactggtagtccgtaagcatttttaacgcgtcagttgtttcaaagagcaaagatacaagataaatgcaagcaattcacaaccgcaacctaattgcatgaaatagcaagcaagttgtttcaaagagcaaagatacaagataaatgcaagcaattcacaaccaaattttgccttgatgccacgatacaaaagttgtttcaaagagcaaagatacaagataaatgcaagcaattcacaactagtgagcataacgaccaacaaaaccaaacgttgtttcaaagagcaaagatacaagataaatgcaagcaattcacaacaactcgctaacattgacgctaaaactaacggttgtttcaaagagcaaagatacaagataaatgcaagcaattcacaacggtggggggcgtgcaaacacgatgccgccggttgtttcaaagagcaaagatacaagataaatgcaagcaattcacaacgcaatatcacttcaatatcacttcttacggttgtttcaaagagcaaagatacaagataaatgcaagcaattcacaacagcgtgagcggtatgataaccttgaagcgtgttgtttcaaagagcaaagatacaagataaatgcaagcaattcacaacctgttcatcaatcaaccaacgctcgtataagttgtttcaaagagcaaagatacaagataaatgcaagcaattcacaacatccgccgctgtcgatggtcacaatgccatgttgtttcaaagagcaaagatacaagataaatgcaagcaattcacaacgcttttcaacgacaacgctatgttctttatgttgtttcaaagagcaaagatacaagataaatgcaagcaattcacaacattgctgaactcaataagaggattttgcagttgtttcaaagagcaaagatacaagataaatgcaagcaattcacaacggcatcaaatgcggcaacggcatcttccttgttgtttcaaagagcaaagatacaagataaatgcaagcaattcacaacagattgtagaagattcaaatttatcaacgagttgtttcaaagagcaaagatacaagataaatgcaagcaattcacaacgtttccattgtcgggcgttccatttttcttgttgtttcaaagagcaaagatacaagataaatgcaagcaattcacaactgagttctttgaatgttgctggaaacgtagttgtttcaaagagcaaagatacaagataaatgcaagcaattcacaacgcatggtaacggcggcggtcacttaccttggttgtttcaaagagcaaagatacaagataaatgcaagcaattcacaactgtactcattttgtaagattttagaaggttgttgtttcaaagagcaaagatacaagataaatgcaagcaattcacaattgctcaccgcatccaataaaactcctccttggccacaatcggcttaaaatactcgtcgataaccccttgctcgaccaattctttcggcgtgccttggcgcaaaggctgttgcggggcgacaacccacatcacgtcggcgtggcgaagcaaaaggtcaaggtcgtgactgctgaagaggatggttttctttttctcgcgcgagagtttgtgcatgatgtgtaccaactcgatcttgctcggatagtcgaggaaggcggcaggttcgtccatgaagatgagaggtgtgtcctgtaccaaggctttggcaatcatcactttctgttgctcgccatcgctgagcgaaacgaagtttctgttgaccaaatggctgatgccgacggtttcgaggctgtcgtagatgatttgttcgtcgtcggctttcagtttggccaagaggccgaggtggggatagcgaccggcggccacgatgtcgaaaaccttcaaaaacaggtcgtcgggcttctcggtcagcacgaggctgaaaagcgaactgcgctcggtgggggagtagtcgcgcaagtctttcccaaatagtttgacctcgccgccgacaggtttgatgctggccgacagcgtcttgaacaatgtcgtcttgcccgagccgttgggacctgccaaggccacgatgtcgccttcattgaggctcacgtcaatcgctggcatcagggcttggcctttgtagcctatgagtaggttcgttgtatggagcacttcgatcatctcatgactttttgacggtggaagatgacccacagcacgataggcgcaccaatcagtgccgtgacggagttgatgggcaggttgccttcaaacgagggcagccgcgcgatgaggttgcaaaacagggccaagtccatgccgaggaaggccgtggctgggatgagcagtttgtggtcgctactgcggaacaggaaacgcgcgatgtgcggcacggccaatcccaaaaaggcaataggcccgcaaaacgccgtgatgatggctgtcaggaagcccgaaaccaagatgatgagcatactgctccgcttgatgttcacgccaaggttttcggcataacgctcgcccaacagcaagaggttcaaggtcttgaataacagaaacgaggcaactccacctataattaccgtgaccgcgaaaaacggcagttgtgccttgctcacgttggagaaactgcccaagccccaaatgacgaaagaatgaagtccttccttttggctgaagaacttcaaaatgtcggtgaccgaactcgcgatgtaggcaatcatgatgcccaccagcacgaggctaaccatgctcctgagcctcgaactcagcgcaaggatgagcaatagcaccgcaaaagcccccaagaaagccgccacggtaacgccgaaggtggaccacaatgccaaagtgctgaccgacagacccgcagcagtacccagtaacacgaccaaagccaccccaaggcttgaaccgctactgatgcccaacaacgaagggtcggccaagggattgcggaacagggtctgcatcaaaaggcctgaaacagagagccctatgcctgccaaaagcgctgtgatggcttgaggcaggcggtaatccaaaatgatggtgcgctcggtggcagcttgagcgttgaacagagcgttccaaaacaccttccaaggaatcgatacggaaccatagcgcaaattcaaggcaaacagcaccaaacccaacacgatggtcaagaggaataccattataatgttggggagatggtttcttgctatggagggagtagtcatgttttgaaagcccgtcgcggagtattaatcgattttgcaaagtttggtgtatttgatgctattgtcctctaagtcaatgtgttcgctcagtggtttgatgtcttgtttcaagatggcttcggaaaacagttttgccacggccactgcgccttttaaacgcaaatggttattgtcgtatttgcccttggggtaccatttgtattcacctggttcgattctgtaaacgaaataaggcttggattcctcgtcgcccaaatcgttgagccattccatggtgatggtcgtcaaatccaccaagggcacgttttccctttcggctgttttttttgcttcggcgggataatctccgtggatgtattgaagactgtcattgataaacagacgacttgcgataggcgtgcaaactatggggaacgctcccgccatttttgcctgacgaatcattgcccctaagttttcaccatattcttgaggggtggaaaacagggcaggaaggccttccaatgcatcgttatggccaaattggatgacgacgacatcgcctttgccaattttcttcatcaccttgtcccaacgaccttcggcgaggaacgacttggtgcttctgccatctttggcatggtttctgactttcgtcgtttcgctcaagaaagtgggcagcacttgtccccaaccgcgaacaggagtggcaagggtgtcgggatagtcagccatggtgctgtcgcccaccatataaatggttagcgtcgatggtttcgtgcacccgagaaagaaaatggtggccaaaagaaagatgggaaagaaggccttcttcattgctcttactgttttacgaacttaatggtgttggaagcgttggccgacttgatggtaacgaaataaacggcattgttgagatcttcaagatgaatcgaagtcaagccttttgcgttgcctagttggtaaacttgttgtcccaagctgttgtaaatcacgatttcgcactcctcttcaggcaggttgatgctgaattggccgtggttggggttgggatagatcgccacgttgctcaaggtattttcgggggtggaggtgtacacaatgggaagcgtttgcggccaggcgtcgcagcccgtcacgatgatgcgcaggttgctggaataattgataggttcgtcaaacgatagggtggccaagccgttttcgtcggtgtaggcctgtcccaaaaggctttcgccatggaagagactgcaacggaaattcttgagtccgttcccgttgttgtcggtgacaatgacgggcatggaggagactccgtcgctgatttcagcgctgtagtcaacatgaggtgtgaaaggctcgtcgtgccacgggctgacggccacgtcgcccatcatgttgaggtcgtagaagttccagcgcagagcgccttcttcccattgtccgggtgcgttcacccatggtgcggtcatgatcttggcttctctcagcgccatgccgccgtaggggatgcggtcgttgtagtaggcgtcttccgtctcgcggtgcaggtggatggccgggccttcggtttggccttcgttaaaccaaccatagcgcgagttgccgaaggtggccacggcgaaattggaaatcttggtcatggcttcaaggatgcagttgtcagtaaagtcgccacacacgcagcctgaggtgtggaagaaagtgtagttgtggtcttcgccgttgacgctgctgaagttgctgtcggtgatgtcccatgatagccagccggccacataaaaactgttggcgtgtccgtcgtggtgcacatactgtgtgcctcggttgatggcatcgcgcagcagcgagccgctccagttgccttcttcttcgtagaggcgagtaaactcatagctctcagggatgccggtggtggtgtagccgttgtcgtcgcgggtgccgatgagcagttcaaggtattggctgccgttgctgtcgggattgtcgtaaaggtgttcgccagccatgatgactttctggaactcgccaaggacgggttcagcttggtatttcatggacttgtggagcatgttgttcagttcggtttggttgctgaagcacatgcgtccgatgccgatttcaggcaacaggtcgtcttcgccgatttcgccccagcggttgttgccgttgtcgttccatgtgccgtcaagggcagcaaagtaaaggtcggcagggatgccattgtcttcttggttgcctcctccactggtcacataacaataaaggccgcgaaaggggatgtcgggaacgtcgccagcaaggttgaccatctggatgccgttgtcttcgtattcctggatgatgtagttgcggagcttctcggggttgtcttgtccgctcatagtattgagaatattctcgatttcaacgactttggtgcgcaagccgcgagcttggtagaaacttacatattcatcgaaagaactcacatattgctgtttggtgaccacgagcaggtcgtagccgcctttggtacggcccttgctgttgtaggtttgcagcatatcgggattttgggcgaggcgcatggcgcgtgtggcgttgtcgccgttgagccacagcttgcgactttgatccactttggcggcggcggtcttgattctcaccgtggccttggcggcgtatctcacctcaccagtggccggaatgtactgcacgggcgtgaaggccgaaaaagcaaaaccgacaccgttcaaatactgtgtggtgagtttgccgtgggcttgtgcaggatagacgctacgcgaaacataaagcgtttcgtctttctcaaactgcttgcgcacggggtcggaataggtgagggcagtctgatagggatagaggttgtggctgccttccatcgtttggaaatcagagagttccacttcgatggcgacggcctcttggccttgcggaagcatcaagctgacgctctgccacggcagcgaaggctggccggcacgggcactctgcatacagcccgtaaactggatttgttcgtagccttggatttgactcacggtaggctgactaaattcataggtctgttcgatggtctgcgccgaagctaacaaactgaccatcatggctaaaaggattaaattcagttttttcatataaaataggatttaattggtttgttgatttaatgggtgcaaaaatgggtgcaaaaataacgagaaatccaaaaaacttgtcatttacaccgaaaataattttcaagaatttttttgtattgtctgtaactattttctcccatctccgtattacgggtattacaaatctatcaaattatgcaaaactacaaaaccatttcattgtttttgctgctgatttcgagcagtttaaccctgttagctcaggaagatgcctacaacaccttgaccaaccccaaagtggaaaacagcgaactctatcgcaacgggaacgcctaccagcgtgattttctgctctttgcagacatgctggaaaacacgcatccaatctttgccgaaaccggaagaaggcattacgacatggatagcctgacccgtgcgggataccagtatcttactggttgtgagagcgatgaccaattgaaacagtatttgcaatccatcctttcgccgctcaacgatggacattcgagcgtgatgatggatttcgacgggaaactttaccctttcaagtattttgccgatggcgacaccgctttctatatgattggtatcccgaaagacttctccgccgagttgggtcaccgcgtcacgaccatcaacggcagacctccccgcgaggtcattgagagcttccgtcccttgatgagctgcgacaacgaaaacttcttcatggacaacgtgaacaattacatgcagttgaaagcggcttgggactacaacccttaccgccgccccgacgacatgctcgaatttcagttcgacgacggcaacacggttttgctgcctgcggtcgggcaagaggaacttggccaagatgacattgagtggttttatccccaaaaaaccaatgcccccttcaaaaaaagcagcaagtacttcagttacaacatcatgccagagaaacaactttgctacttgcgcttttcacagtgcgctgaccggaaca

SEQ ID NO: 1097 - DNA, 24572 bp, synthetic construct
  source 1..24572: mol_type = other DNA
  misc_feature 1..24572: note = Synthetic
  variation 16639..16681: note = n is a, c, g, or t
actcaacatcccgatttactgctacgaagaggccgctttccagccaaaacgcaagaacttggcttattgccgcacaggcgaatacgagtcactgtcgagccgtctcggcaccgaggaatggaaacctgatttcggtcctaacgagtggaacgagcatgtggcacagaccggcgccacacaggtcggagcccgcgacttcctcatcgccatcaactataacctcaacaccacttcgacacgccgcgccaatgctatcgctttcgacgtccgcgagaaaggccgtccgaagagagtgggaccgaaggtcaccgacaagccgatgaaagacgagaacggcaataccatcatgattcctggcactctgaagagcaccaaggctatcggatggttcatcgaggaatacggcatcgctcaggtgtcgatgaacatcaccaacatcaacgtgtcaccggtgcacgtctgcttcgacgaagtgtgcgctaaggccgcagctcgcggagtgcgtgtgacaggctgcgagatcgtcggtttgattcctaagaaggtgctcatcgacgctggcaagtattatcttgcaaaacagcagcgttcactgggcgtcagcgaggacgaaatcatgaagattgccatcaagtcgatgggtctcgacgatttgaagccattcaacccgaaagagaaagtcatcgagttcttgattgaagacatgacacagaagaagctcgtcgacatgacatgcacaggctttgccaacgagacagccagcgagagcccggcaccaggcggtggctcaatatcagcttacatgggcgctctcggcgcagcattggcaacgatggtggctaacctgtcatcacacaagccaggttgggatgagcgctgggaagagttctcgaaagttgcagaaaaaggtcaaatccttaagaatcaattacttgatctcgttgacgaagacaccaacgcattcaacaaaatcatggccgcattgcagatgcctaagaagaccgacgccgacaaggccgctcgtatggaagcccttgagttagcctcacaatatgctaccaaggtgccgttcaagaccatgaacgttgcatttgaggcgttcgagatcgtcgaggcgatggcaaagacaggcaatcctgcatcagtgtcagacgccggagtgggtgctttatgctgcagaagtgccgtcatgggcgcatatctcaacgtgaaaatcaacgctgctggacttaaggacagagcatttgccgacaaaatcgtcgccgatggcgcaaagattgaggccgctgccattaagaaagaggctgaaattcttgaggttgtcaataagattatcaacaaagaataatttaaccaattgataatcaaatagataatattgttaaaaattttctaaatttttggcttaaaaatattgtaaggtattaaaaaaatatgtatttttgcagtccgaaaatttgaaaggaataagatatgtcaaagaaagttaaagacgcacgcgtacaagtgattttggagtgcacagagcaaaaggcaacaggcatcccgggaacttctcgttacgttacaacgaagaacaagaagaacaccccagagagattggaactcatgaaatacaacccaatcctcaagaaaatgactcttcacaaagaaattaaataagatttaggatatggcaaagaaggtagttgcatcattgcacacagctggtaaggaatatacaaaggtcatcaaaatgaagaaatcagagaagactggtgcttactattttgaagagactatcgttccgattgaccaggcacaggaattcatcgcaaagaactaatatagttttttgaattgatttagaatagctttcccgtttcggcgggagagctttttgaggtttagacaggatggacgggataaaagataagacaggattaacaagataaacaggatttttgtttatttaatatggaagactaattatcttgtaaatcttgttaatcctgtctaataaaaaaaggaaatcctgtcgaaaaaaaacattatctttgcaaaaaagtttgtcatgggaattttttcgtttttcaaaagagacaaggaagctaaggaagacctgaacaaaggtctggagaagacccgcaccagcgtgtttgaccgcatctcgaaggcgataataggaaaatcgactgtcgatgacgaggtcttggataaccttgaggagattttggtgacatcagacgttggcgtcgataccactttgaagattattgaccgcatccagaaacgtgttgcacgtgataagtatctgggaaccagcgagttgaatatgattttgaaggaagaaatcgcggcgttgttgcaggagaacaactctggcgacggcagcaacttcgaccttccagagggtaagaaaccttacgtcatcatggttgttggtgtgaacggcgtgggaaagaccaccaccatcggcaagctcgcttacaacttcaagatggcaggcaagaaggtgatgctcggcgcttccgacacattccgcgcagccgctgtcgaccagctcaagatttgggctgaccgtgttggcgtgccaatcgtgacgcaaggcatgggcgctgacccggcttctgtcgctttcgacaccgtgaaatcggctgtggcacaagatattgacgtcgtcctgatcgacaccgcaggccgtctgcacaacaaaatcggcttgatgaacgagctttcgaagattaagaaagtatgccagaaagtcatccctgacgcaccgcatgaggtgctgctcgttttggacgcatcaacaggacagaatgccatcgaacaggctcgccagtttatcgctgcgacagaggtcaacgcattggcactcaccaagttggacggcacagccaaaggcggcgtggtcatcggcatctccgaccagttcaagatcccggtgaaatacatcggagtgggagagaagatggaaaaccttcaaatcttcgacagaaacgaattcgtggattcattgtttaagtaaaggagccaaggtgtcatttcgagcgtaacgacgtgaagtcgagaaatccttttttatcgaaaacaattgaatgatttcgtttaacaaggatttctatattccgttccatttcattccacttctgtcgaaatgacaaatatatacatatgaagaaacaagtactaaatattgtcacattaggttgctccaaaaacaaagtcgactcggagcatctggcagcattgctgaacaacacatataaaatcgtccacgactcggatgagaaatccgacgtggtgattatcaacacctgcggcttcatcggcgatgccaaagaggagtctattgacacgattttggaatatgctgagctgcgtaaggcaaacaaaatcaagaaactttatgtgatgggctgtctctctgagcgttacaagaaagaactcagcaaggagattcacgaggtggacgctttctttggggtggagccggttcaacatgttgccgcagacatcttgaaatcagattttcatgctgaatattgctgcgaacgagtgctttcaacaccgtcgcattacgcctatctgaagatttctgagggctgcaaccgtcattgcgcattctgtgcgattccgctcattcgcggtgaccataagtcagtgccgatggaaaatctcgtgaaagaggctgaaaatctagcaaagaaaggtgttaaagaacttattctcattgcacaagacctcacatattacggctacgacattgatgggaagtcgcatattgttgagctggttcagaagttgacagaagttgacggcatcgagtggattcgtttgcattacggctatccgctgggatttccggtggagttgcttgagttgatgcgcgacaaccctaagatttgccattacatcgatttgccgttgcagcatatcagcacgcctattttgaaggctatgcgccgtggcgtgacccacgagcaaacaattgaatttgtaaagaaagtgcgttcctacgttcctgatatcgcgttcagaagcacgtttatcgtgggatttcctggcgagacggaggagcaattcaatgaattgattgatttcatcaaggagatgcgtttcgagcgcgccggcgtgtttgcatactcggctgaagaggggacacctgcctacgaactagaagacgatgttccggaagatgtgaaacaggcgcgcgtcagtaaatttatggatgtgcaacaggatatctcattggaaatcaattccaaacgtcttggaaggactgaaaaagtgctcatcgaccgcaccgaaggcggctattatgtcggccgcacccaatacgactcgcccgaagtcgacgacgaggtgcttatctcgatgaaagacaataaaatagaaatcggctctttcgtcaatgttaagattactcaagccgattatttcgattgctacggagaagttattggttaaaagattatagttaaaggttaaaagagggggcgaaccggtttttatcgatttgctctctcttttctcttttaacttttaactaaaatcaccatccgttgcctccggcatttactgttgtgtacattgagttgagcgttgccgtggtgctttggccgccgctgtatgtcacgtttccggtatagtatccgttccattcggtgcctccgctgatggttccgttatattttatcgtatatgtctgaccttgttggagctgcgggtcggtgaatagcatcaccatgctgttgcctccgccgggaccgccgccaccgccggtgaatgtcgggcattggtaggtgcagacaaccgtgccgtctgacttgagaatctggatggcatatccttgctgtgtgttgattttcatgctcggctgggtgcagacgcttgctgtagggtcgctggtggcgccacctgtgccgatggctgtgcctccggtgattttaaactggttgttgtcgcagtcaaaaccttcttcaggcgaatgtgagccgttggagatgaagaatcctccgttgatctgcatcgttccgttgcagtcggtgccgtcattggcatcgctgtgagcgtaatatgtcccgccgttgaggatgagttggcttgctgcgttgatagcgtcatctttctttgaataagcctcgatgtttcccccgttgatggttaaaacagcattgctttctatgcagtcgccgccttcgttctgcgtctgtgtgcagttgactgtgatgtttccgctgttgattgtcatattgctgtccgctttgatagccttcgggttggcgtattcgccttcaccgcccggccaccatccgccgccgctgccggcttccacggtgatgcgctcgccactcgtcgtgacattaaggataaggtcgtcgttgctggcgttctccagaccgattttcatggtgccgccagagtcgatgcccttgccgcctgccccggtgcttctcagaaggaagttaccgcccagaatctccatgttgccgtcacatttcaggcatgacgaggtgtaggagtctttggtgcttccagtgacggtgtaagctgcaccgtctccttgtgtgaggatgtcgaaatcgccacctgtaatagtgatgtttccatcaacactgattgactttccgccttggttgctggtgggtaatgtgatgttgaacgtgccaccattgatattgatgtcgttgtcgcattttattgctgtacaatacgacggaacattctgattgttaacggttttcaatactgtgttgcctgctgccactatggtgaaatcaccaccgttgacagtcatgttgttgtcgcatttgattccttttgagatatcgccgttcatggtaatgttgaacgaacctccgttgatgaccaaggtgctgtcggctgagagaccgttgacatcggttacgtcgctggtaatcacaaagttacccgagttgatggtgcaaattccttttacttttatcggatgtttgacaaaacttgtgacgttaagtgtgccgttgccttgcaccaataagtcgctgttgctcatgagagctgctttcttgtcgctatcagtgccgtctctgagcgagtttgtcgtgccgtcagcgatttgcaggataacaccagcgtcgcatgtcaaatccattgccttgcctgtagggtttgtaagactcacaccatttaaaacgatggtcggtgttgtcacactctctatggtgaaacgacccggatttgctgtacctgacaatgcgtaagtgatattgtcggaacccagcgatgtgattgaaacctttgcctcgtttaccgtcacgatgacttgtgtggcagggtagggattgatgacttctgcacttgtaccattataatttatgtaaacgatgtcacccgaacctgtcggaataaacgggaacgtcagactgtcgacctctgaacagtcgaaagaatataagttgtcggttgtacgcactttaatcgggttgtttgccgtcgggttgacaaacatgctgtcgattgatgagacaggcgcatctaagatgatgcccttgttttgctggccatgaatacgcacgtggtattcgccatcttgtgctttgatagataatccggtgattatcaatgatataactaaaactaacctcttcatggcttacatttttataaattttgaaaactcgttgcctacacctattatgtatatgccggcattcaaatcgcttacgttgatgtcggcttcattggaaacttcaattctcttaatgactttgccgtcaattgaatatattgtaactgattgatattcagatgtatttaatatttttaaaacatctgttgccggattgggatatattgtaaggtattgattctcgatttcgtcggcgttgtctgatgttgagaaataggcttttctgaggccagacaagtcgtaagacaccgtttccccattgcttttaatgaagatttgggtgtcggagtagtagatttttgagtcgctgctcattacgtggtcggcagatgtgccatcggttttcacaatggtgaacgtgacttcctgtgcaaatgctgggcacaaaaacaccattgacatcaatgctgttaataaaaattttctcattgttaaaatgttcatatactatatatgtgcaaacgacaaatatacaaaaaatattttaaatttccgacaaaaaaagaaaaagtgacataaaaatgccactttttatcagttggtgtcatttcgagcgcaggcgaagccgaagtcgagaaatccttttctaaatgttaacgtttgaagaggatttctccattccgcttcgcttcagtcgaaatgacgagttattttttcggtgcctcgagcaggatgtcgcacagcagatcccagaacatttggactgtcttaatctcgattctctcgtctggtgagtgcacgccgcggagtgtcggaccgaatgaaatcatgtccatgccggcgatcttgtcaccgatgaggccgcattcgagacctgcgtggatagccttcaccttcgggtctttgccgaagcgtttcttatagactttctcagcgatggcgcagattgccgagttcgggttcggtgtccagcccggatatccgtcggtgtgtttcacctctgcgttggcgaggttaaagcatgcctcgaccattgctgctgcatattccttagccgactcgatggagctgcgttgtgaggtctggatgaagaaataaccttcttttttcttcactgaggcgaggtttgtcgatgtctccacgaagttcgggacggtctgtgaccactcgatgacgccgtgagggcaggtgaggagaccgttcaggaggtcgaactgtgtcatctcgtctattacgacgtcggctgtggtctccgatttcttggctttcacagcgatgcctggctcggtgacttgatattcgttcttgaagttcttctcgaacttcttcaccatagcctcgaatttttttgcacagtcattcgggatgaataccactgctgttgcctcgcgggcgatggcgttgcggaggttaccgccttggatgtcgtagatgcggaggtcgtagtcgttggtggcctgccataagattctggttaacagcttgttggcattggcgaggttcttgttgatgtcgtcgcctgagtgaccgcctttgagtccgctgaccttcacgtcgtaagggatgtagccttcaggggcgttctcgagtttgtagaaaatcttgacgatggtgtccatgccgcctgcgcatccgatgaagatctcgccttcgtcttctgagtcgaggttgaggaggatacggcctttgaagtctttcgggtcgagtttttcggcgccggtgagacctgtctcttcgtcgacggtgaagatgcactcgagtggaccgtgtttcacgtctttgtcagtaatcactgccaatgccgcagccactccgatgccgtcgtcagcaccgagggtggtgccgttggcatgcagccattcgcctttcaacacagcctcgatagggtctttgtcgaagtcgtggaccttgtcgccgttcttctcgcacaccatgtccatgtgagcctgcaggatgatggtctggcggttctccatgcctttggttgccggcacgctcatgatgatgttgccgcaaggttctttcttgtattccaccttatggtctttagcccatttctcgaggtaagcgaccattttttcttctctcttcgaaggacgtggcacgcccatgatgccttggaattccttccaaacgccttccggttttaatgttgttacaatctcgttcataatttaatattttgttgttatttgtcattcaaattgtcatttcgagcttgtcgagaaatcctctattttcgtttgcttttggaataaaaggatttctccacttcggtcgaaatgacacatcatcttttcatgagttctattgtctttattggatcttccgatttgaacaccgcgtttcctgccactaaaacatcggctcctgctgcgaaaagcttcggtgcgttctcgacattcactccgccgtcgacttcaatcatggttttaagtccttgattttcaatcatctggtgtagtttttctatcttggcgtatgtgcgttctatgaatttctgtccgccgaatcccggattcactgacattaataaaacgaggtccaagtcaccgaggatgtcttccaacagtgtcactgaggtatgcgggttgagcaccacgccggctttcacgcccagtgatttcagcatctgcacgctacgatgtatgtgggtacttgcctcgtagtggaaggtgatgatgtcggcacccgcgtcgcggaacttctcgaaatagcggtcgggttcgacaatcatgagatgcacgtcgagaggcttaagtgcttcttttttaatggcttgcacgagcggtatgccgtaagagatgttcggcacgaacactccgtccatgatgtcgcagtggaaccagtccgcctgactgcggttcaccatgtcgatatcctttgccagatgcaggaagtcagctgaaagcaacgatggagcgattaatttgttcatttttagaatgatttttatgatttgcaaagataggaaataatttttgaaattgagaattttttttgtcatttcgaccgcagcgtagcgtagtgaataaatcttataaaacgcattaagccatttttttaattattttattccgaaaattatgaaaatcggaataatatacatgttttttgggtgctaaaatgagaaaatcggaatgataagtgatttattaacagatattaaaaatatacatataaattgattaaagtaaataagttgacttaaaaacaaggcgtgtttgtcacatataaaaaatacccccgttaaggacgagggctacctaatgttttcacaacggaataatccttattgtgaattgcttcaaaatttgtactgcaaaaatacaattatttttgataatgttgtaaattaattgaaaaatttttacttttgtggtgttaaatcgtacttgtgagcatatgaaaaaaatattaggccttgatttaggaaccaacagcatcggttgggctgtggtgaatgcaaatgaggaaactcgtaatgatgcaactacatacttgaaacctgtggaaattagtgctattggtagtcggattattccgatgtcggcagatattctcggtgattttgataaaggaaactcggtttcgcagacagcagagaggacgggttatagaagtatccgtcgtttgcacgagcgaaacctattgcgccgtgagagaatgcttcgagtattaaaaacattaggattcctgcccgatcattttgcatctcaaattaatggatacggaaagtttattaaacattgcgaaccgaaattaccttggtataaagatccagatggcaagatggaatttctatttaatgattctttcaacgagatgcttgctgattttgccgctaatcagcctcaacttatagaaaatggtaaaaagatcccttatgattggacgatttactatttgcgcaagaaagctctgtcgcaaaagattactaaagaagaacttgcatggatattattgcaatttaaccaaaaacgcggctactaccaattacgaggcgaagaagaggaacaggaagacaaacttgtcgaattccttgcacaaaaagtggtatcggttgaagctaccgatgaaaaaaaaggagatgagatctggtataacgttcatctggagaacggaatgatttaccgtcgcaccagcaaagaaccattggattgggtcggaaaagtgaaagagtttattgtcactacagatttggagaaagacggcactcccaaaagagacaaggaaggaaatatcaaacgctctttccgcgctcctaaagaggatgactggactttgatgaagaagaaaacggaggccgacatagagaatagtcataaaactgttggctgctacatttacgatgcactacttcaaaatccgaatcagaagattatcggcaaactcgtacgcactgtggaacgtaagtattataaggacgagctgaaacggattcttgaggttcagcaatcattgattcctgaattgaaagacgaatcgttatacaaagcctgtgtggaagaactatatcccaacaacgaagcacatcgcaatgttatcgcaaaaccggattttgcccatttgttcattaacgatatcctcttttatcatcgtccgctgaagagcaagaaaacgctcatcagcaattgtccttacgagagtcatttcggcaaagagggtaacgagtaccccgtgaagtgcatagcaaaatcgaatccattgttccaggaatttagattgtggcagtttgtacagaatttgaggatttttgagagagaaaaagaagtggctggcaagcttatgacagacgtggatgtcaccagtgagtttctgaaaaccgaagatgattttgtcaaattgtttgattggctgaatgacagggctgccataaaacaagatacgttgttgaactcatatttcaagtttaaaaagcagaaaggacaagagcaatattcataccgatggaactatgtggaggacaaagagtatccttgcaatgagacgagaataacaatattaaatggactgacgaaatgcggtgttagtgctggcttcctgactaaagaacaagaaatggcactttggcacattctttattcagtggaggataaaattgatataggcaaagctctgaaaaagtgcgccgaaaagaataatttgtcagagtcatttgcagaagtgtttgctaaaatcaagccattcccgaaagattatggctcatattcagagaaggctatcaagaaactgcttccgctgatgcgaattggcaaatattggagcattgacgctattgacacgaaaacgaaagaacgaattgataaaattatcacaggagagtatgacgagaaaataaaaaatcgtgttcgcgaaaaggcaatcaatttgactgacgaaacgcatttcaaaggtttgcctatttggttggcttgctacattgtttatgaccgccactcggaagctaaggatattggcaaatgggataagcctgaagatattgataattatctaaaggaattcaaacaacattcgttgcgaaatcctattgtggaacaagttgttacagaaacattacgtaccgtacgagatatttggagacaagaagggcggattgatgaaatacacgtcgaacttggtcgtgaaatgaaaaatccagccgacaagcgtaaacggatgactgaaagcattttgcaaaacgaaaataccaacctgcgtatcaagtcaatgcttatggaatttatgaatcctgaaatgggcattgaaaatgttcgtccgtattcaccaagtcagcaggatattttgcgcatatacgaggaaaatgcacttgataatctaactaaggatgacccggaatttgatttcgtaagcaaaatatcaaaaacagcccaaccctcgaagtctgatattgtgcgctataaactgtggcttgaacagaaatatcgttctccttacacaggcgaaatgattccgcttgcaaaactctttaccactgcttatgagattgagcacgtgattccacaatcacgctattttgatgattcgtttagcaacaaagtgatttgcgaagccgaagtaaacaaactaaaagacagacaattgggatttgaatttatcaagaatcacaaaggagaaaaagttcaaatcaatcaaggaaatacagttgaaatcttatcagttgaggcttacgagaagtttgtgaaagaccattacaataacaaccgagccaagatgaaaaaattgctgatggatgatattccagatggctttattgaacgacagttgaacgacagccgatatatcagtaaagttgtgaagggactgctttccaatatcgtgcgtgaaaaacttgtcaatggtgaatatgaacaggaagccgtttcgaagaacttgatttcgtgcaacggatcgattaccgaccgtttgaaaaaagactgggggatgaacgatgcttggaacaacattgttttacctcgctttaagaggttgaatgaactgacaggcaaaaatgttttcactgcaataagtgcagaaggacacgaaataccagctatgccgcttgaattacaaaaaggattcaacaaaaagcgtattgatcatcgtcatcatgcaatggatgcaatagtgatagcttgcgccacccgcgaccatataaatttgcttaacaacgaagctgcgcattccaaacataatgcccaccgttaccaactgcaacgcaaactacgcaggtttgagaaaacgattattgatggtaaagaatacgaaattgccaaagaattcatcaagccttgggattcgtttaccactgatacaaaacgagctttggaaaacattattgtcagtttcaagcagaatctgcgcgtaatcaacaagaccacaaactattatcagcattatgacgagaacggtaagaaagtacttgtgccccaacagaaaggtgacagctgggctgtgcgcaagtcgatgcacaaggatactgttttcggagaggttaacctgagaatgaaaaagactgtttctttgaacgaggccatcaagaatccagagcgcatcgtgaacaaagatttcaaagttaagatgaaagagctgctgagagatggccgggatgtcaaatacatcaagaagtatatagaggataataaagacgtatggtcggatattaacctgtccaagatagaggtttactatttcactaatgagactaatgatcggtattttgcaacacgaaagccgattgacacttcatttaatcgtaagaaaatcgaagaaagcgtaactgacacgggtgttcagaaaatcttattggcgcatttggacactaaaggtggtgaccctgaacttgctttctcgccagatggcattgacgaaatgaatcgcaacgttgtcacactcaataaaggcaaattccatcagcccattctgaaagtacgtgtctatgaaaaggctgaaaagttcgccgttgggcagaatggaaacaagtccgccaaatttgttgaagctgcaaaaggcaccaatctgttttttgccgtgtttgcaacaaatgttgaagacaaggaaactggcgaaacaaaagtggttcgttcctatctgaccattcctttgaatgtaatgattgattgccagaaaaagtatggtaaacaatggaggagcaatattgggacatatctgaaaagagaaggtttggtggctaatgatgcaaagctactctttgtactttcaccgaatgatttagtgtatttgccgacgcaaaaagatttgaaagaaggaataaaagggggtgataaacagcggatttataagatggtctcttcgtcagggaatcaatgctttttcctaaacgaaattgttgcaaaagccattgttgacaaagttgaatttacttctttgaacaaagctgagcgagctatcactggcgaaatgatcaaagagacttgtgttcccatcaaagtcgacagattgggcaacattattgaaattaatggcctcaaaatatgattaaaaagacccttttctttggcaatccggcgtacctgtcagtcaaaaactcacaacttgttgtcaaacgaactgatccggaaacgcaacaggaggttgtaagaaccgttccaattgaagatattggagtggttgtgcttgaagaccggcagattaccatcactaatgtcgcattggatgctttgctgcaaaacaattgtgcagtaataacttgcgatgagaaacacatgcctgccggtatgcttctgcctctcgagggcaatacaattcaaagtgaacgttttgccaatcaaattgatgcttcactacctttgaaaaaacaattgtggcaacagacggtacaggcgaaaatccgtaatcaggcgtcggttttgaaaaggttgagcggcgttgaagtcgggtgtatgcttgcttgggcaaacgatgttaaaagtggcgacagcgataatcttgaaggacgcgcagcagcgtattattggaaaaacattttcccgagtttgccaggatttactagagatagggaaggggagatgccaaacaatctgctgaattacggttatgcaatagtgagggccgtaattgcccgcgccttggttgcaagcggtcttttacctacactcggaatccatcatcataacagatacaatgcgtattgcctggctgatgacattatggaaccgtatcgcccgtatgtcgatgagttggttgtcaatataatgcgcagtgatatcgattatggggagttgactccggaattgaagaaacagttgttgggcttgcctgttactgaagtgatgattggcggacaacgcagtccgttgatggtggcggcatcgcaaaccacagcttcgctttgcaaatgctattcgggggaattgcgaaaaatggcatatccaaccatggaaatctgacatggacaggtttagtgaatatcggattatgtgggtattggtgttttttgatttgccaacggatacaaaaaaggagcgcaaagccgcggcggagttcagaaagaagttgttgaacgatggttttacgatgttccagttttcaatatatctcaggcattgtgcaagcatggaaaacgctgatgtccatataaaaagggtgaagatgtcgttgcccgagcatggggaggtcgggattatgtgcgtgacggacaagcaatttggcagtatggagatttttcacaacaaaaaaattgaggaaacgggcaccccggggcagcaattggagctgttttgaaaatataaaaccatgtgaaaataaaaaatccggcttttttaaggtcggattttttatttctgaaacaatatttaacttgttgtgactcaataatttgcagcgattgagttgttttcgatgcaaatttatacaaattttgaaagcaattcacaacatgaagcaaaaaaacaagttgaggaaatgtgttgttttcgatgcaaatttatacaaattttgaaagcaattcacaacaagattcctgccatatcaacattgagatcagttgttttcgatgcaaatttatacaaattttgaaagcaattcacaacaagttctctgtctgttgttcagttagattggttgttttcgatgcaaatttatacaaattttgaaagcaattcacaacgacttcgtgtgcatgatgtcgtaatacagagttgttttcgatgcaaatttatacaaattttgaaagcaattcacaactaactaaataattctgtttcaccccaataggttgttttcgatgcaaatttatacaaattttgaaagcaattcacaacaatgtacgtttttgcctacattatagtgggttgttttcgatgcaaatttatacaaattttgaaagcaattcacaactttgcctccaatttgtcataataattcaaggttgttttcgatgcaaatttatacaaattttgaaagcaattcacaaccagcagattttgtgcaaaagatttgatttcgttgttttcgatgcaaatttatacaaattttgaaagcaattcacaactcaggacggcatcgttagcaacattaggttgttgttttcgatgcaaatttatnnnnnnnnnnnnnnnnnnnnnnnnnnnnnnnnnnnnnnnnnnnaattttgaaagcaattcacaactcaggacggcatcgttagcaacattaggttgttgttttcgatgcaaatttatacaaattttgaaagcaattcacaactaatttctgtaaggtttataaacctttccggttgttttcgatgcaaatttatacaaattttgaaagcaattcacaactagtgcagcttcaatacattcttttcttggttgttttcgatgcaaatttatacaaattttgaaagcaattcacaacccataatcatttaattttttgaatacaaaagttgttttcgatgcaaatttatacaaattttgaaagcaattcacaacttaaattcgatgtgaccttttgcaaagtctgttgttttcgatgcaaatttatacaaattttgaaagcaattcacaactagtatgaactattttttggatttctaaaagttgttttcgatgcaaatttatacaaattttgaaagcaattcacaaccttaattttgaaaacacaaaattggctgttgttgttttcgatgcaaatttatacaaattttgaaagcaattcacaacaaagttacatatcgaataagattcagttgtgttgttttcgatgcaaatttatacaaattttgaaagcaattcacaacaagtttgccgacggcataaagtacctcggtgttgttttcgatgcaaaattacacaaattttgaaagcaattttgatggtttttttaaaaaacctttgattgaaagacatccttaaattgaaggagattccttgctccgctcggaataacaggatgattttgtgtgaacattgtggcgcggcccgattgtgggagcggcttgttatgaaaaatttttcaaaaaatcttttgggtatcaaaaataattcctatctttgcagcggaattataaaattaaaatttatgcccgagatgaaaataacaaagatctggttcgacggtgagcatctggccggagaagatgaaaacggtaatgtttataagcaatcgctgctgtggtatcaaaaactgatagatgcctcagatgaggagagaaacgcctattcttttggtttcgatggcattcattggcgaaatctcgacgttgatgtcagcttcgagagctttttatatgaagatgccgaaccatctgattttcaacgatttttcctcgtccataaggagataaacatcactgaatttgcaaaaattgcaggaatcaacgccacattgttaagaaattacatcaacgggtttaaaaagccttcaaaagagagggaaaatgagattttggacgcgattcataaaatagggaagaagttcgttgaagcaaagttttgaaaataatacattaagatacaaattttatactttaatatctcaaagaaaacacaaaaagtttcaatataacacaatattgaacaaattgttttcaaaaaatctaaaatagaactgcttttgcctgaatttcgttatctttacggggtataatttaccataaagaagactaaggaagacaacagaaaagagcgcagatcgtcgtggatgccggtagtgtaatctgaactgtgtcaaggtctgattccatcattaatacacggtgcaaaattacactctcccaaaaaataacaggaccactcaccgtagccctgttaatcctttaatgattttcaaactgtaagatcaaccaagataactcttgagaatcttgcttctgcttgtgtgcttcaagcgacggatcgccttctccttgatctgacgcacacgctcgcgtgtgaggtcaaacttctcaccaatctcctccaaagtcataggatgaccgccgttcaatccgaaataaagacggacaacgtcggcttctctctgcgtcaaagtcgaaatggcacggtcaatctccttgcgtaatgactcgtaaagaagctgcgtctcaggtgtcaccacctcgtcgctcttcaagacgtcgtacatgttgttgtcttcgtcctgcacgagaggagcgtccatcgacacatgacggcccgcgttcttcatcgactccttgacttcggcttcggtcaagtcgaggacttcagctatctcttcagcattaggctcacgctcaaattcctgctccagctttgcgtatgtcttgttgattttgtttatcgagccgatcttgttcaatggaagtcggacgatacgtgattgctctgcaagagcctggaggatggactggcggatccaccacacagcgtaagagatgaacttgaaacctcttgtctcgtcaaaacggcgtgccgccttgataagtccgaggttgccctcattgatgaggtcggggaggcttaatccctgattttggtactgtttcgacacggagacgacgaatctcaagttggctttcgtgagcttctccaaagcggccatgtcgccctgacggatacgctgcgcaagctcgacttcctcgtcagccgttatcaattcaactttaccaatctcctggagatacttatccaaagaagcggtttccctgttggtaacttgtttggtaatctttaactgcctcatattttattttttaggattatctttttttagttaaatgttaggagagaaaagttaaaaaagcgcgaagcgcatcatctcttttaacttgcatcttttaacttttctcttttctcttttcttctttaacaaattacttcttctcgcgtcttggacctttgtggtcgccgcctttgtggtcgccacgcggtctctctggcttctcaacgtaaccttcaggtttcggtaataatgcctttcttgagagacggagcttgccggtcttcgagtcgatgtcaatcagcttcacctggatcttgtcgccttctttcaagacgccgtccatggtctcgagacgtttgtagtcgatctctgagatgtggagcaggccgtctttaccaggaaggatctcgacgaaagcgccgaaaggcatgattgacttcactgtgccgtcgtagatctcgccaacctcagggactgccacgatagccttgactcttgcctttgctgcctcgaggtcttccttgttggtggaagcgatctccaccatgccgcatttctcgtcttcagtaatgacgatgacggtgttggtgctcttctgaatctcttgcacgacttttccgccaggaccgatgactgcgccgatgaagtctttagggatgatgagcttctcgatacgtggcactgactctttgtagtcggcacgtggctcgctgatggtcttggccatctcgccgaggatgtgcattctgcctgcctttgcctgctcgagagcctcgctcaacacttcgtatgacaatccgtcgaccttgatatccatctgacatgctgtgatgccgtcgactgtgcctgtcaccttgaagtccatgtcgccgaggtggtcctcatcgccaaggatatctgacaagacagcgtatttctcgttgtcggtgataagacccattgcgatacctgcgacaggttttctcatcttcacgccggcgtccatcaacgccaatgttccaccacatactgaagccattgatgatgagccgtttgactcgaggatgtccgacaccacgcggatggtgtaaggattctcttcgcctgaaggaatcatgttcttgagagctctctcagcgaggttgccgtggccgatttcacgacggctgacaccgcggcttgccttgcattcgcctgttgcgaagctcgggaagttgtagtgcagcatgaagttgcttgtgccttcaacgacggcgccgtcgatggtctgctcgtcgagcttggtgcccaatgtcactgtcaccaatgcctgtgtctcaccacgtgtgaagatggcagagccgtggcatgaaggaagcacgtcgacttctgtccagataggacggatctggtcgagtttacggccgtcgagacgtttgcgctcgatcaggatggcgtcgcgcaccgccttgcgctcgatgtcgtggaagtaacgttttgccatcgaggtcttctcttcgagttcctcttcggtgtattttgtgagataattttcaaggattgccgcgaaagcgtcctcgcgctcgtgtttgttggcgttgcctgtgagagcgaagtcgtagcatggcttgtagcagcatgccatcatgtcagcgcgaaggtcttcgtcgttgacttcatggcagtactctcgtttcgggttggccttctcgactcttgaagcgaggtcgagctgtgcctgcacctggcctttgatggcctcgtgagcggctttcaaagcgccgatcatctgtgcttctgaaatctctttcgactcgccttccaccatgcagatgtctttcatcgtggcacccaccatgagttcgaggtcggcgttctcgagttcgtcagcgcgcgggttgatgacgtattcgccgttaatcatggcgacgcggacttctgagataggaccgtggaacgggatgtccgacactgcgatagctgctgatgccgccaatgccgcgtaagcatcaggaagaacgttggtctcacccgagagcaatgtgatctgcacctgaatctcagcatggaaatcgtctgggaacaacgggcggatggcacggtcaacgagacgtgaaatcaaaatctcatagtctgatggcttgccttcgcgtttgaagaaaccgccagggaacttgcctgtggcggcgtatttttctttataatcgactgaaagaggcaggaaatcgacatcgtctttcgcttcttttgccgcaaccactgtcgcaagcaacactgtcttaccgcatgtcactaccgctgcaccgtcggcctgcttggccaaacgtcctgtctcgatggtaataatatccttaccggtttgtatggtctgttttataccttctggacccataataataaacttttaataattaatttaaataaaccgcttacaattaggtatacaacaatacgaaaaaaggcaatccgacattgccttttttcgcaagggcattgatagtcaatgctattattttctgatacctaattctttaatgatagcacgatatctctcgatatctttcttcttcaggtaggcgaggagctttcttctcttacctacgagagagacgagcgaacgcattgttgccaaatctttcttagcacccttcatgtgttctgtcaaattcttgattctgaatgtgaacaatgcaatttgtccttctgctgagccggtatcctgtgcgtttttaccgtactttgtgaaaatctcttgtttcttttctgcagttaaatacatatctattctttttctctaaatttttcggactgcaaaattacaacttttttaattaccaaaaacataaattttcaattttttttaaaaaatattattttcattgtaattgaaaaattttctatatttgaaacgattttctacaaaatgtaaaacgcacctaactaattactaatcaatattttaatattatgaaggcaaaattcaaaactgtgtttgccaccacattgctcttgctgatggtgatttttgcatcgtcatgtaagaaaaatgagataaaaagtgtggcggttgacactcaatttgctatcgctatcttcagcgataccgtctcattgagagaaattatcaatgacatggacagcacgacacagaattggcttcgcgtgagaaacgactctatcttcgttttttacgtcgataccatcagaggagtacttaaagccaatgaccttctcagcgacatagctgacatgtcattcaactcaacaacaaacttcgcgatgcctccgatcgcctctccaatcagcttcgacacagtgatcgatgtcgacagattcatgacattgccgttccactacgatggctataatatagaagaggtgttgctccgcgaaggtgcactgaatttcgactttgtggtcagcccggcaatcgagcatctgaaaagacttgaaatttactccaaccagctgattacaccggaaggcaaacctctgacaatcgttatcgactattataacaaaggtcgtcagaacatcaacctggcaggctacagaatagtgcctgaagccgacaccgtggcatttggagcacgcaccacaatgcacttcgaaagcggtatatatgaaggcggcgagtatgccagcaccatgacaggcagcctatccggcgtgaaattcaaaacagtgtttggtaccatcgacaaaccactcgactctatattccaagaccagacagctatcgactatggtatccaaggattttcaggaagcgctgtgctcccagtacctactatcaaaatcgcatataacaacaccttcggatttggcgcagtcgccgatgtcacaaaactggacttcgtcaacactggtacaggtctcgtgacaaacctcctcgcaagtgatgtggtcgaactgttggtgcatcctactgaaggctcctggcataacacgaaaatcgatggtctggcagaggatatcgacgccctggcaggctacaaccgcctcgatttcgacggcgctataaggatgaacctcaacgaacaccagttctcaatatccgacacatcaacagtcgatatagcagccgatatcgagatgcctttctcattcaaactcagcgacttatgctataccgataccgtaccggtcaacttgtcaggctctgacaacgactcaaatatcgatgatttgattgatcagatagatttctatatcgactataacagcaagattaaaatcgatgtcgatatgcaggctgtcttcatgaaaaacaacacagtcctcgactcattgtttgtcgatgccagttcattgaactattctccgactgacgaaatctcaactatttctgtgataattacaggccgtaggctcagaaatgtgttgcgctctaaccagatggtgcttcgtttgggcgcctcaacagaggctatcagcccggaaccagtgatgatgatggataccgatggcattttcatgaggatgcgagtagtgacaaaatcatctgagattgacattaataaataggagggctggaatatgaagaaattttataaattttttgttgttattgcattagtttgctcgtcattgctttcaaaagcccagaacgacggaataggattcaccctgcttccgcaaatgccttatgctaacttctacaacccgggtatcagagttcaatacaatggcatggtcggcgtggcattctcaaatttcaacgtcgcaatgtttaactcaagcgtcagatttaataacctttacggaaatgacaaaagcgtcatcgacctgacgaaattcgccaacagccttgatgacaataacaatatcaacgctaatttctcgcttgatgttttgaatgtaggctttagagtcgataaactgttcttcaacatcgactggagggttagaatggtaggcgagttcagcttctcaagagatttcgtcggtttcttcgcctttggtaacgcacatttcttaggcgttgaacaaccgtgccaattcaacctcggcgccgatgtctcagtcttccatgagttcggcgtcagtgcccaatatgaggtaaacgacaaactcaccgtgggtatccgtccgaagattttgagtggtgtcgccaatgcagtggtggagaacaacaatactaaaatcttcaccgatgtcaactcattcgcaatctcggcagatgtcgacctgaagattaggatggcaagtctgctggaaggcaatgtggaaaagattggcgatgtcaccaagatgattgactccgtgactacagctgatttctttaaactcggcgaaaacttgggcttcggtgttgatttcggcgctgaatatgttataaacgaacatttcggcgtggctgcaggcgtctacgacctcggctatgtcaaatggaccgatgcaaaagttaaga

SEQ ID NO: 1098 - DNA, 24569 bp, synthetic construct
  source 1..24569: mol_type = other DNA
  misc_feature 1..24569: note = Synthetic
atgggtttggtagttatgtgggttgcccataaaataccttataaatattatggacttatcggaaagttcctgcttttggtttctgtacccttgttgatctttacctatgcctttggatctacagtcaatgatgccaaccgttggttgaccattccggggatcaacaaggctttccaaccttcggatattgccaagttggccctgatagccacattggcaagtcttttggccaagaagcagaggaatatcggggacttcaagaaggcgtttttacctatgattgtggtaatagggctgatcaccatgttgatcggttttgccaacatgtcaaccgcccttctcttgttctccacttgcctgctgctcatgttcattggcagggtgcctgctaagttcattatggcggttatattggtgggttttgtgttcctgtcagcttcggtatttttaggacaaaggggaggaaccttcttctcaaggattgagaaatttgcttcagctgatgaaatcccattccaggccgagcaatctttcatagccatctccacaggaggaattgcaggcaaaggacccggtaagtcggagcagcgcaataccttgccccacccttattcggactttatttatgccataatcattgaagaatatggcttgatcggaggagctaccgtgctattcctttacctggcgctgctttatagaggtatgcggatcgtggccaattccaccaaaccatttggtggtttgctgtcagcagggctaagttttgccctggtcttgcaagccatggtgaacatggctgtagccgtaggcctgggtccgattactggacttccattgcctttgttgagtatggggggtacatctctggtatttaccggattctcagtaggaattattttgagtgtgtccagaggagatcacagtgactccatggaaggctcaggagaagaaaacagaccaaggaaagcattccaaactgcctaagaagtgaaggagaacaacaggacatatcgaatcatcatcagcggcggaggaaccggtggacatatctatccggccatagccatcgccaatgcctggaaggaggcacatcctgatgctgagatcctgtttgtcggtgcggaaggaaaaatggaaatggccaaagttccagaagcaggatatgaaattaaagggttgccagtggcaggtttacagagaagtctaagcctttccaatctcagttttccattcaagcttttaaaaagtcttaggatggcaagagaaatcgtaaaggcttttgatccagtagcagtcgtcggggtgggaggttatgccagtggtccggttttgtatgcagcccagaaaaaagggatacccaccttgattcaggagcaaaattcttatgcagggcttaccaataaattgttagccaaaagggccggaaaaatttgtgttgcttatccaggaatggagaagtttttcccaaaagaaaaaatccaatataccgggaaccctgtaagaaaggatattctggacctttccggtaagagggaaaaggctttagcgcattttggattggaaaaggatagaaaaaccgtacttgtcttggggggaagccttggagccaggaccatcaataggtcagtattggcagaaatgaaggcttttgaagatgatggatatcagcttctctggcaaagtgggaaattctactatgaggatatggctgaaaaagtcaaaatctctgccctgaaacatatccatgttaaagagttcatcaaggagatggatttggcttatgcagcggcagacctgattgtttccagagcaggggccttatcggtgtctgagttgagtttagtgggaaaacctgtggtttttattccttcacctaacgtggcggaagaccatcagaccaaaaatgccatggcctatgtcaatgagggtgcagcaatattgctcaaagacgctgaggccattggaaaattgaaagagacagtagatcccttgtttgcagatcttgacaaagctgcagcaatgggaaaaaacataaaaaaattagccaagccggatgcagcaaaagaaatcgttcaggcattggaaagtttgatctcatgaatttaaagtccttacatagtgtccatttcttaggtatcggcggtatcgggatgagcgctttggccaggtggtttaaccatatcggagtcaaagtaagcggctatgaccgaaccccatctcctcttactgctgagttagagaaagagggaatggagatttcctatgtggacaagatggaaactgtaccgggaactgtgcttcaggataaagccaataccctgattgtatggacacctgctatgcccaaagattctgtacaattggattatttcagggacaattgcttccatctgaaaaagagggccgaggttttgggattgattacctccggtatgccgaccattgcagtggcggggacgcatggaaagaccacaacctcttctatgattgcccatctactcaaatcaggcggaaagaacattgcggcatttttgggcggattgacccaaaactataacaataacctgatccttcatgatgaggaaggtggggaagccacagtagtggtagaggcagatgagtttgacaggtcatttttgcacctgcatcccaatgtggccgtgctcaccagtgccgatccagaccacttggatatttacggagatgactctaagatgatggatggatttagggcttttatagccttgctccctgaaaaaggccagttatatatccattacaaggcttttgaaaaattgggactttctggaggcaacccttggaaaaccactatctacggaaaagataagggtgaagtcagggctgaaaatataaaagcattccctggaactttccattttgattatgtgggtcaatcacaaagaataaatggactggaattgaggatgcccggatttcacaatgtggaaaatgccctggcagccatctccatatctttggattttggcctgacagcctcagaaatccaaaagggtctttccagctataaaggagtaaagagaagatttgaaatttggattcaggaagaggacagggtatttatcgatgattatgcccatcatcctgaagagattagggcctttttgggttctgtaaaggctatgtatccggataaaaagttgacggcggtattccagccacatctttttaccaggactagggattttgccaagggattttctgaaagtctttccttggccgatgaagtgattttgctggaaatttatccggcacgggaactccccatagcgggtgttacagcttccatgcttttggagggcattacgtctccccagaaatccttaaagacaaaagaggagcttttggattatctgaaacagtgcaaaattgaagttttggtcactattggggcgggggacattgatagattggttgaaccgattgcaaactggatgaagcaacatgaaaatcagatttagaaaaggctttttgttatttgtgctcttgctgattctggtggttttcatcggatttatcgagaagaaaagtgcgggaagaaggcttgccggagtagaagtatatgtaaaaagtgtgagcgatgtgtatttcgtggacgaaaaggatgtcctccagactttgaaggctgaatttccccttttggaacagggaacggctctggctgagatcaacctgtacaatatagaaagaaaggtggaaagtcatccatttgtcaaaaaagcggaagtattctctgatcagaagggtaatatcaaagtggaaattgaacagcacataccggtcgccagaatcagtagaccaagggcagcagatggatatgtgtccacagagggaatcatccttcccacttccagtaaatatacctccagggtcttgattctgtatggaaattatgcggaaagcttattgaataagcaaaatctggaggaagatgctcccgaaatgatggaattgatccggtttatccacaaggatccattttggagggcacagatcacagaactggaaatacccaggaaaggggatattagactccatcaacaagtaggcaagcaggtgatcgaatttggggatgccagtgatatagaggagaaatttaaaaaaatcaacctcttttatgaggaaatacttcccaaaaaaggatggaatacatacagcagagtaaacataaaatataaaggccagattgtttgtgaataattgatgatgctatggaaaacgacaaatttattgtaggacttgacattggtacgaccaaaatctgtgcggtggttggccgcaagaatgaatttggaaaacttgaagttttgggtatgggtaaggcagtttccgatggggtaatccgcggaattgtcaccaatatagacaagactgtcaatgctattcaaaaggctgtggcagatgcttcagatatggcagaagtggacattgccaatgtgattgtgggtattgcaggacagcacatcaaaagcaccgtacagcatggctctatcatcagaaagtccaatcaagatgaaatcaccatcgaagatgtgagacgtctggccaatgatatggaaaacattgtcgtacctccgggaaataccatcatccatgtcatgccacaggattataccgtagactatgaagatggcatcaaggatcccgttggaatgtcaggatctaaactagaggcagatttccatatcatcactgcacagaccactgccatcaataatatcaacagatgtgttaaaagggcaaacctggtttccaaggaccttatacttgagcctttggcaagttccttatctgtcctaagtgaagaagacaaagaagcgggcgtatgccttgtggatattgggggtggcacaacggatatcgccatattttatgataatatcatacgtcatacagcagtaattcctttggggggcaacatcatcacctccgatatcaaagaaggctgcatggtactgcacaatcaggccgagttgcttaaaaccaagttcggtaaggccattgccgaagaagccaaccccaatgaaatcgtctccatacctggattgagaaataggccgcctaaagaaatttccatcaaaaacctcgcagccatcattcaggcaaggatggaagagatcatcgagcatgtacaaaatgaactggttgccagtggtcactataaaaaattagccggaggtatagtccttaccggcggtggtgctttgctttcaggagtagcccagctatttgaatacatgaccgggttggatacccgtatcggctatcccaatgagcacttgggcaagtgcaagattgatgaaatcaagagtccaatgtatgctacttcggtaggattggtgcttgccggattcaagtcctttgacgaaagggaagagacctatagaaagcgttatgaaattgaggtggttgccagaccggaacaaaggctgaagaccaatgagctggcatccaatattttcaccaaaatgaggataaaattgaaggatatcatcaccagtgatatccaggaagataataattactagggcttatcataccggggagatgatgggctttgcctatcatttcccttcttactgattttgaactactattcattcaccaacatattttaaacgtcagataacatgaaagattaccagttcgatttacccaagaaccacaagtcaattatcaaggtgattggtgtggggggaggtggttccaatgccgtgaaccatatgtacaacatgggcatcaaggatgtagagtttgtggttgtcaataccgatgcccaggcattgaaaagcagcccggttcctttaaagctccagctcggtgccaaccttactgaaggtctgggtgccggcgcaaatcctgaaaaaggaagaagtgcggccctcgagagcaaagaagatattaggactttattgtccgacaataccaaaatggtatttatcactgccggaatgggaggtggtaccggtacaggtgcagctcctgtgattgctaaaattgccaaggatatggatatcctgacagtgggtatagtgactgcgccatttgttttcgaaggaagaaagaaaatgcaagcggcccaacaaggaattgaagccttgaaggaaagctgtgacacagtattggtgattttgaacgacaagttgagggaaatttatggaaacctggctatccgttctgcttttgccaaagctgataatgtgttgactacagctgcaaaatctattgccgaaatcattaccgtacaccaggatgtgaacgtggattttgaagatgtgaagacggtgatgaaggatgccggtgcggctgtgatgggttctgccacggaagaaggcgatggaagggctatcagggcagcagagaaagccattgcttctcctttgctcaataacgtagatatcaaaggcgctcagaaaatcctgctttccatcatgtccggggaggaagatgagttgtccatggacgaactgagtgaaatcactgaatatatccaggaaagggccggtgacaatgcagatgtgatcttcggtcagggaattgaccaggagctcggtaaaggtatccgggtgactgtaattgctacgggttttgaaatgggaaagctgagtgaagtaagtccggcaaaagaaactgaaacaaagattgaacaaaggtcttcaaccgaagagcaggaatcaataaaaaaagtgattgacctggaatcaggcaagacttccaaagtggatgaggacgcattggcaggagcaggtcagacttttaccttcactttccagaagcctattttcactcctgccaatgaagaaaaaaaatccgatgactttaaccagccgctgatcgaagagagaaaagctgaggctgtaaataaattaatcgaccttgaagaggaagaagcggagaccagcgaatttgagtttgtacctgcagcttccgaaaccaagaaagtggtttttgaacttccttccgagagagaagagagaccagtattcccttcagaagagaaaaaagaagaagcgcctgcacattatggcaacgactattatgagcagttgagacaaaaagccattcagaaagcttatgagcgttttgagcgtctcaagaacctaaagtcttacaaccaaagccctgaagaatttaaggaaaaattggaagtccccgcttttgtccgtaagcaggtcaagctttctgatgtgcagcacagctcagaaagaagcatttccaggttcaacctgacagatgaaaatgagttcttgaagaacaataggttcttgcatgacaatgttgattaacttcaaaagttaatcaacatttccgcctgggattgaagcaattccatgtacagcctgttggtgagcaggttatctgacatattttcctcaattttagccagtttaattttgagggcaagtacatgcatccccaggtaatggaagatgtcggtgaggtggctcaatgcgatgccacccccgcctattccggaagaaatacccaccaaagcacactttttgttcctaaaggagttgggataggtcatgccgtctataaaagccttgaggacacctggaaatgaaccgttgtattccggaacgataaaaacaaacttgtcacctgtttttactttttcatggaaggcattgtatttcggatttttaccattccggtcatacaaagccgaaaacacaaaatcatggggcaaatctatcaggttcaaaatttctgattcagcacctttttgcttcaatatttcctgataaagatgggctatggcaagggaaagggagttttttctattggttcctacaataatcttgatcatagagaggggtttcagatcgtatgttgctaattacaaactcacaagccaattagtttcctatttgttcaaaaattatggtcaaaaaaacattattgcttaccttgggcaaaatttgagagacatgaaggaagaacccaatatgacatacagcgatcagatcaaacaagcttttgagtatatccgtcaacaattcgattgccctttggaagtagggattatccttggaacaggccttgggcaattgatccacaatatagaaattcagatagaaatcccttatcaggaaatcccgtttttcccggtttccacggtggagagccacaaggggaaactgatcatagggaaactttcgggaaaatccgtggtagccatgcaagggaggtttcattactatgaaggctattccatgaaggaggtaacatttcctgtaagggtgatgaaaatgttgggcatcagacaactttttgtatccaatgctgccggaggacttaaccccaagtttgaagtgggagacctgatggtcatccatgaccatatcgatctgtttcctgaaaacccgctccggggcaaaaacctgaatgagtttggggtgaggtttccggatatgtccgagccttatgacctttccttggtagaaagtgctatgaaaattggggaagcgcatcagcttagggtacatcagggggtgtatgctggagttcaggggcccaacctggaaaccaaagcagagtataaatacctccggatcatcggaggggatgccgtagggatgagtactattccggaagtgattgtggccaggcatatggatcttcctgtgtttgcgatttctgccattaccgacctatgctatccgggaaaaatcaaaaaagtacggatagaggaagtattagcaggtgcagccaaagcggaacccagaatgagtctgattatccgtgaattggtcaagttggtataggggagtattggttaagttttagcgaaattgtttaatagactaaggtttaaggcttaagttttccacaatttaccattacgaatgcatacaagagggtatcttgtattttgtacaaatttgaatgatgctaaaagaagctgcggaatatttaagagacaaaatctcttttgcacctgagacgggaattatcctggggtcaggacttggtggtttggtcaaggagatacaggttctccataggattccttattgccaaataccaggttttccggtctctaccgtagaagggcattccggggaacttgtatttgggtatttggagggtaaaaaagtagttgccatgaacggccgcttccattattacgaaggatattccatggaaaaggtgatattccctctacgtgtcctacgcttgctgggagtacaaaggttaattgtgaccaatgctgcgggagggttgaatcctgattttggggcaggggatatcatgcttattgaggatttcatcagtttacttcctgacaatcccttaaggggcaggaaccttgatgaatttgggccaagatttcccgatatgtccgaacctatggatccgtcctggtcccaaatggcagttgaagtggcccaaaattgggatttacccttgagaaaaggagtatatgtgggagtacagggtcccaaattagaaaccaaatcagaaatccggtacatgcggatcatcggagcagatgctgtggggatgagtacagtgccggagattattgccgcctgtcagatgggcatgaaggtcattgctttttccgtgattaccaatgagagtattccaaaagttgccaaggaatttacccatgaagaggtagttgccgtagccaatcaagccggggagaaattggtgaggctggtgaaggggataatttaaattgggtattttttttggaaaagtttaattttttcattctttgagaggattttttcagacaatgaccgtctaaaacacaaaaataccctgcactgggtatttttttatttaaaactaaaccctattttaatgtcgggttaaaataacgaccccaactgtataacagatggggccctcttagatgttttcacaacggaataatccttattgtgaattgcttcaaaatggttcgactaatataggtgttaatatgaatttttaaaagattatgaaaaaaattttagggttggatttggggacaaattcaattggatgggcgctaatagaacatgatttcgaaaaaaagcaaggaaaaattgtaggaatgggttcaaggatcattccaatgggtcaggatgttttgggggaattcgataagggcaattctgtgtcccaaactgctgaaagaactaagcttagaagcgttcggagactcagggaacgctatttgttaaggagggaacgtttgaatagagttttaaatatccttgggtttttacctgcgcactatgcggaacaaattgattttagtgaaaagctaggtaaatttttggaagggactgagcccaaaatagcatataataatggcgattttcttttcaagtcttcttttaatgagatgttggatgaatttaaaatttcgcagcaaggccttttggaaggagaaaggaaggtgccttatgattggacgatttactttttaagaaaaaaagcattgactcaaagaatagagaagggagaattggcctggataatcctaaacttcaatcagaagcgtggatattatcaattaaggggagaggatgaagaggaaaagcccaataagctcgaagaattttattctttaaaagtgatagatataaaggtggatgattcgcctaataaaaagggtgatacttggtattctttaacgcttgagaatggatgggtttatcgaaggcctagcaaagtccctctagatgattggttggggaaaactagggattttattgttacaactgatatagatgatcttggaaatccaaaactagataaagaaggaaatccgaaaagaagctttcgtgctccaagtgaagacgactggggtttaagaaaaaagaagaccgaaaaagaaatattagactcctccaaaaccgttggccagtttatttatgaaaatctgctagccaatccaaatcaaaaaattaaagggcagctggttaggactatcgagcggaaattttataaagatgaattgaagcagatcttggcttcacaacaaaaatttcatcccgaactaagcgatcctgatttatttggtgattgtataagggaattgtataagcataatcattcccatcagaattttctcggtaataaggacatagttcaccttttgattgatgatattatcttttatcaaagacctttgcgaagccaaaaatccagcattgggaattgttcattggagttcaaaactttcgaaatagaaggggtcaaaaaggcagttccttataaggtcactcccaagtcccatcctttatttcaggagtttaggttgttgcagtggatttctaatctcaggattatcagaaaagaagatgataaggatgtgacggtggattttttgggcacacaggataagacacaggcactttttgattatttgatggctcaatcagaggtagattgctctaaattgatgacattccttttaacaatggatgggtataaagggaaagatttaaagtcacaggttggcaagtttagatggaattatgtatatgattctgagaaaggcgaatcaaaaacgtacccggtaaatacaacaagggcagaattcctaaaaagattagggaaggttaacggatttggcttagagatgtacacagagcaatttgaagaatccctctggcatcttgtctactcagttagggataaaattgaatttgaaaaagcgctaaagaaatttgcaagaaagaatgggcttgaggtcaattcttttgtggaaaatttcaaaaaaatcccgccttttaaaagtgagtatgcatcttattcgctgaaagccattaaaaaacttctgtccttgatgcggtttgggtctaagtgggttgaggaggttatcgatgaacaaaccagacaaagaatagaaaaaatccttacaggtgaatatgatccggatctcaaagataagatcagggagttgtccaaagattttcagagtattcaggatttccaaggtctacctgtgtggtttgcaagttatttgttatatggtcgtcattcggaagcctcagaattgatcaaatggaattcgagtgacgaaatggcacaatatattcaagaattcaagcaacattccttgagaaatcctattgttgagcaggtggtactggaaactttaagagtggtaaaggatatttgggataagtatggatatggaaaaaaagacttttttgatgaaatccatgtggagttaggaagggaaatgaaaaatcctgctgagcagcgtgcaaggttgaccaatcagattaccgaaaatgaaaataccaatttaaggattagatcattattgatggagcttcttcatgatccttcagttgaaaatgtgcggccttattcaccaatgcaacaggaaatacttaaaatttatgaagagggggttttgaagtccaatcttgaggtaccagatgatattctaaaaatcagtaaaactgcacagccttcaaaatcagatttgcagcgctacaaactctggttggaacaaaaatatatgtcaccatatacaggaaaacctattcctttaaataaactgtttactcctgcttatgagatagaacatataattccccaatctaggtattttgacgatagcttgagtaataaagtgatctgtgaatcagcagtaaataaactcaaggataatctgcttggcttagaattcattaagagttttcatggacaaagggtttccttagggtttggtgaggaggtcgagattttttccgaaatcgcctacaaggcttttgttcaggataattatgctaaaaatccagctaagaaaaggaggcttttaatggatgaattgcctgagcaaatggtggagagacaaatgaatgatacccgctatatcagtaaattcataacatccatcctatccaatatcgtacggtctgaggaaaatgataccgggttcaattctaaaaatgtcattcctgtaaatggaaaaataacctcagcgctgaagcaggattggggattgaatgatgtttggaacgacttgattctgccaagatttgaaagaatgaatcaaatcacagggactactgcttttacttcttggaatgagaaccaccgaaaattcttgcccacggttcctttggaatattcgaaaggtttccagaaaaaaaggatagaccacagacatcatgctatggacgcattggtgattgcttgtgcaacgcgtgaccatgtcaactatcttaataatgaacacgcattgggtaagaactataaaggtaaagaggagaagcagaaaagaagatttgatcttaaacaaaaactatgttataagaaaactaatggacactccaatgaaaattttgaatgggtgtttttgaaaccatggtattcctttacccaagaggctaaagacagtttggagcgaattgtggttagcttcaagcaaaacctgagagtgattaataagacaagcaacaaatatttaagctataaagatgagaacggtaaacttagaattgacagtcaaggaaatccaattaaagctttgaccagacagacgaaaggagattcttgggctattagaaaacctatgcataaggatactgtttcaggcatcgtaagcttaagaaacgtgaaatcagtttctctcagtgcagccttggaaaatcctgaaaacatattggacaaaaagcttaaaaagaagattgcagagcttgttaagttgaagtatgacaagaaactattgctcaaatatttcaaagatagaaactacctgtttgagggaaaggatgtgtcaaaaattgaggtttattattttgaagaggatctagctgcttccagagtgagtttggacacttcattcagtgaaaagaaaatccaatcagtgactgatacaggcatcaggaagatactcttaaatcatttgtctaaatatgagggtataagggatgaaaaaggtaagttaattccagctgaaaccttggcgtttactccagaggggatagaagaaatgaaccagaatatccaagcccttaatggaggaaaatatcatcagcctatttataaggttaggacgtatgagccaaagggcaataagttccaggttggttttgttggaaacaaacattctaagttcgtagaggcagcaaaagggacaaacctattctttgctatctatgtaaatgaagacgggaaaaggagttatgagaccattccatttaatgtggtcatggaaaggcttaagcaaggagaaggacctgtacccttggtcaatgaaaaaggagataaattactctttcatctttcaccaaacgaactggtttatgttccggaacatgatgaggatcttaattctttagattttaataatcttcttaaagagcaagtagatagaatatataaaatggtgagctcctcaggtcctcaatgcttttttgtaaaacatgatgtatcaactccaattgttaacaaagttgaattttctgctttaaataaaacagaacgatctgttaatggattgatgatcaaggataaatgtcgaaaagttattgttgatcgaactggcaatatactttgaattaaaatactcaagctatatctaaaaccctgctaatggaatggagaaggaaaaacaattataagagttctttcatcaagtggccgctttaccaaagttcaaagactttggtaaagggactttcatattcatcttaatgtaaaaaatggaaataggacaatctaatcatatctataaccacgctaatggcagggaaaatatatttctggaggaggagaattataagtttttcctccagaagtatgccaagtacctcggcgaagtcgtagatacctatgcttattgcctgatgccaaatcattttcattttttggtgggagtaaggccggactcaaacctgtcaggttttcaaaacctgacaggtttgatcaagcatccctcaaaaaatccagctataaaaggatttacagattttttcaactcatacacaaaggcaatcaataagagatttgaaaggaaaggaaatttgtttattcgcgcattcaaaagaactccaattctcgacgaacgtcaatggcaggaaactttcctttatatccacttaaatccagtgaaacacggttttgtaaaagatcatcaaaattggaaatggtccagctggcatgcttacgaaaacttcaataagccttcaaatttagatagagactatttaaccaatttctttgacggttgggagcatgtacggaatatgatggagatgaaaaaggaatggttgatgaataaaaatttggaataagaaatagtcagacctgacaggttttagaaacctgtcaggtcttttaacttaaaaaaacatgatcaaaagaaccctctttttcggcaatcctgcctacctcagcaccaaaaatgaacaactgcatatcagtttccctgaagcggataaggttgacaggacagttcctatagaagacttggggatgattgtgttggaaaatcagcaaataacaatcactaatggacttttagcaaaacttaccgatcggaaagttgctattgtttcttgcaatgcacagcatttaccggaaggtttgctcttgcccatgcaagggcatactgaacagactgagagggtaagatatcaattagaagcttcccaacctttaaagaaaaacctctggcagcaaactgtcactgctaaaattaaaaaccagcatgcgcttttgcaggaaaaaggaaaggagtccaagcgcatggaatatctttataaaaatgtcaactcaggcgattcaggcaatcatgaagcccaggcagcggctatttactggcaagaattatttgatatacctgattttaacagagcccaggcaggaatcccccctaataatttgctcaattatggttatgcgattttgagggctgtaattgcaagggccttggtatcttccggtatgcttccaggagtgggaatttggcatagaaataaatacaatgcttattgtttggcggatgatattatggagccttatcggccttatgtggacttgatggtatctcatatagtggaaacacaggacgattattcagaactgagcactgaacttaaaaaggaattactcagtattcctgctctggatgtgaaaattgacggtcaaaaaagtcccttaatggtagccgcttcccggacgacatcctctctgtttgaatgctttgcgggaatcagtagaaagatcatttacccggaatatggatgagaagtatttttcaagacttaatcagtataggagtttgtgggttttagttttttttgacctaccaaccgaaacccggaaggatagaaaaattgccacttctttccggaaaaagttgctggacgatggttttgccatgttccagttttcgatttatatgagattttgtgccagtagggaaaatgcagaagttcatattaaaagaaccaaaaagaatttgccgcccaaagggaaggtgggaattatggccattacagataaacagtttgggatgatggagattttttatgggacaaagaagcaggagacagagccgccctcgcaacagttagaattgttttgaaaagagtagtaaaccttttccaaagttcgaaacttaggaaaagttaaatcaaagacctgtcaggttttgaaaacctgacaggtctgttaccccttcttccatttcctattattttttattttctattttagcacataaaatacagcataccagtcacttagcgtggggtatgctgtgatttccttaggaagataccattttgaaagcaattcacaacggacttttggatgatgttgatgttataacgctgtgatttccttaggaagataccattttgaaagcaattcacaacatatcttgtattgctggattaacctaaaaagctgtgatttccttaggaagataccattttgaaagcaattcacaactacattggcttctaatttttgagaagttgcgctgtgatttccttaggaagataccattttgaaagcaattcacaacatatgttgtattgctggcttaacctaaaaagctgtgatttccttaggaagataccattttgaaagcaattcacaacatcatattggcaatggcttctcccgaactggctgtgatttccttaggaagataccattttgaaagcaattcacaacctgctttctgatgatgaggtgatagcgggcgctgtgatttccttaggaagataccattttgaaagcaattcacaacccttagagaaaaagaactggaagaactcagctgtgatttccttaggaagataccattttgaaagcaattcacaacgcatctgtccaccctcccctaacaagtgccgctgtgatttccttaggaagataccattttgaaagcaattcacaacttacccagacccaggggttggagttccagggctgtgatttccttaggaagataccattttgaaagcaattcacaacaagctgacgtacccggtacttctgcgacttgctgtgatttccttaggaagataccattttgaaagcaattcacaaccccttaaccaaaggagatcacctgccttgcgctgtgatttccttaggaagataccattttgaaagcaattcacaacgagtttgctgattgcctttgctttggatgcgctgtgatttccttaggaagataccattttgaaagcaattcacaactgatgcttacaaactggccaagctctataagctgtgatttccttaggaagataccattttgaaagcaattcacaaccaatactactggtgaaactgtttttgaagagctgtgatttccttaggaagataccattttgaaagcaattcacaactcctgaagctctttttggcggtgcttggtggctgtgatttccttaggaagataccattttgaaagcaattcacaactcaatgcgcatgtgggatttgtagccataggctgtgatttccttaggaagataccattttgaaagcaattcacaacagtttttggagcatccgttcacaggcaggagctgtgatttccttaggaagataccattttgaaagcaattcacaacggattcagaacaataacatcatcctctgcagctgtgatttccttaggaagataccattttgaaagcaattcacaaccgcgtccgactggtagtcgatggcaagcaggctgtgatttccttaggaagataccattttgaaagcaattcacaactgattacgggtacttacaaagaggaatatggctgtgatttccttaggaagataccattttgaaagcaattcacaacttgcactcgtagttacccctgtttttatgggctgtgatttccttaggaagataccattttgaaagcaattcacaacacagcctgaggaatgctcatgtaaacagaagctgtgatttccttaggaagataccattttgaaagcaattcacaactggcgagatatgctcctcagccaagttcgggctgtgatttccttaggaagataccattttgaaagcaattcacaaccaataactgggtattggccggaggcataatgctgtgatttccttaggaagataccattttgaaagcaattcacaacaggatattgattggcaatatccatggcaatgctgtgatttccttaggaagataccattttgaaagcaattcacaacgggtggaaacataaagccacctctttaagagctgtgatttccttaggaagataccattttgaaagcaattcacaacatgaaaagtagtatatgtgctatgctttccgctgtgatttccttaggaagataccattttgaaagcaattcacaacagtagttcctgacgttcttgctgtccatgtgctgtgatttccttaggaagataccattttgaaagcaattcacaacacatattgcttctcaatcgaagaaacgaaggctgtgatttccttaggaagataccattttgaaagcaattcacaacatatattaatccaaaaaactcacttttttcgctgtgatttccttaggaagataccattttgaaagcaattcacaacagaagcccagattgcggccaataaaattctgctgtgatttccttaggaagataccattttgaaagcaattcacaactatgggtgccaattacattccggaggataagctgtgatttccttaggaagataccattttgaaagcaattcacaacacataacgtaatataatttgttgtttcgttgctgtgatttccttaggaagataccattttgaaagcaattcacaacaaggacaaaagatttttgttctaatggtagctgtgatttccttaggaagataccattttgaaagcaattcacaacaatgaacctttgataaatccaatgtgatttgctgtgatttccttaggaagataccattttgaaagcaattcacaacaggggttggcctcaaagtccaattttcaccgctgtgatttccttaggaagataccattttgaaagcaattcacaacctggtagggcgcgacaacgtgggctggctggctgtgatttccttaggaagataccattttgaaagcaattcacaacttaaggacgaatcaatccaatcacttcggtgctgtgatttccttaggaagataccattttgaaagcaattcacaacgatctgcgaaaagggaatccagatcaattagctgtgatttccttaggaagataccattttgaaagcaattcacaacctgggcggtgtaagcaatgatagcagacagctgtgatttccttaggaagataccattttgaaagcaattcacaacagcttcctcgatctgcctttgcaatgtggcgctgtgatttccttaggaagataccattttgaaagcaattcacaacaaagctgccctttctgctccctaaatcggagctgtgatttccttaggaagataccattttgaaagcaattcacaacataaaaatatctatgtaaccgcctgataaagctgtgatttccttaggaagataccattttgaaagcaattcacaactgcgggatcagccccatgtccgcccctcccgctgtgatttccttaggaagataccattttattcactgattttaatattttcaaaggtgttcatgattcttcctttgattgatttgaaatcaccgcctcaaatcttctttccaatataaaatgcatagccataataatccttgtattgggaataataccgaatttcttttctgatttcatcgataaatcccttggcagtaggattgcctttgtgtttgtttaaaaaatctttctcgaatttggtttggggaacataataattgtctgtccaacagttttcaggaaggataaaaaatgctacggggatatagccggccttttggagttgggcggctttattgggaatcgtatcaatttcagaataggcattgtcccaatagtcctggatttctttgggcctttcctctgtaaaccaggaagcctcgcttaccgcaatatagcctccttttttcaaaaatttcttccactccttcaatcccttttcaaagcctatattataaatagcaccctctgaccaaatcagatccagttcctcctcttgaaaaggcaggttttccatggatcccggaacaccttttaaccgttgttggagtttgagctgggctacatgggcattcaactgatcaataaatttcggacactaatctatggcggtgatctgtccaggtgcatgttgggccaagatcatggtctgacctcttgttccgcagccaatatcggcaatcttggtctcgggcttcaggttgtcatccagaagcaggcaattgaaatttaaaaaagtatttttgcctaaccgggtatttttcccgtaataacaataaaaaggtgcctcaattcatactccttcccctacttctcccaataattcattcagcaattcggattttctcccgaggtttcttgaactcgtctgattgaattccagcaggagcgctctggcaatatgatatctctccagaagctctggatcccggctgttgtaaacttctcccgcgagcattttttctttttctgatttggacatctgtattgcagattaagagtaaaaaaaaagttcttccaagattttccttggaagaacttatactcagtaggttttttagaccgtcatgatctctgcctcttttttgctcagcaggtcatcaattttggccgaatattgatccgtgtatttctggaccacatcttctgcccttttgacttcatcttcaggtgctccgtctttttggagttttttgagtgagtcattgatgtcttttcttacagtcctaacggaaattttaccgttttcacattcttgtttggcctgttttaccaaggtttttcttctttcctctgtcaaaggtggtatggtcaggattaccatttcaccgttattttgaggggccagacccaggtcggaattgataatggcgcgttcaatttcggaaatcaggtttctttcccaaggtttgatagccaaagtcctcgcatctggggtggtgacagaagcgacttgctgaagcggggtaggggagccataataaggcaccataattccgtccaacatattgggcatggcctttccggctctgatttttaccaattctgcagcagtatgatctactgctttttgcatcatctctttggcttcgtccaggaataattgaatctcttccatgtgttactggattattttgaagttattaatgttcctatatcctcaccagctacaatcttttgaagattgcccggtttattcatatcaaataccacaataggcaggttgttttcctgacataaagtaaacgcggtcatgtccatgatgttcaggtttttttcataagcttcctgaaaggacagttgtgaatattttgttgctgttttgtctttttcaggatcagcagtataaaccccatctacccttgttcccttcaataccacatcggcttcaatttcaatcgccctcagggaggctgtggaatccgtggtaaaataggggttaccaatacctgctccaaaaattacgatccttcctttttcaaggtgtctgatggcccgtcttctgatgaatggttcgcagacactttctaccttgataccggacatcaagcgggtaaacataccgttttgttccaaggcgctctgcagggccatggcattgatcaaagtggccaacatgcccatgtaatctccctgaacacggtctatacctgttttttctgcctgtacccctctgaaaatattaccacctccgattacaatggcgatttctacgcccaggtctttcacttttttgatttcctgtgcatattgttccagccggttggaatcaatgccgtagtttttttcacccatcaatgcctcgccgctcagtttgagtaatattctgttgtatttcattgttgaattaggtaattgaaaaaggagtttggattgaacttgtcgattgataaatccgacaaatataagtgcttcatcaggaaatctgaaaagactacctttaaaattggatgagtacctgatttttttctacactgtccccttttttgattttgatggatttgactgttccatctcccggggatttcaggatgttttccattttcatggcttccaatataaggactggatctcctttttttacggtatcaccttcctgcaccttgatatcgaagatcaggcccggcataggtgctttgatgtccttagcggaattttggtgctgcatgttcatgccaagcttttccaaaagaagatcaaatttatctttcagtgtcacttcgcagggtttattgttcagcttcaacttgatggttttattttcctggtctacatgcaccacttcaagattaaacgacttcccgttttgaagaacgtgatagtgtctatccctgacttttgagatgctccaatccaggatttttccgtttaccaaatactgatccttggacttttctacctcaaagactgaatttttaatgcttactgaatacatttctattattttgcgctaagatatacgataaatctttaaaaaccattttcatgagaatctggaagccaaaactgagtttgctccttttatggtttgttttttggtcctgtcaaagtaccaaaaacacattggtaaataatgaaatccccccacaggagctcgctgctgcggatttacttgaagaaagcaataaaaagcaggacttgatcagggggctggaaaataagatttcagcctatcaggaaaccagaagaagagattttgacctcttgcataccgcgttggacctgtcttttgattatgaaaaggaattggtccatgggcaggcggaactctccttgaaaccttatttttttccgcaaaacgaactggtattggatgccaaagattttgaagtccacaatgtctggatgatgggaaagaaagaggaggaggcactgaattttagctacaatggaagacagcttaccctttatcttcccacaaccctcaccaggaaggatacaatcaaggtgaaaataaaatacactgcccatcccaatgaaaatgccggaggtggaagcaaagccatcacggataccaagggcctctattttatcaatgcaagaggtgaggaaaaaaataaacctacccaaatttggacccagggagagacagaacacaattccaaatggttccccacaattgactcacccaacgaaagggtgacacaggaattaaggttgacggtagatgccaagtaccgaaccttgagcaatggccttttgaaatcaagtaaagcgaatggagatggcacgagaacagatcattgggtaatggacctcccccatgcgccttatctggcagcggttatagtaggagattttgtggaggtgaaagatagctgggagggcatgcaggtcaattattatgttgaaaaggaatttgagagcggggcaaaaaaagtttttggaaatactccggaaatgatcggttttttctccgagatattgggagttaagtatccctggcagcgctatgaccaggtggtggtgcgggacttcgtatcgggtgctatggaaaataccaccatttcggtttttatggaagagcttaacctcaatgagcgggaggcaattgattcagaatgggacggtatcattgcccatgagctctttcatcagtggtttggcaatttggttaccaatgaatcttgggccaacctcaccttgaatgaagcttttgccaattactccgaatacctctggtatgagtacaaaaacggcaaggatgatgcggacatgcatcatgtatcagaaatggagcaatacttggatgaatccaaagaaaagcaggtggacctgatccggttttaccacgaaaatggggaggatatgtttgacagccattcttatgccaaagggggaaggatattgcatatgttaagaaggcatctgggggatgacgctttttttgcttctttgaaccattacctcaccaaa

SEQ ID NO: 1099 - DNA, 24569 bp, synthetic construct
  source 1..24569: mol_type = other DNA
  misc_feature 1..24569: note = Synthetic
ccaggagatggccattcacggtcaaagcgaagcttattatttttctttaaatctaggtaggcatttcgtactgccaattgaaacttttcaaacatcaccacaaaattaaatcaactgcaccatcggaatttacggaaaaccgtaaaccaaatatctctttttcaagccatcctttaccggaataatcggaaatccatcggaatcttcggaatagtatcggaattagcggaaacatcggaattgtctgatgattaggttgttatgtgtcataaatttgctttcgtaatcagttcacatatcgattagttcgagcagaataaagatacgaaacagatttcaaaacgagaagacatcgcggtagttattagccggtttgggaagcagttactgactcccgcgattgaagctcatacttcccaaaaaattcagaaggccttctgaaaacaaatgtagcaatcctgtgcatggagcacgcggacctaccaagtttttgactttttaattttttgaacaatgatttatttaattatcaccgctttaatgggactaggttccccatccattacacctataaacaatgcgcagatcaccgtacaggtcaccgataatggcgatgaagacggcggagaaacagggacagttcgccctccaattccaccacttccgattcctgtacctccaatttgtccactacctatacctcctatgttaccatagttcctagggaagtatatttatttttaaacttggggcagcttacggctgtcccttttttattctatattttttcgtacattcaaattcaaattgaatgccttgaaatacttatacctatacctattatttttaaccctcttgtcctgtgcgcaagaagaagttacacaatccccagtcgatgcacgtccgtactacacgaaagcgttcgaatatctcgatgcaggcaagacagatagtgcattcctaacgttcgacaaagcaaaaaatctatttattgaagcaaacgatagcctcaatacagcaaactgtttgatcaatatggcgattacacagcgcgagcagggagattattttggcgcccaggaaacatcgttacaagcccgagactatctagacgagctaaaccccgaccatcggatctatatcagtacaaattataacaatctagcaacaacaaccgacaacctccgaaactttacgcgcgctatttctttttatgaattagcgatcaaattttccgatgattctttaaatacgctcatttaccgaaataatatggctatcgcctatcagcatatggatcgttacgaagaagccttcaacatattccaaatgatcctagcagatgcgaatgagaaaccgaaagaatatgcacgcgttttgtccaattttgcgaaagccaaatggcagaacgatccaacctataatgcagcacccgaacttttagcagcactaaatattcgagagcgagaaaaagatctgtggggacaaaatgccagtttagcgcatcttactgattactacgcagagcgtaatccagattccgcattaatctatgcccgtaagcaatatgccatcgcttccaggataaaacgagcagacgaccaaataaaggcattgcaaagactaattaaactcagtcccccagcttccgtaaaaggatatttcgaaacctatcgcgagctcaacgacagcgtccaggttgcccgagcagccgcaaagaatcaatttgcattaattcgttacgaagttgaaaaaaacaaatctgataatttactattgcaaaaagacaatgcagagaaagccaaccggctcacccaacaacgcgccatcactggcggcgtaagccttgttctctttgttgcgattttcggcggaagcttctattacaaaaagcgcaagcaacgactcgagctcgaagcacagaaccaaatcaaggccagcaaattagaaacctccaaaaaagtacacgatgtcgtagccaatggcctctaccgtgtcatgaaagaaatcgaatacaagcaggtaatcgatcgcgagtatacacttgataagttggaagagatgtacaaccgatcccgggatatatcatatgagagcgaagagcaaccgaaaactgaacaaccctatcacgagcggctcaccgagctcatcaaatcttttgctaccgagaaccgccgagtactgatagccgggaatgacggagaactatggcacgccatcgatcaagaaggtaaagacaatattcgccacgtgttacaagagttgatggtcaatatggataaacatagccaagctgctcatgtcgtggttcgttttgaaaagacaggccatcaattacatatttattataccgacgatggtattggcataaaaaaagataccgttcacggcaatggactaacaaatacggtttcccgtattgaaaaattaggaggcaaaattaactttgacgatgaaacggtaaaaggactcaaagtagagatcacgattccatttctttaaaaggataatgtatgtttaaaaaaatactcattgctgaagatcaccaaagttccaacatttcggtgcagaagacacttcaagatttaactatcgataatgcagactacgtgtattattgcgatcacgcttttagctggttaaaaaatgccattcgcgatcaagatccctacgaggtgttgattaccgacctcagttttgaggaagataatacaatccaacagattaccaatggcatcgatcttattaaagcaacccgcgctatccagcccgatctaaaagtgatcgtattttcggtcgagagccgtccaagtattatcgatgatctatttaaggtgcatggaattgacggatacgtccgcaaagcaaggcacgacgccgatcacctcaaagaagcccttcgagccgtatacaatcacaaatcttatcaaccatccgacgttaagcaatccattcgtgacaagaactcgtatgaatttacaacagtagacatcgcgatcgtttcgttattgtatcaaggtgaactccaaaagaatatcccgcaatgtttgaaacgaagaaacatcaagccctctagtctgagcagtgtggagaagagactcaatttaatgaaagagacgctagggtttaccaagaacgagcaacttgcagtttattgcaaagaaaaaggacttatctaaaagttcgtcaacacatttcaattattaaccactataaaggagatcatcgcaaataatctcctttatccattgataatcaatatgataatttattctaaataattgatgctttacgggaacccgtaaaaatcagccaagagacacgcctacttttgtcttattaattaaccgtaaacaactaaacagttaaagatatgacatggaattttaggagacgtgtgaaaattatccccggtgttcatttaaacttcagcaagagtggaatttccacttctatcggagtgaaaggagcaagcatgacattgggcaggtccggcacttatctaaatacgggcatacccggtttgggtatctataataggcaaaaactatcaaatggagccccagcacctccgttgcggccgcccacgccgcgttataacccaggccaatcagaagaaccatacggcaatatttttagtgcagatatccacgagatcacgagccaagatatgcaaggaattaaggaagcgatattacttgctcgccaacagcgagcgacactaaacagtgacttatcaaagatcaatagcgcgcttaaaaccaccaagctcaaaaagacgttcagctatgtactgctatatggattgatcaataaatcgattcccgaaaaattagctcaggacatagccgcgcaacacgaagcagttcggcagaccaatgaacagatcgatacctcatatgtcaaccttgaagtcgattttgaacccgaaatccaacaaaaatacaatgccttggtttctgcctttgaaaatttaacccggtgccacaaaatctgggatgtcaccagcgcccactttgaagatcgagctgttacgcgttcgtcggcaagtactttcgttaccaggcgcgatgtttggtttaggctcaagtctatacccgaattcaaatccgaattacaagcgctgtattttcaaaacgccaacggagccgatctatatatctaccctagctttattgttatgtattccaacagatcagattttgccattatcggtttagacgaagttgattttcagtacggttatgtgcgttttacagaaacagggaaagtaccaccggattctaaagttattgaccagacctgggccaaagtaaataaaaacggtacacccgatagacgatttaaaggcaattatcaaattcccgtcgttcagtatggggagatacgcttaaagactaaaacaggtttacatgaagaatataaattcagtaactatgaattaaccgaggcctttggtagcgcctttaaagattatcagagcacagttagacagttaacctatacctcatgacaaggatatttctattacttctagttctgcttgccggacaatcgtgcggtcaatcgcaggagaaacaaaccggtccagaagatttacaacataaaacatttatggccaaagccattcgtattatcgatggcgataccatggaagtactatatagaggtcagtcagtacgtatacggcttacccatatcgattcccccgagcgtcgacgctcccagccattcgggaaggcagcaaaacaagcgctatcatctctatgccatgatcaagaggtcacgatcgttagcgaaaagtatgatcggtatggccgtttactggcagaagtgaagaatgaacgaggacagattatcaaccaagaaatggtgaagctcggtatggcctggcacttcaagcgttattcctctgatacaacatatgcccatttagaggaagaagctagaagactaaaaatcggattttgggctgagaatgattctataatagggttgatgtggaaacaatagcgcataaatttcctagcctacaaaattttgtaaataactaaactaacataagtacaacatataacacatatacagggatgaaaataggttttaaaaatccatttaccaagacaccagccgacgatgaagccttggtgttggatcagcaggttatcaatgacaatgaagctattcatgctgcgattgtatcaagtcttacagatgccaaagaggaaatcctaattgcagcagcatggtttacagatcaagatctttttgatttacttgaaaagaagcttacggaaggtataaagatcgaaatcgtgatgtctgagaatcaggaaaattacagactaccgtttgaaaaattgaccaattccggagcaataatacggcgtattaaaaatgccggctatggcgttatgaatcaaaagttttgtgtcattgaccgatctttcgtgctacatggatcttacaattggagcgtaaatgcacgtaagaataataacgaaagtgttattttaaccaatcatgaggctacggtagtcagcctaattcaagccttccatgcgattaagaccaaagcagaagaacaagaagagcttccacaagaggaaaagcgtgaagtcgttgataaaaccgttgtaagagagtcgcgatcagctaaatcagatgaattcacggaaattagctttgcaagtgtcttggactcgatgattgcagctgaagtatccaattttgatagaaatatgcttagacagcaggggtttgaccgtgccaagtcaaacaatggtgatcatcaggtacttcataaggcactagatacagtttactccgtgttcatcaatgatatagatgtcatcgatgacaagaagcgacgcctgttaagcaaagttgaggagcaaaagctcaaagcattggaagcccagaagcagcatgctgaccttaaactcaaccagttcaaagcagataccgaacttagaaaacaacaactagaatctaaaatcgcaacgaatgattctacgatttccatcaacggagagaatattgccgtcattcaaggaaaaataaagcgtgaagaaaatcaaatcacgaaatgcgaagaagatatcagagaacaaaaattagctttcgtccgcccggcacatcggttttttgagttgattccactatcactttttggtctactgctcttatgctacctatttattttttactcttccgcggcatatattatgatttatagtgctgcagacgcagaacttgctcagatgcaaggcaatttggaggtacccgaagtatttaatcctcacgcattggccgatgcatgggaaaaaggagtcgtagcattcatttttgtattgacatttgtattagttcccatcgtattggcggtgctgtcaaagattgtacggttcggtttcgcgaaggatattttgacatgggtgggtattctgttggttgacgccgttatcgcttatcaagtcgcgtcggttgtacacagggttcatatactcagaggagatacgacggcaccatggcattttaccgatgtgtttagtgatagtaatttttacctcgtattcatcttaggtgctttaggtcttatccttttcaagttcatttacagtaagttcattacctattttgaagaacggaatttagaccatgccgcaatgaagagtaaggcactcattaaggaatacgaaaaagatttacaaaaatgtggcgatgagattaataacttaaaggaagagtccagcaaattagaacaaaacaatattttattgcgagcagaaaatcaactctctcgatcagagatcgaacaaagtccaatagctgtcagtagcgaaaaagagcggatcatgatagagcttcatcaaaaatcacaacatatccagcaaacctccgatctctatatcagccacattgaaaatgacaatttacccatttctttagattcactcaaagatcggataaatatatttcttgaaggttggaatgactttctacatcaagagtattcgattgccagagctaccgaaatgtctctgatggccgctaacagtgtcaacgaatggcaggaacacaaattaattaccaaaaaaatagatagccgtgtcaaactttaatattaaaagccagcttttatcatgcgtggtaattatcactacattttcttgctgtgcttccgacccaaaaaccgtcgatccaatcgatgttatccattataatattaccattgcaccagacctgtccaatcgcgttaataaaaagttatatccaaaacctgttgctgattcagatatcatcagtggtattgtagatcacttttacccaggtgtagtcacgtacaatctggccaatcatacagcgaaaacaagaaagactggtcaacgagatatcttgcgtgtcgatttcattaaccagaagcttatcgggcagtatggtattaatgtattggatatgcaattagatctcaaacggtttggtatacatcaagaagatcgcattaaatatctaaccaatcaatccaatgaaaatttagcaaccgataagactaaatttaaagaagcatacaacaagatgtccgaaacggcggaaatggcacctgctggtgcagatatttggtcctatttcaaagacgggatcaaacacggtttggtagacaaatctatcgattccgttttgttgaagaatggtcacataaagcgcgattacacctgtaatgtcctattacttctaacagacggctatatcgaagcaggccttcatggaaaggatcattgtagaggtaataaatgttactttatgagctcaaagaccgtcgagaactttcgaaaggcatttcagcagtccaagtccaaagatatgggcgccttttttaaagaaaatggatatggtattatccccgctgaaaatccacttttaaaagaccttcacgtcgtagtcttggagatgtatgaccgttcgaaagatcataaaggaggggctaccatgcatccatccgattgggacatacttaaacttttttggtcagattggctaacccagtcaggagtaaaatcattccaattgctaccgctagctacctcaaaagatgaagctcattcaaatattagaacatttctggaaagtagatgattttcagcctttacggtttcccgtaaggcaacccggctatacctatttaactttaaaccatgataaagaccattaccatttttctgttaacgctattgtataatgactgtagtagtgtcaaggcaacggtaggattagaagccgataaaaatactgtatacatctgcggaagtaacaatggtaagcggtaccatttaacgaaaaattgtaggggattgagcaactgtcgtgctaaaacaataaagaccactatcgagaaggcgaagaaagaagggaagacactttgcggttgggaagaataaaaataaataactgaataaaatattaactgattacatgatggattttaaagatgaaatacggcaatttgccaaacgagtcgacaggctgttaccacagatcaaaacagaggaagcgaccaagacctcgctcattatgcccttcctgaaaatattgggatacgatgtgttcgatccgtttgaggtacaccctgagtttattgccgatatcggcatcaagaaaggggagaaggtagactatgctatccttcgcgacgacaagccggtaatcttgatcgaatgcaaacactatgcagacggacttgatccccataattcgcagctctttcgctattttcacaccaccgaagccagatttagcttattgacaaatgggttggaatatcggttctatacagacctcgttacttccaataaaatggacgagaagccattttttgaatttaagattaccgatattaaggacacggagattgcggagctgaggaaatttcacaagtcggtgtttgatctggatagtatttccagtgcagccagcgaactcaagtattttaatgagcttacgattcttgctaccggcgaaatgcagacccctagcgacgaattcgtacgttactttgccaagcaggtttatccaagcgtagttacggccaagatcttggagcaattcacgccgttggttaagcgggtgtttacccaaatcgtacacgatcagattagtgagcgattaaaaagtgcgctgaagaaagaaaccgaaaacgaagcgcagcatgtcccagcatcagtagagcccgagtcgctggtcgtcactactcaggatgagattgacggattcctgatcgttaaatctattcttcgcaaagaaatagaagtaggccggatctttatgcgagatagtcaatcctattgcggtatcctgctagatgataataaccgcagacctatctgccggttttacttcaccccgaatcggctacggatcggactattcgataaggacaagaaagaaaccaagcacgatttggcagcgctcgatgatatctatgcacacgctgaacagatcacggaaacagtggctaattattaacgtttaaactaaaaaacacttaaaaaaatgaatatgcatacaattgaagcaattaaacctggcccaaagccaaaaaaagatgatggctctttggataaaagaagacgggttacgccagaaaaaaaagagaaatatccacctttaaaacctcataagcataagcctaacgattaaaatataaatatttaatatcttagtagtagacaaaacgatttaaagggtcggatataaactgatccttttttgttttaaagaatgtgataaagctttctaatagtacagacaatatcaatattagcaaataaaagaaggcgagtttccccgccttaaatgttttcacaacggaataatccttattgtgatttgctttcataaacaaagataacatgaatattcacatatgcaatacgggaaaccgtaaaacaataaattatttattcttatcttaggagagagacaaattaatagccaatttattatgaaaaaaatattaggcctagatttaggaacgaactctatcggatgggctttgatcgaacgagattttgaaaatagagaagggacaattctgggaatgggaagccgaattattccgatgactcaggatgtaaaagacgaatttggaaaaggaaattctatttcgcaaactgcagatagaacgaaatttagaggtgttcgtaggttgcgcgaacggcatctcttgagaagagaaagacttcatagagtactaaatgttttaggttttcttcctacacattacaacacggagatcgactttgttaaccggttgggacaatttttggaagaaacggaacctaaaatagcttggaagaaaaacgatgaggaaaagtttgaatttctttttcagggctcttttcaagaaatggtagcggactttagcgcaaatggtcaggatgcaagaattccttacgattggacaatctattatttacgcaaaaaagcactatctgcaaaaatagaaaaagaagaattagcctggattatccttaatttcaaccaaaagcgaggttattaccaattacgaggtgaagaagaggaagaaaatcccaacaaactagtggaatttcattcattgaaaattgtcgaagttattgcggacgaaaaacctaacaacaaaggagaaacatggtattcattacatttggagaatggctgggtatataggcgctccagtaaaacgccattgttagattggaaagacaaagtaagagactttattgtaactacagatctaaatgatgatggttccgtaaaaacagataaagaaggagccgaaaagcgtagttttagggctccaagtgaggacgattggactttgatcaaaaagaaaactgaacaggaaattgctcaatgtgacaaaacagttggaacctacatttacgatacgttagtacaaaagcctacgcaaaaaatcaggggaaaattggttcgcacggtcgaacgtaaattctataaagaggaactgaaagcaattctgaagaagcagatagaacttcagcccgagctttttaccgacgatctgtatagcgattgtgtacgggaattgtacaggaaaaatgaggctcatcagaccgcgttgaacaaaagggattttgttcatcttttcgtagaagatattattttttatcagcgtccattacgtagccaaaaatctaatattggcaattgctcattagaatatagagtttttaaagtagaaaacaaggaaggtaatgagattgaaaaaattgagtatctgaaagcgattccaaaatcacatccgctttatcaagagtttcggctatggcaatggctttataatctaaaaatctaccagaaggcggatgataaggatataacaggtcaatttattcaatctgtcgaagattatgaacagttatttgattttctgaatgaaagaaaagaaatcaagcaagatattcttgtaaagcatttgctcgagaagattggatttaagggcagggctttgacaagtgagattacgaattatcgttggaattatgtagaggacaaagtctatccgtgcaatgaaacaggtacacaaatcagaacacgcttgtccaaattagactatgtacctgatggttttctgacacctgaactcgagtataagctttggcaccttatctactcggtcactgataaaattgaatttgagaaagctctaaaatcctttgccaataaacatggtctggatgaagtttcatttgtagaaggctttaggaagtttcctccatttaaaggcgaatatggttcgttttccgaaaaagcgattaagaagttgttaccgctaatgcggttaggaaaatattgggattgggacaaaattgatggcgatacgaaaaatcgaatttggaaaatcatcacaggagaagtagacgaagaaattaaaaaccgtgttcgcgagaaagcaattcatttaacaacggaagagaattttcaaggtgttcaattgtggttggcgcaatatgtggtttacgacagacattcagaagctaataatgctggaaaatggaactcagtagcggatttggagaaatatttggaagagtttaaacaacactctcttcgcaatccgatcgtagaacaggtcgttaccgagacacttcgagtggtaagagatatttgggcaaagtacggtagtgggattaaggatttcttcaatgaaatacacattgaattgggccgtgaaatgaaaaatacagcagaagatcgtaagaaaatcaccaatcaagttacagaaaacgaaaataccaacctgcgtatcaaggcactgttagctgaattgttaaatgatggtcgtgtggagaatgtccgtccattttcacccatgcaacaagaaacgttgaaagtttacgaagaatatgctttgggtagtgaagaaagatataacgtacatacaggaaattttgaacatgacccgataagcgatgaaatattaaaaatcagcaagacccctcaaccgacaaaatcggagttgcagcgttataaactgtggttagagcagcgttaccgttcgccttatacgggacagatgattcctttgaacaaactgttcacgtcggaatatgaaattgagcatattatccctcaatcccgttatttcgacgatagttttagtaataaggtgatttgtgaatcggcaatcaacaaattaaaagacaagaatctcggtttggagttcatcaaaaagtttcatgggactattgtcgaaacaggatttggaaggagtgtacgggtctttgaggaacagggttatcaggaatttatcaaagaacggtatgctaagaaccgttcaaaacgaaataagttattattggatgagattccggataaaatgattgaacggcaaatgaacgatactcgttatatcagtaagtttatttctaacgtgttatcaaatattgttcgagcagataataatgatgatggagtgaattcaaaaaacgtcttgccgggaaatggaaaaatcacaaccaaattaaaacaggattgggggttgaatgatgtctggaatgatttgatattacctcgttttgagcgaatgaatctgctgacgaatagtacggcttttacggcatggaacgaaaatcatcaaaaatttatacctattgttccgttggaatattcaaaaggtttttccaaaaagcgtattgaccaccgtcatcatgcattggatgctttggtgatcgcgtgtgcgacaggagaccacatcaatttattgaacaatcaatccgctaaatcggaaacttcaagatttgatttacaaaataagttacgcaacaaggaaaaatggcaagataatcaaggaaaggagagagacaaatttaccgattttaaaaagccctgggataattttacgttggatgttaaaaatactttggaacagattgtggttagcttcaagcagaatcttcgggtgattaataaaaccacgaataggtatgagaagtatgtggaaaagaatggcaaattggtcaaagagttagtttcacaaactaagggtgatagttgggcaatacgaaaatcgttgcatactccgatgccatacggaaaaaaagtctttgaatttgatacattgaaaatagctgataatgttggtaagagagaattgattattgatgaggaaatcaaaataaaagtagaggaagtatatcaaaattataaatgcaaggtgacagatactcaaaagtatttaaagaaaaaccctcttagagataatcatggaaatgaaattatagtaactgcatttaaggtcaagatagaaaaattcagaaaaagacagcctatatctgaattgtcaaaccgaggtcagggtggaataaaaacggttgaagaggcaattaagtttatagataaagttgccgatttcaaaatccgacaggatttacttaatcacttaaaggaaaatgacaatgacttagagaaatcgtttagtgcagaaggattagagcgtttcaatgcaaaaagaaagatacctatatataaattgcctattgccgaaagtggaagcggacgttttgctgttggaaataaaattggaacaaggcataaatgggttgaagctgataaaggaacaaacttgtttttggcaatatatcaaaataaaaatgccaatagaagttatagaactattcctttaaatatcgtgattgaacgacaaaagcaatggttaagttctgtacccgatagaaatgaaaaagaagataatttattattttatctttcccctaatgacttggtatacgtaccaactgtagaagagcaagaagattcagaaacaattgatttcagaaatttgacgaaagaacaagtgaaacagatttataaaatggtaagtactacacaggacaaattggaatgtgtgcctgttcattacgcatcaccaattagagcaaatgaaatgggatcaaacaataaaagtcaaaactctcttgatggcattcagataaaatctgtttgcatcaaacttaaaatagatagattggggaacatctcaaaaacattatcggatattttacgataactgtttccaaaagggaaattttcggtttttctgaactgttgcaaaaaatgaactgttgaagaagttgaagttggttaatttcaaaatggaactaacttaaaaaaataagaggatatgaacgagattgtaatatatcaaaaggatgataacaatgttcaaattgaggttcagtttgaacaagatactgtatggcttactcaaaagcagatggcagagttatttggcagaaatagggttgcggttactcaacatattcaaaatatttttaaagaaggagaattagaagaaaatgtggtatgtaaggatttcttacacaccactcaacacggtgccataaaaggcaaagcacaagaaagaagtgtgaagtactacaatcttgacgtaattatttctgtgggctaccgtgtaaaatctaagcaaggtacagcattcagaaaatgggccacccaacgtcttaaagaacaccttatccaaggctacaccatcaatcaaaaacgtcttgatgaactacagcaaactgtgaaatttattaccgaaaaggcaaaggatgttgcaaatgtagacgaggcgaagggtattatgaatatcatttcacagtatacccaaagttttgtgttgttgaatcaattcgatagtaattctattgaatcccaaaaacttaatgaaaatattacttatgagataagctacgaggaagcaaaaattgctgttattgaactcaaaaagcagctgattgatcaaaaagaggctacagaattgtttggaaatgaaaaagataatagcttcgaagggacgttacaaagtgtaatacaaacttttgacggtcaatatttatatggaagtatcgaagaacaagctgctcatttactctattttattatcaaaaatcatccttttaccgacggtaataaacgcattggtgcatttatgttcgtatggtttttagagaagaatagccaccgctttaaaaaggatggtgaaataaaaatcaatgacaatgctctcgtgacactggcattattaatagcccagagtgatccacgagaaaaggaattgatggtcaaattgattacacagcttataaacagccgataacatgatcaaacgtaccctcgtattttccaacccaacgtatttgagtcacagaaatagccaactggttatttcatttccggaaaaggaaaaagatgatcgcacagtaccaatagaagatattggtgtattggtgttggaaagccaacaaattacaatttcgcacggttgtattgcagcacttgtagaaaataacgtagcattaatttcatgcgattcaagccatatgcctacggggttgctgttacctttggacggaggccatacacaagccgaacggtttcgttatcaaattgaagcatcattgccgctgaaaaagcaactctggcaacagaccatacaacaaaagatctataaccaggcgagtgtgctcaacgaactaggtatacatgcagacaatatgtttcgctggtcaaaatctgttaaatctggagatcccgataattacgaggggagggccgcggcttactattggcaaaatatctttagtgagcatttgcaatttaataggcatcgagcaggagtaccacctaatagttttttgaattatggctatgcaatacttcgtgccatagttgccagaagcttagtttcatctggattactgccaactctgggtatttttcatcgcaacaaatacaatgcgtattgcttagcagatgatattatggagccatatcgaccatttgtagatcgaatcgtttataaattagtagcagaaggtacatatttggaagaacttaatactgagataaagacccgtttattactgttgcctcaagttaacgtagtttttgatgacatgacgagtccgctattaataggggtatctcgaacaacagcgtcattggcaagatgttttgaaggaacatctcgaaaaattaattatcctactatttagatgtgaaccgtttaaatcaatatcgcatattgtggattttagtgctttttgatttgcccactgaaactaaaaaagatagacgggcgcatgcaaagtttcgtaaggagattatgcaggacgggtttaccatgtttcaattttccatttatctgcgtcattgcaatagccgggaaaatgcagatgtgcatataaaaagggtaaagcgccgacttccagagagagggcatataggtatactgactattactgacaaacaatttggcgatattgaattgtttattggacaagagataggcaagcgaccagatacgccacagcaactcgagcttttctaagaagtaattgcatatctgagcagataatgcaaaaagaaaaaaagttttccacacacggtgttttgtagctcaaaataatatcgtcgtttagaataggatatagaaaactacgcaattaataaaaaatccagcctgtttcagactggattttttatttctaattttccaattaatttactgatttacatttgattaagctacggtatgctgtgtgtaatatcggtaaatcaaagaatgaaagcaaatcacaaccgtccaaatacttttcttgttggtattcgggctgtgtgtaatatcggtaaatcaaagaatgaaagcaaatcacaaccatatcagcattcttttgatatgtttttaagctgtgtgtaatatcggtaaatcaaagaatgaaagcaaatcacaacactgcgcttagtatgtcctctctcatttcgctgtgtgtaatatcggtaaatcaaagaatgaaagcaaatcacaacccatctagggaaattgcggagtacgtcggcgctgtgtgtaatatcggtaaatcaaagaatgaaagcaaatcacaactgctgatcaacgatcattttagtcagatgagctgtgtgtaatatcggtaaatcaaagaatgaaagcaaatcacaaccgcaatggcggcttgcagctgtgccgcaacgctgtgtgtaatatcggtaaatcaaagaatgaaagcaaatcacaactgtattagatgattgttatgtatccgttttgctgtgtgtaatatcggtaaatcaaagaatgaaagcaaatcacaacccttggtagaaaccggcaacaaatctcgatgctgtgtgtaatatcggtaaatcaaagaatgaaagcaaatcacaacttgatttggtgagcggggaatactcttttggctgtgtgtaatatcggtaaatcaaagaatgaaagcaaatcacaacatccctgtggtagggggtgaggtgaattgagctgtgtgtaatatcggtaaatcaaagaatgaaagcaaatcacaaccctttaaccgtataagcctcgtcatttaaggctgtgtgtaatatcggtaaatcaaagaatgaaagcaaatcacaactgtctgcgtctgcttctggcaagggaaagagctgtgtgtaatatcggtaaatcaaagaatgaaagcaaatcacaacgctgacgatgttgaggtagttgaagaaggagctgtgtgtaatatcggtaaatcaaagaatgaaagcaaatcacaacttcggtcgacttcggaaaacctaccatcgcgctgtgtgtaatatcggtaaatcaaagaatgaaagcaaatcacaactgttggtattattgttaacctcattttattgctgtgtgtaatatcggtaaatcaaagaatgaaagcaaatcacaaccaagtagaccgacatcttgcattttagtaggctgtgtgtaatatcggtaaatcaaagaatgaaagcaaatcacaactacctcttgttgtacgtcttctagtccctggctgtgtgtaatatcggtaaatcaaagaatgaaagcaaatcacaacacgtatttgcaaaaggtagatcaataggcagctgtgtgtaatatcggtaaatcaaagaatgaaagcaaatcacaaccatgtaaaacgttcacctacattgacgacggctgtgtgtaatatcggtaaatcaaagaatgaaagcaaatcacaacatgtaatccccattgattacataacaaagagctgtgtgtaatatcggtaaatcaaagaatgaaagcaaatcacaacggtgcgcgtcgctcgtattgtgcttcaggagctgtgtgtaatatcggtaaatcaaagaatgaaagcaaatcacaacgcgagtattgtcggaacttctaatcgtgttgctgtgtgtaatatcggtaaatcaaagaatgaaagcaaatcacaactatctacgggcttgactgttgtgaaaaacagctgtgtgtaatatcggtaaatcaaagaatgaaagcaaatcacaacagcgtatacatacagattcttacagaaaggctgtgtgtaatatcggtaaatcaaagaatgaaagcaaatcacaaccatacatgataacacatagttaaaatgtatgctgtgtgtaatatcggtaaatcaaagaatgaaagcaaatcacaacccagtaagtcgatgataaccgtcggttatcgctgtgtgtaatatcggtaaatcaaagaatgaaagcaaatcacaacttcctgcaggtgatatattccatgtttcgtgctgtgtgtaatatcggtaaatcaaagaatgaaagcaaatcacaactttacaatgcggatactttcttatatgcgagctgtgtgtaatatcggtaaatcaaagaatgaaagcaaatcacaacaaaacggacaagaaattgccggcatcggatgctgtgtgtaatatcggtaaatcaaagaatgaaagcaaatcacaactgtagagattgaagtaatgcagatccgtattctgtgtgtaatatcagtaaatcaaagaaccggccgaagggagctcattcattccattaaaattagcgctaatgaataatgaaagcaaattatttatcgagattttggttctctaaactcaagggtttttattgctttcagtaccgccttatgttttttttcgctcaagttgtggcctactagacaaaatctttgtgtaaggtagtgaatcccaccatgaggttctttatgccatatgctgtctacaaatatgcccgtacggcctttgctcatatttcttggagttacaatatgacccggaaaaaattgcacgaccgtgtcacgatagtattcagtcagaaaagattttagataaatagaatcctttagatttccttcggtaaaggagaagtttttatttaataaagagtcaaaatcttcgattctaattatagaatctctttctatgatttcatttagctgggtatggattaaattgtttgaataggcaccataatcgaaaaacaaagtgtctgtcgaatctatagcaattaatcctacataagaatctatccctttatgtgggatatattgccatgacgaggggatttttagtgaaaatactccgccaaaatctctcgtccgttccttacaggatacaattagaaataggggtaatataattgcgatatatttcattgtactgtgggattatggattatagtctttccgtgatccggaaccaattttcttctaacttccaattatgttcgggataatttttgatcaagtcttgataatattgctgtgattccagggcatcggtatagataaaataggtttgcggtgattcgaaaaaaccgcgtgagatccaaaactttatggttcttgtaccgttatttttattcgtagtaatccaaatatcatttcctccgttagagacaagaggaaacttaaaaggtagttcgcatataccgtttttcatttctgtatttggtgtaagctttccttcttgaacctcgttgacaatttgctttcgtttgtcgtatgatatagcccaatctatcttttccataactgcactcggaaacttgttgaaattatagaatgtcaatagtaataggatcaaggtgatcgaaagacttactattctattttgatttaatttttttctctcctttacaattttaattatttggcggatggaaagtgaaaataacattaggcagactacaagccagacaattggttggaaaaaatatggcagaaggtaataatctgaaatgatatagattaaccaaataattgtcagtattaccagcttagttaccattgattcatcttgatctcaaaaagtgtaaagaaccttcttaaaaatactaaatctttcttaaaaacacaatgagttcttttagtttctggtcggtcccgaaccgcaatagtttttatctgctcatatcggtcaactgccattccgacagaaagtacaccaaatgttatactaggcgctacaactatctccattcgtttcatattctgtgccattcttcccagaatttttgattggccgtaacttcatattcgtcatccggcagtatcttaggtgcactggattgaaaaaagaattcgacctgatcgacaaattgtaatatagttcgcttatatacttcgaaatcaatttttacgaggttttttctaatgcgcagaaaaactttattctgctgatgtattactttccatttaaagccatttgggcaattttgaataatcacttcattcatatcttcctggaaaattataaagtgaccacaataaggtatgagagcatcacccagcggaatagttgtcgtatgattacgctttatagtccttagagccttcagctgagcgtagtaatatctggtaaaatatttttttgataaaatacggtttatttttgataaaatacggctatttcttggctgtgtttatggctaccttgtcctcatatagaaattacatgccagagagatgagactgctgttcccgttttctgtttaccgcatgtcactgtctaattaaccgaatcttgattatgaataagaccttttatgtactagttattctgatgagcacacttcttctcagaaaaacatgtttctcgcaggatgctgataaggttaggatttttcgacctatccctcaatctccgagaatttctgcattatcgaaatatatcaattacccaaccggtgaggcttcgggcgtgcctgctattgatatacctctttttgaaatcaagattagggacaaggttattcctattacactttcataccatgcaagcggtataaaagttgcagaaaaagagacggaagttggtttaggatggagcatcagaggaatcggtactattgcgaggtgtttcggatccgtgttggatgaatccgctgcaaacgggaattttgcttctccctcgtatacttttgaacagttactttccaagaggaatgaaactgacgcaaatgcaaggacgcagaattttcacgaattgcgagacataataaacaggacaggtaaagatatgaatgcagatcttttcttttacagcaccggacgtgaaagtggtgctttttacagaaatggagtgcctttttttcaaatgccttttcgagagatgattataaacaatacaattcccgatctcaacggaaaattcaattttaatatatcaggagataagcttagctatgcttttacttcatattcaacaatctcctccacctatattgaaaatgtttacggagaagatcccatcgaagcttggcatcttaccagcattagaacagcagacgatattaggcaagtgcacatagaatatgaaccccgggaaatccaagaactggtgtactatcaagaacagtgcatagggaaagattttttatttggaacacccacggtgggaacacaagcactcagctcttcagttaaaacgttcaccgacacaataacgcacctcgagcaacgtgtcaaaaaaatcactaccaatgattatacggcaaattttgtctatgccgctgaatctggacttttagttcatataataattcggaatccattcaccaatgaacaggtcaagctcataaatttctattacaacgacaatgacccagatcgagacagaaccaagttactggcgttggaatttatgtcgcccaccgcactcgagttaactgaaaggtatagttttcagtattcgagcaggttacttcccgatttatcaacgggaaatggcaggcatgcacaagacgtatggggatatttcaataacaaatccaacacggggttgatcaccagccgtaccatcaatggatccgcgttatctttgacaggtatgactgcttcggacctagcaactgttcacaccattggaaatgcagatagggcctcttcggcggaggatatgcaagcaggcattctcacgagtattacctctccctacggcggatttgagatattcgattatgaacagaataaatgggaagaacagggtacaaacatagtcaagcatggagctggcctccgtataaaacttatcaaaaagtacgaccgggacagtaccttactcaatgaaacgctttataaatatggtaaaaatgaagatggtctggggacattccttcaagatgaaagtttgtcattaaaggactatgctgcgcaatctttgtacacctaccaaaattccgcaggagccagttgtagtggtaatttagatagctggcaggccaagttttttggtattggaaactttcaggccgcgtatctgcagggcatgtcaatattttatggtcacgttacccgttatacaggattaaacaatacgttggcgaaaacagctactatttatgataaagattccacgctcaacaatgtaaatactgcgatcatgaataacaccaattacgggatttttaatccagtactaacaaatatcaacaaactgcaggaaattatatatggcatggacgggcccaccacttataagcctatccggaagaccctattcaatagagagaagttttttaatcagattgatacgctttcttttatatacgagttaaaacgttttgttgagcctcctccatccttctgttccggatatacaataggctcttcacatatgcaacagttcggaatatatggttaccgctatatgggacagatttcccgcgcaatttcggaaaccgaaattacctacggtacatcaaatttggacagcgtcgttaaagtcagaaattttgagtatggaaatttgcatcccctctacgtaaaaaagattatagaaactaatgttaatggctattcagtagaaaagtggatcgattatatagctgatgtagtcaacgctaattctttaggaggtactgtattgagtaacgatgaactagcggcatatctttctatgaaaaacagaggtgaaaggtggatccccatccaggaaactatattgagaaacggaacaagaatgtcgatgaggcgtactttatataaaaactggggtggtggccttgtaatgccccaaaggatcgcagaggtaaagcgcactggagcgtgggagaacgaatttatttttcttaaatatgacgaggtaggaaatgttttggagtcaaaaagccgagcgtcattaccgacatcttttatagtcgatactctgggagaccaccaactagctgtagcgcaaaatgctacttacaacgatatcgcttttacgagcttcgagacggcgaaccacggtaattggtcgatgcatattaccccatctatagtggacgatttttttgcaccaactggaagtaaagtgttgagtgcggctaataataagataataaaagcgggtttgacgccctcaaaaacttacatattatcgtactgggcaaaaggaacttcggcagcgacggtaagtggaggagccgcactactcttacagagcagaaatggctggcagttctatcggagaacgataagtggagtaagtcaaatagagttaaatagttctttatccgatgtgttcttggatgatcttaggctttatcccgagggctcattttttacgacctacacatacgataagcaaggcaatataagtagtatgacagatccagctgaacgtattacttactacaaatttgattggaaaggacggatgcgacttatattggatcagaacggt

SEQ ID NO: 1100 - DNA, 24563 bp, synthetic construct
  misc_feature 1..24563: note = Synthetic
  source 1..24563: mol_type = other DNA
atctggaatatcgggcgattgctgatgctaaaaaagctaagaattttgttctgaatgaaaacaaacaaactcccaatgagcctaatttacccgaatatcaaaaagataatatgaatgagttctttgaggatatcaaatttctcacttcatttataggttgcaatatttttgaatttgtgaaactaaaagaggaacacttattttataccaaaggaagaggttgtaatgcaaaaggcttttacaattcatctggatttacagtactaaaagggagtattattgttaatagttctgttccttcgttcaattggaaagaaaaaagagaaaaactgattaacgaatatacggttacaaaaaatggcttattagttatggagtctgacaagactttttctagtccaagtacggctgctgatttctgtataggcagtagcaataacggctggttagtatggaaagataaaaatggccaaactttagattctgtttacaggaaacaactagaataaatcttaaaatataagtatataaaaataaacgatatagctatattatagaattctgcatagttgcctcaaattattacatggatttaaacaaataatatggacatagatttcgaatcatacatccgtggtagtgagcctaacaaaagagaaaaggcttcagcttggaaaacagccattggcttacaagctgtggatggcttgcgaacatccgattatctaaaagatacagctataaagcatattgagggggatatcagtattgatgaagtaaagaaactcattaatggatattaccaatcaaagactgtacgtactttgaaagatgaagaaacagaagaagccgataaggtgtctgctaacatcgcaagaatcttaaatgaacaatcgtttgctttttcagtgacaggatttacctccattcaccgtagattatttgaaggaatctttaagtttgccggaaagattcgcaactatgatattacgaagaaggagtgggtacttcgtggtgatacagtgctctatgtcaattccgaagatttacacaaggctttggaatatgacttggaacaggaaaagaacttctcgttcaaaggcttgtctatggacgatattgtagtacatatcgctaagtttatatcaggcatctggcagattcatccattcggtgagggtaacacccgtactacggctgtctttgccataaagtatttgcgtagcatcggttttgacgtgaacaatgatttgtttgccgacaactcttggtacttccgcaatgcgctggttcgtgcgaattatagaaatgtgcgaaaagacgttgaaccggatatgagtttcttggttgcattcttcagaaacttaatgatgggagaaaataatgagttgaaaaatagaactatgattatcaataccctacagcagccaaccgaacaagtcgaccgaacaagcaccgaacaagtaccgaacaagctaaccgaacagctcggcacaccgctttttgctatcgtaaaggctatcggaacagaacaatgttcattgaaagtaataatggaaaagatagagttaaaacatcgtcccacttttattgccaactatttgactccagctattcaaagtggccttgttacccctctctacccggatagccccaaacatcctcgacaaaagtatctgttgacgataaagggactggctatttttaattcaacaaaatgataagcaatagataaacgaagaatgaaaacatccatcaactaccttcccgaacagaaacgggatgagctcagaagaattgtaaagtgcgtactggaagtgcttcccggttgcgagatgattatcctatacggaagttatgctaggaatacctatgttgactacgaccaacgtattgaatatggtattcgcacctgttttatgagcgattatgatatcttggtagttaccaatacccgtttccaaagacacgttataagccatatcctaagcaaggccactgataattactacaaaggaatgaacagaaacgaatccactaccgtacaatttatagacgaaagcatcgacgacttgaataaagccatcgataaaaaccgatatttctataccgatatcaagcgagagggtatcatgctttacaacagcggccgttataagttggcccgccgccgtaaacagaactatcgggagataaaagagttggcggaggagtattacaacgaaaggtttgaaagaggtaatgagtttctcttaggggccatattttataatgaacaaggcctacataaaatggcttctttcaatctgcatcaagcctgtgaaaattactataacagtatcatcttgacttttacactatacagccccaaagagcacagcttgataaaattatcagccagagctaaaacgcattcgctagagtcatccaaagcctttccacggaatacagaagaggaaaaacgacttttcgatttgttgcaggacgcatatgttcaggctcgttatagtttacacttccgcatcactcaagaagatatcgaggcgcttatccccaaagtagagctactccgggatatcgcacgacaatgctgcgaggagagaatcaaggtgtatgcggcaaaagcaagacattgatgaggttttcttacttctcttccacatggaatacaattgtaatcatgaattcccctcaatcgccacctttataaccccatccaacctgttttcgaagatacggtaagcctcctcgatctcgttcaatggaaacttatgggtaataagaggcgtcgtgtctatcttaccttcttctattaggttaagaatctcggcgcaatcgcagccatccaccccaccagtcttgaacgtcaagttcttgccatacatgtctggcaaaggaagaagctgaggtttatcatagagggctacgatggtgacaatggcgttcggacgggcacaatcccatgccaagcggaaggtatcctcactccccgcgacctccaatacgacatccgcaccgccatgatcgctgttacgaagaacaaattccttacagttttcgggacctgtcaccaagacttccggataacgctggcgaacgaaccgggccctttccggagacttctcgcaaacaataatacgtcgtggcttcttcaacaacacgcacaacaaagtacaggtccccgtaggaccagcgccaataatgagaaccgtatcctcctctgagacctccgagatgcgagcagcccaaaaacctgtcgctaacacatcaccgaccagcaaagcctgctcatcgctaaccgtatctgggatacgattcaagcctcgatccgcataaggaacccggacatactccgcctgccccccatcgatacgacagcccaacgcccaaccgccattgggatcggtacaattattgacatatccacgccggcagaagaaacactctccgcaaaaggtctcgacattcacggtcaccctgtcacccggcttgactgcagtaacatcggcacccaccttttccaccacaccaaccatctcatgcccaacggttattccgggtaccgcacgtggtacgctaccatgtttgatatgaagatcgctagaacagatactacccaaagtcacacgtacgatagcgtcccatgaatcctgtatttccggtatcggtttctcccgcaattcaaatttcccttgttcaatataagtgtacgcaagcatgatacttccttctttttgttaatcgccttacaaagataaggatcgtatcgccaaaaatatcagatatatcagtaatttgggtacaaactgtttcatttttctctcctatctttatcgccataaatacatagcattctcgtaatgaatataaaaacaacaaaaattcaagaagtatgaaacgaatcgtattattcatggtcatgatctcaatggtatgtatcgcctcttatgcgcaaaaggctgccgaagggacaaaagttttagtggcttacttctcggcaacgggaaatactgaaaaagcggcccaacaagtcgcgtctattgtcagtggtgatcttcacaatatccaacctgagaaaagctatacctccgccgatctgaactggcgggataaatcctcacgcagcagcgtagagatggacgatcctacatcacgaccggccattatcgatgatttgaagaacctagcggagtatgacaccgtttacctaggatttcccatctggtggaatcaagccccaagactcatcaacacctttttggaaaaatacaatctctcgggtaaaaccgttatcccattcgccacatcaggcagcagcagtatctcgaacgcagagagtgaattgcggaaagcctatccggatgtgaactggcaaaaagggaagttgatgaacggagcgacagaagaagatatcaagaattggactaaaaaataaatgattatgagaaagaattttggagcgaagcctttgagctatccgcaacccgtatttattatcgccacgtatggagaagatggaactcccgacgcgatgaacgccgcttggggcggtatcagtgagatgaatgagatcagcatgtgtcttagcgccggtcacaagacagttaagaatatcctgaagcgtagagctttcacggtaagcatggcagatgccgatcatgtcgtagcttgtgattatgtaggtatcgtgtcaggcaataaagttaccgacaagtttgccaaagcaggatttcacgctacaaaatcagacttcgtagatgctccgttgatcgacgaattggccgtggctatcgaatgtaaattgaaagattacgatccagatacttgcatactccgtggcgagatcgtaaatgtcagtgttgacgagcgtgtacttgatgagaacggcaaggtgaatgtagctaaagccgctcccatcatctttgatccattcaacaacgactatttgagagtgggcgaaaaggtaggaaatgccttttccgatgggaagcaactgaaaacataaaagaaaagtctatctaaagttattatatatgtaaacttaatttatatttgcactatggaaaaaaaatgaatattatgcaagcaaatcctaagatcgggagtatggacgctgtattagataaattatacggcaaggttggctcaccagaaagagaggagtttcgcaaagaagcatattcttattgtgtggcgcaaattattagtgacgcacggaagcaagagaaaatgacacaatccgagttggccgaaaaagtaggaactaataagacctatatatcaagaattgaaaaaggaatcatagaaccgggagttggtttatttttccgtattattgatgcgcttggccttaaaattgaaatcgtaaagcctatcatgtgagcaaaaggaactctctcagatcgcctctgttaagattgttttccaatatgagtaataaaaggggcaaaggcgtaatcactacggctttacccctttatacatcagctcatgaaatcaatttagagatatcatacccacgttccgttatcttccccagtaaatcttcccgaaccgcctccggtaagttcctctcacggctcaagatccagaggtatttatccgtgctgcttcctatcaccgcatattgataatccgcatcaagttctaagatataataatccgcatagaaccataagaagaaagccactttcaattttccgggattatttttagggtccggttgtttcgcacgaccggtggctttcttgtgaacgccgcctttatatccttcgttctccacacggatctttccgtccggaagcaacgtatacgtggccgtcacatccgtcatgcctctctcaaaatgattctcataacgggcgatttcataccatcgccccatataccgtttaacatccagttccggtacggtatgatgatctgttatattcataagtttctctattgttggataaatgtatgtaaacccagattcctgtaatttagagggatggacggtttgcccttttgtcacgaacgacgctccctcgccaaacttcagccgaaaaaagaactcaggcaaagggatgatcctacggatcttatccgctctcgctaacgtatgagccaactgcttttgggtgataaggtctggagaaaccaaatttaccacccccctcatctgcctattccgtatgatatacccaaaagagcggcatagatcaaacaggctgatccatggaaaacgctgttgcccgttaccgatcacgacacttacccgtgagaagcgttgcaaacgaagcatctctttcaaggcccctccatcctcagacaatacgacaccaaaacgggtaatgacaagcctcacatccgatgagcatgcggacgcttcctcctcccacgccccacacaaccgggccaaaaaatccattccccggcaatcatgatactcgtcatattccccgaaagccggataataacctacggcggaggccgaaataaacaactcaagtttcacgcttctcgtgtttatggcatgcaccaactgtctggtcacgcaaatacggctatcatacaactcttgtttgtaagcctccgtccaacgtttattaatggaagcgcccgccaaattaatgacgacttcacaggattccacgcatcggcataattcatcaaaacaatcttccttaaacaaatcccgccctaaagggataacatcatatccttttccctccaaaaaagatgaaagatgctgaccgatatatccgcttgccccgctgatcgctattctcataatcaatacttttctattaaaacaaatccacaagcaatttagatggcaatttccggttctattttagtatcccaaacagaatatcgactaaaagaaatcggttcgacagaaaacaactatatttgtcctcatttaatagtaactgaatcatggcagacaattatctggaaaataagtacgcagaataccaagctcggaagacttccggcactagaacggggcatacaacgaagacacttcataaaacaagaagagtcttcatcaccggtggagccgaggggatcgggaaagcgattgtaagggctttcagaggagccggacatcgtgtggccttctgcgacaagaacgagaccttaggaaaagagactgccctacaaaccgggacacaattccatctcgtggacgttagtgataaaaccgcactagaagattgcctgcgaaagatcatcgaggagtggggagatattgatatcattatcaacaacgcaggtgtcagccagttctctcccatcacggaaacaagcgtagaggatttcgacaagatactatccataaacttacgcccggcgtttatcacctcccggcgattagcgctccatcggcaatctctcgatacccccaatccatacggcaggattatcaacatctgctctacccgttacttgatgagtgaacccggtagcgagggatatgccgcctctaaaggaggtatctattctttgacacatgcgttggccttatcgctctcggaatggcatatcacggtaaactctatcgctcccggttggatacagaataacaattacgaccagcttcgcccggaggatcatgctcaacatccgtccggaagggtgggaaagccggaggatatcgcccgtatgtgcttatttctttgtcaagaggaaaacgatttcattaatggcgagaatattacgattgacggtgggatgaccaagaaaatgatctatctcgactaaataaacatccgtatatgacacaaacatcgaacatagaaaccaaccgtctcgtgctccgtccttttagcgaaagcgatgctcctgatgtttttgagagctgtaagaatccaaacctaggcaataacgccggatggaaacctctcgaaacgatcgaagagactattgatgtactaaataccatatttatcggaaaagaaggggtttgggctatcgtatttaaagagacaagacaagtcatcggctccattggcatcattcccgatcccaaaagagaaaacccacatgctcgcatgctgggttattggctaaaagaagagtgttggggacaaggcttcacgacagaagcagtgcaatccgtattgaattacggatttactcaaatggatttacatttgatcacggcaaattgttatcctcacaatcaacgctcacaacgtgtattagagaagaatggattcgtatacgaaggacggcttcatcaagcagaactaatgcatactggacaaatagaggatcatttgtgctattatcttgaccatcattccttttcatacaaaaacaatagtttatgatagtagtaacaaaagatttatatacgctcaggagttgggaaggtcaagatacggaatccttaaccttgcaccttaataacaagaagatctgggataactgtcgggatggattgcctcatccttatacaaaagaaaatgcccgctgcttcatcagccaagcacgagaaaaaactgaaatatcggatttctgcattgtggttcatggtgaggcaatcggcaatataggttttgtgagaggagcggatgtggaacgtttcaatgcggaagtcggttattggatcagtgagagatattggaaccaagggattacctctgaagcgttagccgatgcgatccagtattattttgagcatacggaggttattcgtatattcgccacggtgtatgaatataatctggcatccatgcgggtattagagaaagtgggattcaagaagactggcatcttccgaaaagcttgttacaaaaacgggcgattcatcgatgcgcatcattttgagatcgtagcggatgagaaattagttgggaacaaagacttataatccatttatgcaaataagacaattacaggtaaacgaatacgataaggcattaaccttgtctttggacgtgttcatccaatgtggcaagagtgacttcgacgaagagggattggaaaccttcaagaatttcatttacaataaggatctggtaaatgagctaaccatttacggagcattcgagggtgagtcattaataggtctaatcgctacaaaaaatgaaggaaagcatatttccttattcttcatcacgcctatgtatcatggaaaaggtatcggcaaacgattattcgaggccgctatccaagataagccagtctcggaaatgacagtcaactcctcttcctatgcaatcccaatctaccggaaattcgggttcgaaccaatctgcgaagaacaaactacacatgggatgaagtacaccccgatgaggcgaacgataacccgtccctccttcgaggacttcaatgagcttcttctgctttgggaagcgtccgtacgtagtacccatcatttcctaaaagaagaggatatcttattttataaagaacttgttcccggatatttcccattggtagaactttatatcatccgaaatgagcgaggaaagatcgccgccttcatgggcttaagcgatgagcttatcgagatgcttttcgtacatccggaagagcaaggcaaaggattaggtaaacgacttatccaattcgccttgcaagagacacccatccgaaaagtcgacgtaaatgagcaaaacacaaccgcacttcatttctatcagcatctgggattccaagtgataggaagagacgagacagattcctccaacaagccattcccgatacttcatcttcaagctacacttccttaaaaatttaaggtaatcgtgtagcctatcatgactatatgcgtagcctaacgaaggcattcttatcaaaaaacaggactagttacacataaaaaaagcccaccgataaaggacgatgggctagaacctaaatgttttcacaacggaataatccttattgtgatttgcttcaaattagtatagcaaagaaataaagaatatatttataaagcaagtatttcttgataatttattttatctttgaaaaaatcgttaacacaatactagtcatgaaaaaaatagtaggattagatttaggtacaaatagtataggatgggcattaatcaatgcttatatagatgaatataataaagaacacttatatggtatagaagcttgtggcagtcgtattatacctatggacgcagccattttaggaaatttcgataagggaaattctatctcacaaactgcggatcgaacaagctatcgtggtatacgtagattgcgtgaacgccatctattaagacgtgagcgcctgcatagaattctcgatttactcggctttttaccaaagcattattccgattctctcaatcgctatggcaaattcttaaatgacatagaatgtaaattaccttgggtaaaagacgaaacaggttcttacaaatttatctttcaggagtcttttaaagagatgttggccaattttaccgaacatcatcccatacttatcgcaaacaacaaaaaagtaccctacgattggacgatctattaccttagaaagaaagcattaacacaaaaaatatcaaaagaggaactcgcttggattcttttgaactttaatcagaaacgaggatactatcaacttcgaggtgaagaggaggaaactccaaataaactagtagaatattattcattgaaagtagaaaaagtcgaagactcgggagagagaaaaggcaaggacacctggtataacgtacatttggagaatgggatgatttaccggcgcacaagtaatataccattggattgggaaggtaaaactaaagaatttatagtcaccactgatctagaggctgatggtagtcctaagaaagataaggaaggaaatataaagcgttctttccgtgcgccaaaagatgatgattggacattaattaaaaagaagacggaagcagatatcgacaagatcaagatgactgtcggcgcttatatttatgatacacttctgcaaaaaccagaccagaaaatacgtgggaagctagtacgtactatcgaacgtaaatactataaaaacgaactctatcaaatactaaagacccaaagtgaatttcatgaggaattacgagataaacagttatatattgcttgccttaatgagctttatcccaataacgaaccacgtaggaatagtatttccacacgagatttctgtcatttatttatagaagatatcattttctatcaacgtccactgaagagcaagaaatcattgatcgacaattgtccctatgaggaaaataggtatattgataaagagagtggagaaatcaaacatgcatccattaaatgtatagccaagtctcatcctctctatcaagaatttcgcctttggcaatttattgtaaacctacgtatctacaggaaggaaacggatgttgacgtaacacaagaattactccctaccgaggctgattatgtcactttatttgagtggctgaatgaaaagaaagaaatcgatcaaaaagccttttttaaatacccgccattcggctttaagaaaacaacttcaaactatcgttggaattatgtggaagataaaccttatccctgtaatgaaacccatgcacaaataatagctcgtttaggaaaagcgcatatcccaaaagcttttctttctaaggaaaaggaagagacattatggcatatattatattccatagaagataaacaagaaatagaaaaagccttacactcttttgccaataagaataacctaagcgaagagtttattgaacaattcaagaatttccctcctttcaagaaggaatatggctcttactcggctaaggcgataaagaaattgcttccattgatgcgaatgggtaaatattggagtatcgaaaacatagataatgggacaagaatacgaattaataaaattatagatggagagtatgacgagaacattcgtgagagagttagacaaaaagctattaacctaactgatattacccattttcgagctttgcctttatggttagcttgttatctagtttacgatcgtcactccgaagtcaaggatatagttaaatggaagactcccaaggatatagatctctatttaaaatcgtttaaacaacattcgttacgcaacccaatcgtggagcaagtgataacggaaaccttgcgtaccgtacgagatatttggcaacaagtaggccatatcgatgagatacatattgaattaggacgggaaatgaaaaatccggcggacaagcgtgcccggatgtcacaacaaatgataaagaacgagaataccaatttacgcataaaagcactattgactgaatttttgaatccggaatttggaatagagaatgtacgtccatattcccccagccagcaggatttattgcgtatttatgaagaaggcgtactaaatagtatattagaattaccggaagatataggaattatattaggaaaattcaaccaaacagatactctaaaacgtccaacacgctcggaaatactacgttacaaactatggttggagcaaaaatatcgttcaccttatacaggcgaaatgataccattaagtaaattattcactcctgcttatgaaatagaacatattattcctcaatcacgttatttcgatgattcacttagcaacaaggtgatctgtgaatctgagataaataaattgaaggataggagcctcggctatgagtttattaaaaaccatcatggagaaaaggtggaattagcttttgacaagcctgttgaggtactttccgtggaagcctatgaaaaacttgtgcatgaatcttattcacataacagaagtaaaatgaaaaagttactcatggaagatattccagatcaatttatagaacggcaactcaacgacagccgctatattagtaaagtagtaaaatctctgctttctaatatagtgcgtgaagaaaacgagcaagaggctatctccaagaatgtcattccttgtacaggaggtattaccgatcgattaaaaaaggattggggcatcaacgatgtttggaataagattgtacttcctcgtttcattcggttgaatgaactgactgaaagtacccgtttcacttctatcaataccaataatacaatgatcccctccatgcccttagagttacaaaagggattcaataaaaaacgtattgatcaccgccatcatgcgatggatgccattatcattgcatgcgcaaatcgtaacatcgtgaactatctcaataatgtgtcggctagtaaaaacacaaagataacacggcgagatttgcaaaccctattatgtcacaaggacaagactgataataacggtaattacaaatgggttattgacaagccttgggaaacattcactcaagatacattgacagctttgcagaaaataacggttagctttaagcaaaatttgcgtgtgatcaacaagacaacaaaccactatcagcattatgaaaatggaaagaagatagtctccaaccaatcaaaaggggatagttgggctatccgtaaatcaatgcataaggaaacggttcacggagaagtaaatttgcgtatgataaaaaccgtatcatttaatgaggccttaaagaaaccacaggcaatagtagaaatggacttgaagaagaaaatactcgctatgctcgagttaggctatgacactaaaagaataaagaactatttcgaggaaaataaagatacttggcaagatattaatccatcaaaaatcaaagtctattactttacaaaagagacgaaagaccgctattttgcggtgcggaagcctatagatactagtttcgacaaaaagaagataaaggaaagcattacagatacaggtatccaacaaattatgcttcgacatttggaaactaaagacaatgatcccacattggcattctctccagatggtattgatgaaatgaaccgtaatattcttatattgaataaaggaaaaaagcatcagcccatttataaagtgcatgtctacgaaaaagctgaaaagtttactgtaggacaaaaagggaataagcgaactaaatttgtagaggcagcaaaaggaaccaacctgttctttgctatctatgaaacagaagagattgataaggatacgaaaaaagtaatccgtaaaagaagttatagcacgattcccttaaatgtagtgatcgaacgccaaaagcagggactttcctcggctcctgaagatgagaatggtaatctacctaaatatatactctctcctaatgatctggtatatgtaccgacacaggaggagattaataagggggaagtcgtaatgccgatagatagggatcgaatatacaaaatggttgactcaagtggcattaccgctaatttcatcccagcttcaacagccaatttgatttttgctttacctaaagctactgcagaaatctattgtaatggtgaaaattgcattcagaatgaatatggtattggtagtcctcaatctaaaaatcaaaaagctataacaggtgaaatggttaaagaaatatgttttcccattaaagttgatagattaggaaatataattcaagtaggttcatgtatactaactaattagattttatcctatgattaagaaaacattttattttggtaatcctgcttacctgtcacttcgtaaccagcaattagttattaagttaccggagatagtaaagaatgatactgtgcccgaaagcttcaaacgacaatcagaaattactaaaccaattgaagatattgcagtgatagttcttgacaacaaacaaattactattacccagggtgtattggaagcattactagagaataattgcgcagttattacatgtgatggacgaagtatgccagtaggcctcatgcttccgctttatggaaacacgacacaaaatgagcgctttcgagatcaattagacgcttccttacctttaaagaaacaactttggcaacagactattcaagcgaaaatcaacaatcaagcatcagtattatgctcttgtaaaaacgaagaaataaaatgtatgcgaatatgggccaatgatgtacgtagtggagatcctgacaatttggaaggacgtgcagctgcttattattggaagtatctgttcggacacatagaaggttttacaagagatcgggaaggtatacctcctaataatttattaaattatggttatgctatccttcgtgctattgttgcacgtggactagtcacaagtggtatgttacccacattgggtattcatcaccataaccgatataatgcttattgtttagctgatgacatcatggaaccttatagaccttatgttgatgagcttgtatttggtttaataagaacaaagggtatatcacccgaaatattaacaaaagaatggaaagcatcacttctttctattcctacattagaagttaagattggaggtaaacgaagtccgttaatgatcgctgtcgctcaaacaacagcctctctttacaaatgtttcagtggagagcaacgaagaatcgtgtatccagaacggtaataatcatggatcgatttagcgaatatcgtattatgtgggtgttggtattatttgacttacctacggaaacaaaaaaagaaaagaaagcttatagtgatttccgtaagaatctgcagcgtgatggctttaccatgtttcagttctctatttatgtgcgacattgcgccagccaagaaaatgcagaagtacacataaaacgagtaaaatcatttttaccagaacacgggcaaataggaataatgtgcattacagacaaacaatttgggaatattgagttgttctatgggaaaaaagtacaacctcctaatacacccggccaacaattagagcttttctagaaataataaatcccgtcataaaacgggatttattacattggaaacttttcttttttattttctaaccattctatcatctagttgatatacagcatataatacagattaagctgtttccaatggatcaaagatactaatttgaaagcaaatcacaacgacacggctctagctgtatctaaagcatttgctgtttccaatggatcaaagatactaatttgaaagcaaatcacaacacatcaaccatatttgtacatgattgaatcgctgtttccaatggatcaaagatactaatttgaaagcaaatcacaaccagtattgtatgtgtatcctccccctactggctgtttccaatggatcaaagatactaatttgaaagcaaatcacaacgtattttatccaatacctttttaccattatgctgtttccaatggatcaaagatactaatttgaaagcaaatcacaacataatttcctagactcaaaatatgcggatggctgtttccaatggatcaaagatactaatttgaaagcaaatcacaacaacttaacctcagattttcgaatttcaagagctgtttccaatggatcaaagatactaatttgaaagcaaatcacaacaaacctcttctgatgttctattttccaaatgctgtttccaatggatcaaagatactaatttgaaagcaaatcacaactaccacgcacagtcttgtaggtgttctcacgctgtttccaatggatcaaagatactaatttgaaagcaaatcacaaccactacttagcacaaacgcttttgcacaaggctgtttccaatggatcaaagatactaatttgaaagcaaatcacaacatataccttaaagctagatacatacctgagctgtttccaatggatcaaagatactaatttgaaagcaaatcacaacatgctatcactgaaatgattgaatttcttagctgtttccaatggatcaaagatactaatttgaaagcaaatcacaacacactacgaaaaagggactgggagcaatcagctgtttccaatggatcaaagatactaatttgaaagcaaaccacaacgacacgggttatgtgaacggccagcgtgtggctgtttccaatggatcaaagatactaatttaaaaacaaatcacaacgcaagccaaccgtcaccattcgccccaagactgtttcttgtggagcaaagatactattttaataaatacttaaccttcttcaactgatcctttactcggtaacaccctccgttatttttacaatcaattgttaaatcatttaataaattcatatatcgcatatctatccattcttttatcaatggggcacaaaagtaagtgaactagggaaactttgctaaaaagactataactttacggcagaaaagataaagagacaacaacaaagattgagaatggacctaaaagatagactatcaagccgctgtcatatagaggatatccatgagatattattttatgtacaagggaaccaagaacggaaagcagagctatacgatctgatattcgatccggatgatgccgttagttatcaagcgttatgggtctgtagccatttctcgaccaaggaaaacgaatggctatatgataaacaggatgagctgataaatgaagtgcttagctgtgagcactccggtaaacgacgcattctcttgaacctgcttgtacgacagccccagacgaatcccccacgagtagatttcctgaacttctgcctggaccggatgctttcagcgaaggaattacccggtgtgcaaacgctttgcatgaaactgggatatgagttatgccgtcccattccagagctattacaggaatataagacactactcgatctggcggaacccgatttactacaaatctctttgcgaaccgtacgtaagaacatcttaaaaaaatacgataaaacatgagaaagattttcacactattcttctgtgccgcctccttggccacaggactagcgcaacaagaatcctattttaccaatcccgtgatccacggtgacgtagccgatccttccattatccggatcgaccagacttactatatcactggcacctcctcggaatgggccccctattatccggttttcacctctaccgatttggtgaactggcagcaaaccggacatatattcgacgagaagccggaatggactaagtcctcattctgggctccggaatggtatcagcataaagggaaggtatatgtctattatacggcccggaagcaatcggataacatctcgtgcatcggtgttgccgtggcggattcacctacgggcaagttcaaggattacggcccggtggtagagtttgggaaggaagcgatagacgcatttatcttggaggacaaaggcaaactttacatcagttggaaggcttatggattggataaccaacccatagagttattggcctgtaagttgacggacgatgggcttcgcctagacggaaagcctttcagcctgctgcgtgacgatgagcgtcaaggtatggaaggtcagcattggttcaagaaagacggatattactatatcatctactccgtgagaggctgttgcggcccgcagagcgattacgccgtatccgtggctcgctcgaaaaagctggaaggtccttacgagaaataccaaggaaacccgatcttgcacggaagcaaggaggttctctccatcggtcacggaacgattacgactacaccggacggacgcatgtattacctatgccacgcttaccagccgggaagcggcttctaccaaggtcgccaaccttacctgcaagaggtgagaatgggcgaggatcattggcctcacttcgtaaccggggaatacgcgagccgcacgcaacccatgccatttgccgagtccgcacaagtgccggtattcgatttctcggatgatttcaccggtgctaccttgcgtcccgaatggagttggaactatccttacacggatgtcaagaccgagatcaagaacggtaaactctctctatccggaacaccgaaacccggcgtaaagaccggagcggcactttgtttacgcccaacctccccggattacacgttggaaacagcgatcgtaaaccggaatgacagttggaaaggaatcacgatgtacggagacgcaaataacctaatcacctgcggatgcgcaggagaccgtttgatattgaaatatatcctagaggggaaagaacatccattggccgatcttcctcttcccgcctcgcctttatatctacggatgaaagtgaccgacggtacgcatagcacgttctactggagtaaggatggacaagcatggaacgagatcgtcggcgaagctctctccgcaaaagagacccggtcgttgacccaatgggatcgtatctcccgtccgggattgtatcaagagggagatcctacggcaccggccgtttacgtttattgtctattaaaaaatgaatgatggaatctaagtttcacacgtttgcccaaccgatacaatcgatccccttaccggaacgattcacgtatccttttcactatacaccgcatcctctatgcgtaatagcggctgaggagacgcaggcatacctgaaagaacgaaccgaatggcgggaagagttacaagccggaaaaatgttcggcgtattggtggttcgtactcccgccggagaggtcggctatctggccgcgttctccggtaacctagcggggaagaatgtacatcctttcttcgtccccccgatctatgacctattacaaccggatggtttcttccggcaagaggaggagcggatcaatgagatcaatgcccgtatccgaaccctgcaagcctctccagctctcgaagacgcacggtcgaggttacaaagcacgatcgaatactgcgatttcgtattacaggccgcaaaagacttgatgaaaaagaggaaagaggagcgcgaccgacttcggcagttccctctcacggaagaagagaccgcacttcttattaaagagagccaacacatgaaagccgctcacaagctaaccaagaaatcattgcggtctatactggaggaggatcaagccaaggtggatcggcttgagcaggagatcgagcaactgaagcaagaacgcaagcgacggtcggcggccttgcaacgcaagttgttcgaacaattccgaatcctgaacgcccggggcgaggtgaaggacttatgcgaactgttcgcccctacctaccaaggtgcgccgcctgccggagcgggtgagtgcgccgcccctaaactcttgcaatacgcctaccagcatcagttggaaccgatcgccatggctgagttctggtggggcgattctcccaagacggagattcggcaccatggatattattatccggcttgcaaaggaaaatgcgagccgatcctccatcatatgctacagggattgcgggtagatgaaaatccgttattggcggactctcaccaggagacgaagctggatatcctttatgaggatgactatttgttgatcgtcaataaaccggcgggtatgctttccgtccccggcaagggagacgcggactccgtctatcacaggctgcatatcctttatccggatgccaccggcccgattatcgtgcatcgtctggatatggcgacatccggcttgctactcgccgccaagaccaaagaagcgcatcaggacctacaagcccaattcaagaaccgaaccatccagaaaaggtatatcgccttattagagggtgaagttccccaagatgagggtgagatccgtctcccgctatgtcccgatcctttggacagacctcggcaaatcgtaagcgaagaattcgggaaacctgcctttacacgctaccgggtattggaacggacttccggaaaaacccttatcgccttttatccccaaaccggacgtacccaccagctacgggtacacgccgcccatcccctaggtcttcattgccccatccttggcgacgagctttacggacgaaaggcggaacggctctatctgcacgctgaatatctagcattcacgcatcctatcactttcgagaggatagagatacgtgccaagattccattttctcaacactaaaattgtctattatatccaataactaaacagatactaaagatgagaactatcagaagtaaaatattaatagccatgggatgggtaatgcttattaacgtcattgttttaggcttcttcggcatccctactggtatactactgtgcgccttgataggactagcctatggagtctataaacaagataagcctttccgtctatattcttctatcgccctgattgcgactatcgcctttttcatcgtcttctatatacaacttcaacatatgtaaataaccgtatcaaatccctgtaatcattatggaaacaaattatcaaaagttcttggcgggcgagtattgcaaccatctggatcaagaagtcctgcaaatgatcgtccagacgaaaaacctactcgctcgtttgaacgcaaccaatataaccgacagcgctacaagagatgccctcttacgccaaatgctaggaagcattggcaagtattccagcattgatataaatttccattgcgaatgcgggaagcacatctttattggtgacaaggtcattatcaatatgaactgtacgtttttagacgataatattatcaaaataggaaataacgtcctcatcgcccccaacgtacaattatatacggctacgcacccgataaatgcgaacgaacgcttcgtgaatgattgggacgaacgatcgggggatttatttttcaggacaaaagccctccccatcaccattgaagacaatgtttggattggtggtggaacgatcgtcttacccggcatcacgatcgggaggaacagcgtgatcggggcaggcagtgtagtgacaaaatccattcccacctatagcgtggccgtcggtaacccatgtagagtgatcagagaattacccaaagaagacttataagaacttgccacccattaaaatcaccggcatttcctaggcgctccatgccatgagcatcctaggcaaaatacctctgtcaagtcaaatccggacagatccgtagtgggatctttgggaacgacctccccattctcgtaaacatacactaaaagacgttccccagccgcattctttacatacatagaagggatatcacactgcggacaccgatactttctcatcatctaatcttttctttatctttttataaacatacaaaaacgcaggtatcaagaataagtcagcggcaacccaagccaacggatcaccgaagcaaacgcccaagaacccaaaagcgggaaccgcatacaagctcaccaagacacgtgcgatcatctctgaaacacccgagagcatcgcaaggttgctaaaacctaccccttgtatcgcgtaacgcaagatacacagtagcccgacagccgggaagaaccagcaagaaatatgcaaaaactgctccgtatagtccagtatctcgacctcagatggagccacaaacaacaaggccagccaacgagaccccagcatcaagatcatccatgtagcggcggcatacgtaagcatcatcaacgaactcactttaattccctgcaaaatacgctctggctttcccgccccataattctgtccgcaatacgtagccatggcgatacccaaactctcaaaagcgcaaatgaagaacatcttgatacgggcggcggaagtaaaggcagcgacacaggccgtgcccaaggcgttattggcgctctgcaacatgatactgccaatagcggtaatagaaaattgcaatcccatcggaacccccatcgccaataaggtacgggccagcccggcatgaaaccttcgatcctcagaggaagtagcccgtaagatcggaaatttccgaagcatatataaataacatagaatggcggaaagcccttgcgagaaaaccgtagcgatagccgctcccatcacgccccatcctagcaccaagatgcagaataaatccaagaaaacattcaagaccgtagagaacagcaagaaccagaatggagtcttgctatctcccaaagcccgcatgatacttgccaacaaattatagaagaatgtacaaggaataccgataaaagtaacaaacaaataatcataggccccatcgaagatattcccgggtgtctgcatcccccgcaagatatcccggcaatagaaaccggagacagcggcgatcaccacggacatcaccgtagccaattgcaaccccaccgccacgtaacggcgcatcgtcgcataatccctcgccccgaacttttgagctaccgggatgccaaaaccggcgcaacatccgttacagaatcccagaatcaagaaaatcaccgaggtactggctcctacggcagccagcgaattaatacctagaaatttaccaacgatagcggcatcgatcaaagaataagtctgctgaagcagattccctaataacaatggcatcgtgaaactgaatagaagagggaatacagcacccctcgtcatctcttttgagtttgccatacatctaaattaaaaggataaacaaagaggatagaaaaactgattagtcatcgcaaaggtaacaaccctaaggtaaaacgcaactctctccatcattatttcaaaccggaattcacataaaataacaatgcccatcgtaaggtctttacaatgggcatcgtaaggtgcttagaatgcctattgtaacaggcttacaatgggcatcatggttttcttattccaaagagaatgaataggggcgatcactatcctgcgtacctcgctgtttattaggggtatcgctcatttggtattgaatttttgcgccacctagcaactgctcatgtgtcaagaaattgcgggtgtatgtcttgccgtttactttcatacccttgatgtaacggttctcccgatcagccttgtccgcttggatcaacacctgctttccgttatccagatggagttttacggatttgaacagaggagtacctaatacatattggtcggtgcccggacatacggtatagaagcctaaggcagagaacacataccatgcggaagtctgtccgttatcctcatcgccgcaatagccatccgcctcagcggtataaagtttgtgcatgatctcgcgcacccagtattgggctttccaaggctcgccggaatagttgtatagatacaccatatgctggatgggttggttgccatgggcgtattgtcccatattcattacttgcatctcacgcatctcatggatcataccgcggctatccatacccaaacgactaggcatcttgaagacggaatccatcatgtggttgaattccttctttcctcccgttaagtcgataagaccttgcgggtcgtggaaaacacagaaactccaatgccagctattaccctcgcagaaatcacggctccagtccgtacctttaaaagaagggttgaactcgcccttatcagagcgtccgaccatcaacttatattttgggtcgtacacattcttatagttgttagcccgttgcttgaagatatcgatctcgcttgccggcttgcctagtttcttgcccaaggtataaatcgtccagtcattataagcatattccaaggtacgagccacattttgtccgataccgatattattc

SEQ ID NO: 1101 - DNA, 24563 bp, synthetic construct
  misc_feature 1..24563: note = Synthetic
  source 1..24563: mol_type = other DNA
cctaattcacgagcaattgattttgttaaaccaatcattccggcttttgatgctgcatagttagcttgtcctgcattgccgcgtactcctactactgagctcatattaacaatagagcctgaacgtgcttttaacatataaggctgaacagcttttgttaagttgaatgccgattttaggtttacgttaattactaaatcccattgttcttcagtcatacgcatgaataaaccatcgcgggtaatacctgcattattgattaaaatatctacttttccaaaatccttaactacctgatcaacgaattgttgtgaagcctcaaatttactggcatcagaagcgtatcccttagcctcaacaccgtaagcttttaattcagcttcaactgctttagcgttatcatcgtaaaccatatcagagaaagctacattagctcctgcttcagcaaatttttttgctacctctttaccaataccacgtgcagcaccggtaataatagctacttttccttcaagaagtttcataaataaaatgtttaaatttttaatttctatttaatgacggcaaacatacaattttttttgaaacaacatcatcaataaatatcaaacctgaattgtttataccatacatttattcttgaccggttccataggtatatcgcaaattcgggattctctatatttaatggaggtatgtgaaataccaaatttactttgctaaattcattgctatccgactgtaaataattctttaacgaatatgtattatagtatttgtttgtggtactatcgcttattgataacacaagtaataaatcatcaaccttatcggcctttatttgtgagtggaataatagcgtatggtttgttgtgttaaatatatttatatcattagtcttatatgtagtaccccactcattatctgccgatataaaaccaattttaccaatagtatcaattgtttgtatattaatattctgccagtttgaatttacgctctcttccaaattcagagattcagaaacaattatttcttttttattgaaacccaaaaattcagccaaaagtgtaccatttttggaatatttcgatactgttattctgccattattggcaactacttcaattgtgtttaatatttcggggtatacagagtaaatatcggataaaaagtaactgttttgtgttactatataattataatcccaacttaaacagtttttgatattagtgcattttgtactcattattgagtatccgttacggttcattaagtttaaagccaaatttggagctaaggcatctaacaaaagtattttactgtttgatggaatatttaaagaatcgagaaaaatatcgacgccggtaaagtttttaattgtaatatctgttttgttccagctgcctgtaaggcgtttatcttgctgccactttaccggatacaaaatggatatacccattgtaacaatagctgtaactaataacaattgcttataaaccttattaacaggtatatataccttcgaaagcaataccataaataacaataccaaaggcaaataaaaggaatcgataaaatagtaatcatgcaccgggaactggcgcatcatggcaataaagaaaagtatacaaccaataaaataagctactaacaataaccctaaaccgttattattattttgaatgttttttttgcgccaatagttaacaaataacaatgatacaataactccaaaaaccaaatattgcccttttgaaaaataataccatcggtgatatttatacacttcggttatcaattcttttgcttgtgcaaaatttttaggaggcataaggctgcttaaaaaatcagatccgtattggtttgttaaatatgtgttataaagtttataagtaactataattaaaacacttagcccaataggcaataactttctgctatattctgtttcttgcttaattacacgtaaaaactcaactgacaatacggcgattaaaggtattgcaaatgtagttcgagctaatgacgatagcgtaaaaaggagtattgcaataccaaattgcctatcactcttattatatctgtattgtaaataaaaatagaatgcaataatagtattagccagcgatggaacggtaggaagtaaagcactgtggtagtatactaacaccggcgatgtagctgcaaatagtgttaccaaatatgattttatggtactttttgtgtaattgaacgacaacttatataaaaacaacaatcctatacaaccgtaaagcaatacatatagcctgaatattattgttgacttgattcctgttagtttcatcaataaggcaactacataattgtgaataggaaaatcaaccgccgtaattgttgaattacccggtacttcccaccaattaggaaactgatggttgtaaatatgtgtttggggtttaaaaaagttaaaattattgtcaataaaaccctgtgttattgcaaaatggtcggcctgtgcccaggcatgggttagcgataagtgttcattaatatatttatactgatataatgctgttaatgaaagaattagtaataatggaaatagtagttttcgcatatcggtttatttgagagcaaagaaaaataattttaacctattttctgttcaaaaataatagtttttataaatgattattgcaacaaaaaaggtgctccaaataaatgaagcaccttaaaacaaataactgctatgaaaaaattacttaatgtatactttttcttttataacttctttgtcggtggttacatttactatgtacataccttctgtttcgctgtcgaggttaatggtattgacacctggctcaactgttccgttgtaaatcagagcaccctgaatactatatatttcaattttagcaaccgcttgtgtcgatattagttcaacacttactgttttattgaaagtatatattttatcggcaataatatcagaatcggcaacatcggtaagcgaaactaacgataccttattcgacggctgagataataaattgtcagacgattttgtattaccgtaagccaatacaaacacttggtacggagtattacgcgctataccgtttccgtatgcatcggtgatattagctgaaaggttttgcgaaaagcctgttgaacttttagcaggttttataactgtatagttagcagcatcaacagccatagcttcggctaaatcgaatgaagcggcatcggtaactttaacaagcattacacggtattcggcaacgttagcctcttttgatacaccgttacacattactttccagtcggcaggcgattggtcgttgtaaaccacaacctgaacagtactaatagtacccattggcgaggttaataatatttcgacaggtgttcctactgagcgctggctatattttccaccattgggagttaccggatacaccttatattttataccttctttaatgtaattgcctgcaatatcttttacatttgatggtacattaactgtatcggcttcacctttgcttttaactgttttatgatagaatgttgtagtattttgcaattgtatttcacttggctcataaccttgaggaacaactacaaaaggtattgcattatgaccaaaatttgcaggattctcaggaatagtaaatatcagacgcatatcgctgctgttgccgttatctgaaatatcctgaacaacaaggtcggtaatggtagagtcggaagcataacccaataacgatttgttcgatggcgatgaataaacataaccttcgccatttttcaatacgcttactactattacctgataatacattgaattaattggatcaatactataattattgttatacgatttgtcgcgtactttaatatttgtttggtttgaaccattggggtatattttactatacaccgaagccgatgctactgatgatgagtcaatatttgttatatcccaatcgcggaatattaatattctgtattcttgaatattcgactcgtcggcagctttactgaagccaacagagaagtcggtataactattggtattaatagtatcaaccaaaaccacattttcagcaacatacgaagggacactcaatgttacactgtttgttgaatattggaatgaagggtttttataaaactcgttattataagcaactactatggccttgtattcaacacctgtttgaattaagtcgccatctgtatcgaacatatcttcttcaaacgccacttcgtagcttgcaataccggcagtgtcaacctcaaaataatatccaatattactagccgacttaacaggtaaactgctgttaaccattaattcatctactctattgatagttgcagccgaagctttagcaataaaaaccttgtatttagaaatattttcttcgctaacaggagcattccatgatactttcaggtcgttaccggtgttggtgttattaatatcagacactacaacatttgatactttaggtaactcttcaatattggcagctattccggtttgtatttcggcattgcctattgtattgaaagcatagtcttttagtgttagttcaaagcctccgttttgctttgttacaacattaacccttgcccaaccatagtttcgtttgcctgtttggttattttgaacatacatacctataaacttatcgacaggggtattgaaataaccaatagaatcgaagttaaactcactaaattcaggagtgcagcttgcgcatgaataaaatttattatacactccgcgtaaagttgcggcgtatttacccattttaccaaatgatcgtattcctacactgtcggcgttagcataagcattatacactccctttttgaaatacttgctagtaatgcggttgtcgttgtacttcagtggtttaatcatggcacctttaattacagcaccatatccatatgaaccattattgtttttccaaacttccttttctactatacccagcgaaaaatcggcttcgccatcgttgttaaggtcaaggtcgtaaaaatcgccaaggttggtaagtgttacatcgtcaaggtcggtataagtaacctgagcacttgccgctacaccggctaaagtagctcctgccaatgcagtataagcctttaaacgggttttagttgtttgttttctcatgttgaaattttaaaatattaaaaggttaatcaattttgcaatgcaatattacaccatttttatttatcaaaaaatattattaaagtaaaacattatatttttttaactccggctttgcttcggtacaacgaaggttctacaaccctttctacaacacctgtcggtagttgttttcctaaaaacttttccaggtttttaattatttcagaaggtgagtttactaatcctgaataatcaacatttaaaaagtcaacattgcttctttttttatgccactcttcaaccttttcaatattttttttgtaggctatttcaaggtgtagcgggtagtttttagtttctgatacattattttgaaccgcaatcatatgttgttgtgaagcaataacctcttcaatacttcggttcataaatattactttatatttttggttttcgggcaagtgaaacagcaactgacttataattttcacaaccttaccctttgctttaggaatccatttactgtcggcagcaatgttttttaccggttcatattcgtagtatcctttggggttactctcgtcggctgtacgttcgttgtcggtaagtatttggtatccggcagcttcaagcaactgcatcattagtgatgttcccgaacggggtattcccgataccactattattgcatctttctctttattttcaaaatattgagccagttctgctgctcttggtatatttgggaagttattggtatatatttcaataagcaggttgcgagccatggctaattccggggtcatatgcaaacaaacctctaacgcttgtgctgcattttcataatcgtgaagctcatataatgctttgcctagtatgaggtgtgctttagggagtttataaattcctccaatggcatcgagagccgattctactgcgttgttgtatttttgttcgtcgaaatagcacgaagctagaagcaagtgcgctgaggtgttgtctgaatctttagtcaaacatttattacactcttctatggcattttcatatttattgagcttagtatatacccttgctttttgcaaattgacacgggcattgtttggcattacaccttcaagcgtaatatagttttctaaagctttattgaattttgcttgtcccaacaagttgtttgattcaagcattaagagagtattcaacgatattttccactctttggctaaagtgcttttatcgtcggtattttcataacgtttaacaaaattattgtgttcaattttaagtttttcgattaattgctgcgatttatcgaactccttaacaagctgatatacctgagccagccttatagggaaacggggttctttggggtatttttgggtaagttcttcaagtatttctattgctttgcttagtttattggtatgttggtaaatacgtgccaggttaaacttattttctttagcagcagaatctacggcttgttctatgttttcgccggggttgtcgatatatcccaaatcaataagttgttttaattcttccttagttgtaaaatggttaatctctttttcggtatttccaataaaaccgctatcaccttcaacctcatcccacgagtcgatataatcaattttaggttggtttatgtaaattgatgaaagtaccttgccgtccatatcgctacctaccggcaagccacaagcattgagtatagttggtgctatatcgagcaaaccggctccatacactatttcatctttggctattccggggcctttggcacaaaatattccaaactggcgatggtcgtaagctatacctgccggctcaagtgggctttttatatttcggcgagcatcgttctgaaaaccatgatccgatactatcattactgttgcatcggtaccggcaaggagcaacagttgcccaagcatcatgtcgtgataaatataaaacccttcaactacgtgtttatacaactcaaaatcgtggttggaaacactgtcaagttttggtggaaaatatttcataaactgatgacaaatagagtcaatagctctctgatacactgttacaaaatcccactcttgattttcgagtatatatgttgctgccgaatgatagttggtacattctgaaagcgcagagcttacgtatgtaaatctacggtcgttatctatatctattttattgatatcgggaataaaaggctccaatatttgtttcgtaagcaggtatggcgaaatacgaaaagcatcgaacatagaagcagcctgtggcggatatactgttcctggtattataggctgtggtatatggtcattaaacttcataataccgtacatattcgatatcgaagtaccattaagcggttcggccgggtgcgaagcccaccagcctatttgatggcatttgtaaccattttgctggagtatattccatatagctttggtttttctcgaatgtgttgatgagggtactattccgccacccattgacgatgcttcggtaaaaccgagtacaccatgcttgtcgccggttttacctgtagctattgagttccacaatatgggcgatattaccggttcaagtgttgctatattacccattacaccattattgataatactcgataaagcgggcattttacctgcatcgagcagtgggtttattatttcccagtcggctgcatcccagcctattaaaagtactttacgcttattcatttgccttagcatagttttgtttatcaatttctttttgtacttcctgtttccataccattacacctttgtatcccgaagccagtattccaagcgaaccggctgctgttaccttaatttttcgaccattttcatcgaaaaagtgaaacgggtcgctcaatattacctgtggttttggtttattgttattcatattttaattctttatgcttatagtttacactaaatgagaaatagcgttgttatttatttatcgcgtactatcttagccggcactccatatgctacaacgttatcaggtatatcttttgtaacaagtgatcctgctcctattgttgagtttttacctattctgcgaccatcaattacattggctcccatacctatggttacaccctcctcaatacggcaaaagcctgcaatattacacccggggttcaatgttgcaaaatcgcacaccgtggtatgatgccctattgttgcattacggttaaccgatacatgattacccaaaacagcatacggagctataacagcacccggaccaatagtaacaccagttcctattatattagtttttgaaataaccgatgtgggatgatacagattggtatattgttcatggtttattgaatagttatcgttgaaaaacgcaaatattttttgttttattttggcaaccatagtaccaagaattatctctgaatcaatttcgggaatccactcttcatgtttacataccgcgtaagggataccgtcaacggcaaaagggattttctcgtcgagaagtttattggcctccattattgatactatgcttgttgacacattgtgcttataaatagtatgcaatgcttcataaaacattgaaagggaggcattatcgtgtccaagaaaggttaatttatacattagttctgtttttattgtaaaagccgagttctccaaactcgttaggtttcattatttcacgttgtgttaattgggctatattatgtaccctttttagcaactgtatattagtagctttttcgcctgttttataatcgaaaatagtattatcttccaaacctactcttacccccatattatttgcaatggcggtaacgttagccgatagttgaaattttcctatgcctcccaaagcacaataactattatgtggtaaatctttgagcattatacccagttgagccaaatccatttgtgccgaagcaatattaccaagtataatattgtaataaaatggtgcgttaattacccctttttctataaggtattttgagtagttaatcatacctgcatcgaatacttcaagctcgggctttacaccatattggttcattttatctaccagccggcatatcatatcgggcgagttattgcttgcctgtgttgaaaaattgagtgagctaagtgttaacgaagccatatcggggtatacttcaagtggttgtgaacgttgctcaaactcggtaaaatttcttccgctaagtgaagtacacactaccagtgcggggcagtgtttttttattccttcaaccatacgggcataagtggtgcttttgtaagtaggctcgccactatggttgcgtgcatgcaaatgcactatagttatacccagttcataagcctggtgtacttgttctattatttcattggccgattcgggaacacatattccattggctttacgcggtactattcctgttggtgtaaaatttattattaacgggttcatttaaaaaattctttggctctttttcgagggcgcaaagaaagtattatttgttaaataatacaagatactactgtactttttgcggaaggtgtcaatttattggcattttaaatgttctattcaccaataaaaggtattctcaaaacatttataaaaaaagccccaaatcccgaaggtggttgaggcgaccaaatgttattcacaacggaataatccttattgtgaattgcttcaaattgttctgctaatttacaatattttttttaacacacaaccgttacctattacttttttttatacatttaatgccattaaaatttaacatctaattattccacaataaaaacaattattaaacaatagaatatgaaaaaaatattaggtcttgatttgggaaccaacagtattggttgggcattgataaatcacaacttcgatagtaaagatggcaatataattgggctaggcagtcgtattattccaatgagtcaggatgtattgggtaagttcgattcagggcagtcaatttcacaaaccgctgacagaacaggctaccgaggtacacgcaggttatatcaacgcgacaaccttagacgagagcgcctgcaccgagttttaaatatattaggctttttacctcaacactatgctgccgatattgactttgataaacatttgggacaatttaaaaatgataaagagccaaaaataaactactcaaaaaatgaaaccggcaggtttgattttttgtttacagactcttttttagaaatggctaacgattttaaaaactcagggtatagcgataaaataccttatgattggacaatatactatttacgcaaaaaagctttgagtgaaaaaataagtaaggaggagctggcttgggtaattctaaactttaatcaaaaacggggatactatcagttgcgaggcgaagaggaagaagtagacgaaaataaatcaagaacatttgaaacacttatagttgaaagagttgagcaaaccaatgaggctattaaaacgagcggtgacaaactttacgatatatattttaccaatggttggaaatacgaccgccaaactacaaagccaggtgattggttaaacaaaacgagggagtttatagtaacaacatcaaccacaaaagacggtgaaattaaaagaacctataaagctgttgattctgagcaagattggattgccataaaagcaaaaacagaacaagatattgaaaaatcaagtaaaacggttggtgaatttatttacgaatcgttgctgcaaaaccctaaacaaaaaataagaggcaagctggttcgaaccattgaacgaaggttctacaaaaatgaattaaaacaaattttggaaaagcaggttcaatttcataacgaattgaaatcgactgctttatacctcaattgtataaatgaattatatccgcacaatgaagctcacgctgctaatataaaagataaaggatttgtgtacttgtttatggacgatattattttttatcaacgcccgttgaaaagcaaaaaatcgaccattagcgaatgtacttatgaaacacgtacttataaaaaagtaattaaagttgatgaaaacggaaatactataactaaaacaattgaagttacccaaggtataaatgccatttcaaagtcgcaccctttgtttcaggaatttcgtttatggcagtttttgagttttttacgtatttacaaacatactctacaaggcgaattggatattacatctgaactaattgaaaccgaaagcgattgggttgaattatttgattttctcaattgccgccacagtgttgaacaaaagcatatttttgaatatttttacaaaaagggggtgatacaaaaatcggatatagaaagctaccgatggaattatgtcgaaaaaccttacccttgtaacgaaacccgaagccaatttataacaaaacttaaaaaagtagaaaacctaatccccgaagtgttcttaaccaaagagatagaacagcacctttggcacattatttattcggtaaaagataaaaacgaatatgagcaagccttaaagaaatttgctgcaaaatatagtattgatgaaacttcattctttgctgcatttaaaaactttaaaccattcaacaacgattatggtgcttattcatataaagcattaaacaagttgctgccattaatgcggataggtaaatactggaacgaagaaaacattggcaattcaactttaaatagaataaacaaaatacttactgccgagtacgatgaaaaaattgcaaatcgtgtacgcgaaaaagctattaacttaaccgatattagcaactttaaaggcttgcctgtttggctggcttgttatgtggtatacaaccgccattccgaatcgggcgataatactaaatggaataaaccgtctgatattgacaaatatttaaatgaatttaaacaacacagccttcgcaacccaatagtggagcaggttgtaaccgaaacattgcgtactgtacgcgatatatggcaacattatggcaatagcgctgaaaaatatttcaatgaaatacatatagaacttgggcgtgaaatgaaaaacccggccgataaaagaaaacaattatcggctcgaaatatcgaaaacgaaaatacaaaccagcgtattcgtgaactactaacagaattaatgaacgacgacttaaccgaaggcgatgttcgcccttattcgcccagccatcaggaaatacttaaaatatacgaagagggtgtttaccaaaatcctaacgccgatttttcaaaagtaagtaacgatgatattgacaaaatacgaaaaaacagttcgccgtcggtaaacgatataaagcgttataaactatggcttgaacaaggttatcgctcgccatataccggcgacatgattcctctgagccgattgtttacatcagattatcagattgaacatattatacctcaggcacgatatttcgatgattcaatgagcaacaaaattatttgcgaaagcgaagtaaaccagcttaaaagcagcatgacagcctacgagtttttaaaaaatccgcctttgcgaagtgtaactttaaatggtggcaaaattgttaatctgctttcgttacaggaatatgaaacccactgcaaccaatattttaagcgaaaccgcactaagctcaccaaactattgagcgaagatatacccgaaggatttattgagcgacaaatgaacgacagccgttatataagcaagctggtaaagtcgttacttagcaatattgtaaaagaagatgacgagcaagaagctacttcaaaaaacattgttccggttacaggtgctattacatcaaaactaaaacaagactgggggttaaatgacaaatggaacgaaatagttgctccacgatttatgcgattaaatgaaattacaagctcaaataatttcggatatttcgataaagagataaatgcgttccgctgtgaagtacccgacgatttaaaacgtaatttcaacaaaaaacggattgaccaccgacatcatgccctcgatgcattggttattgcttgtactaccaaagaccatgtgaactatattacatcacttaacactagccgaaccaactatggactggttagtaaatttcgcaaaattgaagaacgtcaaattaaagacaaaaaaacaggtgaaagtaaacttataaaagtacctacacattatttattaccttggatttcgttctcaacacaggctttaacccatttacaaacaacagttattagcattaagcaaaatacacgagtaataaataaaactaacaataaaacatggaagtgggttgaaaaaaacgggcatctgaaaaaagaacttgttaagcaaaccaagggcgacaactgggctattcgtaagcctatgcacaaagaaaccgttagtggtgcggtgagtgtgaggattaaaaaagaggtttcatttattaatggtattaaagattgggaaaatttggttgataaaaacctaaagtcaaaaattaagcaactatacgctgccggaaataatgaaaaagctgttgctaaatactttaaagataatccatatattattgataataaagatgtaaaaacagttgaaatatatacttacactcaaaatgcaactgctgtgcgtaccatgcttaccgataaacttacccgtaagcaatttgatagaattaccgattcgggtattaaaacgatacttgaacgccatttgaaaaactatacccttgaaaacggaaaagaacaatttgaattagcatttaaccccgatggtattgaagaacttaataaaaatattattgcattaaacaatggaaagttccaccaacctatatataaagttagaatatatgaggagggtagcaaatttaacgtaggatatactggcaataaacatacaaaatatgttgaagctgcacagggtacaaacctgttttttgccatttattggaacgttgaaaaacaaaaacgtgagtttgaaaccatacctttaaacatagttattgaacaccaaaaacaagttgccgctttgccaaaaagcgaacgcataccggtacctgttaatgccgaaaaaggtaaattattgtttgtactatcaccaaacgatttggtttatgttccaactcaatcagaattagaaaaccctacaagtgttgattttggtaacttaaataaggaacaggtaggtagaattatgaaagtaaacgatttttcaggagttacctgctattttacacctaatactttatctattgctattgcaccaaaagaaattgactcaagtttcgataataaaacagctaagtttgaaaatgtatcaataaaagatgttagttggaaacttgaagttgaccgcttaggaaacattacaaatataattcgttaacacaacatattttgtggtgtccaaaaagtcacggggtgaatagatttgttagaattctcaaatgacaaattactgtattgcaaataattagcaattcaccccttgactaatctgaagtttttggacagccccaaactaaaatatcaatcctcatgattaaaagaacattatttttcggaaacccgtgctaccttaaaaagagagatgcacaattagtaattgagtaccctcaaaataataactcatcggttaatagtgagttaaccaatgtaagtactaaaccggaatcgaaaaccgtacctattgaagatattgggatgatagtgcttgaaaatcagcaaataaccattacccacggacttattagtgcacttatggataataatgccgctatactttcgtgcaatgcacaacaccttccttatggcttaatgctcccaatggctcagcaccatgcatttaccgagaaaatgaacgcccagcttgaatcgagccaaccactaagaaagaatatgtggcagcaaacagtaattgcaaaaattgaaaatcaggcagccgtactgcacagccttggaaccgatattgaaaatatgctatactgggcaagccaagtaaaaagcggcgaccccgacaattacgaagcccgcgctgcggcatactattgggacaatatttttgaacaatacgaatcgtttcgtcgccaccgatacggaggagcacccaacagtgtattaaactatggttactctatactccgcgcaattgttgcacgttcgctggtgggcagcggattatttaccgctttaggtattcaccataaaaataagtacaacccttactgcctagccgacgacataatggagccttttcgtccgtatatcgacactattgtacttgggttaataaaagaggggttgcagcttcaggagttagatacaactgttaaaacccgtttgttgggcatagctactatcgatattaatattgaagggcaaactagcccgctaatggtaggtgtacaacgaaccacagcatcggttcgcaaatgttttgaaggagaaagccgaaaaattgtatatcctgttttataacccatattatttataaaaaaaataaaacgcagaatgtacaccgattaattattattcgccatgcgccaaaatgaattaacccgattaaaccagtatagaattatgtgggtatttgtattttttgatttgcctaccgaaaacaaaaccgaccgcaaacatgccggtaaatttcgcaaatgcttacaacaagatggttttgccatgatgcaattcagtatatatattcgccactgtaacagccgccaaaatgccgatgtgcatatacaccgggtaaaatcggtattgccacctaaaggggaagtaattgtatttactctaaccgacaagcaatttggtatgatggagttctttaaaggcgaatcggtaacaaaacgccccgacacaccacagcagctcgaacttttttaattataaaatattagaaactaaaaaagccgctttccataaccggaaagcagctttttatttatagttttttcttttctatatttatagctaatactttgattatcggacatatacccttgggtatgctgtgctaaatatatcaaagaacaatttgaaagcaattcacaacactggctttctgcgtcatcgaatacgcctggctgtgctaaatatatcaaagaacaatttgaaagcaattcacaactgcgaacccctgctgtaaaactgaaaactggctgtgctaaatatatcaaagaacaatttgaaagcaattcacaacatacgcaactaaacttagccaagccatacgctgtgctaaatatatcaaagaacaatttgaaagcaattcacaacgcttttaaaatacaagttccgtcaatcgttgctgtgctaaatatatcaaagaacaatttgaaagcaattcacaacacttgtaagtgcctgtactatcagcgactagctgtgctaaatatatcaaagaacaatttgaaagcaattcacaacaataggagcatttacaagtttcataaaaaagctgtgctaaatatatcaaagaacaatttgaaagcaattcacaacaggtggaattactgcattaagatttattgggctgtgctaaatatatcaaagaacaatttgaaagcaattcacaacaaatcatcaagtgtagcgattatataaggggctgtgctaaatatatcaaagaacaatttgaaagcaatttattcgctgctgattctattttttctatcaacatattgaatgtcaatattataaacaaattatcagtcaataaaaaaagcctctcaatactgagaagctttttgcggtctggacgagactcgaactcgcgacctccggcgtgacaggccggcattctaaccaactgaactaccagaccaatggtaattatatttataataagagtttaataagcggtctggacgagactcgaactcgcgacctccggcgtgacaggccggcattctaaccaactgaactaccagaccaaactcttaattaaatcatcacttttcagaactgtgagatgttctcatctctatcgctaccctttatttctaaaggcgatgcaaaagtaatctattttttattaaatacaaatatcaatgcttgttttttgaaaaaaaatcaaattattttcatctacttccaaaaatttctatctacagtttcttctattctcttttcaactttattgggcagtaaatggtacaaatcaatttttagtatttgttcaatactgtcaataggagcagagtagtttaaaaaatcatctgtaatatttgaatgtggaaaaaagaatgctacagcttgctgaatagtatcgttgtacacaagtatggttttataaaagtgagtaggtactgttacattctcaccaattgaaatatcggtattctcaaaataaggcccggtacatatataaatactgtcgtacaactctgcccaaactcgtgtttgctcttcaatacttttccacacaccgcgattaaaagatgggagttgtggcgatatattactgaataaaaaagtctcttccaatgcctgctcattccatattcggtcggccgcaggaaccaaatgcccgcggtcgtaccccgattttttataatcgttattagtagctgttactattgattgaacagtatcaggtgtaaacttatttttacgcgtataattcttatctaactgatagtaggcaagcttataagcaacccaatcagcttgtttggtattttggttaaatactagtgaataacttgaatgggtaacatagttatctgattttttcagcttaggctcttgtatggctgtttgcttgttaacactgcaagccgataaaactatgaacagtacaaacgataaatatttcaccattacttaaaaaaactaaaatttacttttccatatttcttttgcatccaaaagttgggatgattgctaaggttagtcccctccgaatgttctacaataagccaaccgtcactattaataagctctttgccaaataccatttcaggaattttttctatcccttccaaatcatacggagggtcggcaaatattatatcgaatttgcgcttacaggtttttaaataaacaaatgtattggtctttaccgcttgtatttggttggcaatatttagctcatcaattgttttttttataaacgaaaaatggtgataattaagttctatacttgtaatatctgcacactcacgactggcaaattcaaagcttatactgccggttccgctaaaaaggtcaagtacgcttatttcatcaatactgaaattgttttcaataacattaaacaagctctctttggctatatcggtagttggccgtgctctaaaattcttaggtggatttatttgtttgcgtctgaattttccgcttattatccgcattgataaagatttaacatatttgtaaaaaaatggttaggatactcattaaatccataactgtactcaaaatggtcggggtgttccataaaattcacatatttaaaataccgctttactatttcaattcgtgaatcgtttttttgcactagccctgttattacaacaggaatatcaactgccgacagttttagctgctcaaatacattgagcaaaaaatactgaaaatcgttattatttgtatatgcaaatgaattgaatagcttaagttcagcattatcgatccatgctacatcgaagaaagcctgatatatattaagaaaaacactcctaagattattttgcgatttgtttttcagaattatctcttcaataaatgggcaagcctgatgatatatggttacattatgatatttgcttttaaagaaagctgaaattgcttcgggaatacaataaataatttccgattcattgccataaataaaatttgtttgtattatttcacccttacttagttcatgattaaacttaaaaaaatcttcaccggcaccctcttcatagtacgacgaaggtaccattgtggctttaggtgtggcaaacatcagttttatgtgttgatagttgtgttgtagctcagtagagttgttgaatatatcttctatttcactcaataagatattgtacgacttaattttattgtaataatagtgcgataaggcaatgtatttatttcttgacctgtcgagtatgcaaaaagaaaatcccttcgggtaaacctgaagggataagtgataatttgcaatattattattatcgaaagatttgtcggtaaaacggtaactttcaatcaaaatatcaaattttaaagtaaaataattactcccagttacctgcagagttgttagtttcaacaagagaaccaacttttaagcctttatagtcaaggccatcgttgaaatttataaccatttgcttgtcaaggtcatgaagtatgtatttgcttggagcttttgcttcaaatacatttacaattaaacccgaacctgttttaatagttccttgtcctaatgcaaattgtttgcctaatgcaaatgggataaaacgcaatgagtcaattggatagccatcaacaaaaagtgaatcaagaacattaactttcatagtgtcacggataataagcccttgtttaatagcctcacgctcagtgattttgcctagcatatcttcaggtatttcaccttttttgaatataataggtagtgaatcgtatttagcaaagtttattaacgtatcaaagctaccggtaaattttccgtatacttctttgtatgctaactctaatgtgcgaatatctttaagattttgaattacctcagcataacgcttctcttgttcctttttaaattcaataggtgctgtaatgctatttactaacatatatgccaacaaaagcataactgctgccaatactacctgaattacttttttcatctgtttttgattttatcttttttaataaatttaaaatacttatttcacattagagtaaatgcaaagaaaattccataaaataaattttactttgcgtatgtttggttgcaaatttaaaaatatttttagttcagcaattataaggctgtttaatttcaataataaatggtaaaaaatcatattaaggatatttttatctccaatctgaaacataaacctacaaagaatcaaagtgaggcttttgaagctttagccgactttgtttgggattattcaaatcctaaagccgaccccgataaaatatttcttttgaaaggatatgccggaacaggtaaaactactattataagtacaatagttaattctatgcccaagttgcaaatacgaacagtgttgcttgcccctacgggtagggcggccaaggttatttcaggatattcgggtaagccggcatcaactatacataaaaaaatataccggcaaaaagcaattactgacgggataggtgaatttgtgcttgataaaaatttgcataagcgaacgctgtttatagtcgatgaggcttcaatgttatcgaacggaacaggcgaaaattcggtatttggtacaggccgtttgctcgacgaccttattgaatttgtatactcgggtgttgattgtcgcttaattttggttggcgatgtagcccagttaccacctgttggtttaaatataagccctgcactcgaccctcaagtaattaagagtatgggttttacagttatttgtaaagagcttaccgaagtggttcgtcagcaaaagcaatcgggtatattagtaaatgctactaaaatacgcgaacaaatagaagccgataaaggtggataccctatacttgagacagaagagtttggcgatataattagaatatcgggcgaagatttaatacaggaaatcgataattgttacaacgaatttggaatagaaaacactatggttgtttgtcgttccaataagcgtgcaaaccggtacaatgaaggaatacgtagttctattttgtggcgcgaagaagagttaggtaccggcgatcagcttatgatagttaaaaacaattacttttggctcaaagatcaagaattgcaaaataccgactttattgccaatggcgatatagccgaaataacccgaataggaaaatacaaagagctgtatggcttccgttttgccgatgtgtcgttaaagcttgccgattaccccgacctggaaattgatgcaaaaataatgctcgatacacttaaaacagaaacagcctcgcttagccgcgacgacagtaaccgattgttttacacagtacttgaagactatgcagacgtaaaggcaaaaaaagaaaaatataaaaaagtaaaagagaacccatacttcaatgctttgcaaattaaatacagttatgccataacctgccataaagcacaaggtggacagtggaaagctgtatttgttgaccaaggatggctcaccgacgaaatggtagatattgaataccttcgatggctttatacggcatttacccgaccggttgaaaggctatatttggtaaattttaaaaaagagttttttgaataatatgtttaaattgcatacttacttacattggtttataatttgtgaattagagactaaatgtatgtagtgttatgcaattaattaatgaaataattatatgacaaaacttaaaaacaaaagagcaaacaagcttattgataaagtgaagtttataaaaacacatttgctcaccgatatatggaaattggaaacaaaaggattacccgtttttaaacgtatgtatattaaccttttgcgaagttttgtattggcataccgcggttttcaggaagacaaggttcaattgcaagctgcttcacttacatttttctcagtactatcggtagtgccagttttggctatggtatttggccttgccaaaggttttggtatggaagataaaatgcagtcgatgcttcaggatacattaaaagggcaggaagaggttgccgcatggcttattaacttttcacgtaatatgcttgataatgtaagtggaggttgggtatttggaattggtctctcttttttattttggtcagtaatgaaagttttgggcaatattgaaaatgcctttaacagtatttggcaggtgaataaagggagagtattctttcgtaaattcagcgattatttctctatgatgttggtaacaataatactatttgtactatcaagtagtactcaggtattaataatacaaatgatagataagataatgagtgaaataactctgataggtttcatgcgcccgataatacatattggaatgaaatcaattccttatgtgcttgtatggctgttatttacattagtatatatggttatgcccaatactaaggttaaatttgcatcggctctgcttgccggagtaattgcaggttcactctttcaggttctgcaatggggatattttcatttccaaataggtgtatcgaattacaatgctgtgtacggcggttttgcagctcttccattatttctagtatggttaaactttagttggctaatagtattgtttggtgccgaaatatcgtttgctgctcagaaccatagaaaatatgagtttgaaagcgatattaaaagtatgaaccgatggtcgcatcgtattgtaagcgtatatatattcaatgaaatagttcaaaatttcctcaaaggagagccgccgttaacttcgccaaaaatatcggagaagcttaaattgccggtgagggtagtacgtcatattttatacgaacttgttgaaataaacatgataatagaaacccccggcgatgtaaacaaggaatcatattttatcccttataaagatgttcacaatattagaattcaagatatagtacaacaacttaatcgcaaggggaacgatatattatttgtaaatcaagaagatagagtgctaagtgaaattattaaaagctttaatgaaactgataatatccttaaccaatttaaaggaaataagctgataaaggatatttagataagctcaaaatataaattgttactaccttaattttaatattcgcttttttggcaaaatatttttactaaaacataaaaagtcctgataatcaatacttgatacttgatactcaatactcttatgttcagtttaggtattaaaaataatatttaatatgcacatagctatttttcattatcatttgaatccggggggtgttacccgaattatagagtcgcaggtagccggaatcaagaaaatatatcctaatactaatattaccgttattgcagggcactgtgaaaacgaagagtattataatgccttggatgttaatgttatagtagaccctgtttttaactatctgttcgacagagaatttaaagcaggcgagctaagtaagatatacaatatcacatatgcaaaattaaaagcaatagtatcggaaagtactattcttcatgtacataacattaatttgggtaaaaatccaattgtaaccttagcggtaaatgcattgctcaacgaaggctattcggtagtaaaccatgcccacgattttgcagaagaccgccctgtaaatatggcttatttgcaaaaaattatagaaactgaatttggtaagagcctcaatagtattatgtatccggcaagtgataaatatattattggagtgttaaaccggttcgattatgacagagttatcaatataggagtaaacataagacgggtttttttatttcccaatccggtatacgtaccattaaatgaagcaccccataagcctacaaacagaaataaaataatatcagaatttgatattgcccccgacaaaacaataataacatatccggtacgtattattaaacgcaaaaatattggcgaattgattttattatcagcactttatagtaatatacaagtgcttgtaactctgcctccgcgaaatccggttgaaatagaactgtataaaaagtggaaagaattttgcaataaaaacaatattgcaattatttttgaggcgggtgaacgtgttaattttattgatattatttccggttccgattattgtattaccacaagcattcaggaaggttttggaatggcatatttggagccttggattattggaacaccggttataggccgtgatattgaatatattacaaccgatttaaaaacagaaggggttcaattcccgtttttatataatggaatatattttaatggaaactgtgaattttcagaaatggaaacgaaagagcagcaagcctttattaccaatatattagcaggaaatattacagtaagtgattttgaaaaatcaaataaagtatttgaaaattttccacccaaagtaagtgaagtaacggttaatgaaaatcgtgaaactattattaaaaatttttcagtagaagaatatgcaaaacgaatatttaacgcgtataaaacactacctcagtagcttagaggaattaaaacctatccctacaaac

SEQ ID NO: 1102 - DNA, 24563 bp, synthetic construct
  source 1..24563: mol_type = other DNA
  misc_feature 1..24563: note = Synthetic
gtccaccgcaccttctaccggcggcacttcgtttacgcttaactcgggcgaaatagagaataagggcgttgaactcaccctgcgcggaacgccggtgaaaactaaagattttaattgggatgtaactattaattattctgccaaccgaagcaaaatattatctatttatcccggattggcagaaattgtagtgggtagccagtttggttattccaattctactgtaaccatgaagtatgtgccggggcaatcggcaggcgatatttttggtacgccgtgggcaagatataatgatacaaaagatcctttatattctgataaaagcctgcctttgctgatcggcgatgatggcttcccggtgctaacaccttattctacacaacgcgtgttgggcaatgcgtatccaaaatggattggctctattggtaacacctttaactataaaaactggagcctgtacatgctttgggatgccaggcaggggctggagaagtacgaccagttctccaactttatggcagcatttggtatatctgagataacactgaacagagaccagacgattgtatttgatggcgtgctggcagatggtaccaaaaacaccaagcccgtttacctggggcaaggtgttggcccggatggtgtggactatagtgccggctattaccgcaaccgataccggggcattgccgagaattttgtagaagatgcatcgtgggtgcggctgcgatcagcttcgctgtcttatacatttcccaataaaatgtttggcaactctattgtaaagaacctgagccttggcgttacgggcaacaacctgctgctctttaccaaatacaaaggcttcgatcccgaatcaagctctacgcctgcaggcagcaatgccaatggctttgccggctttacgtatcctgccttgcgcagcgttgtcttctccttaaatgttggcttttaaaaagaaactacttatgaaaaaattattgcgatatagtaccgtttgcctccttttacttaccgctttcggcagttgtaaaaagtatttagacatcaataaaaaccccaatgcggccgaagagccgcccataagcggcttgctggcaaataccacttacaatactgcttatgaagtgtacagtgccagcaactatacttcgtattacgtgcagtatttagcatcgcccaaccctgccagcgatgtggatatatataacaccgttgaccccagcactacatggtatcgcttttacaacattatgaccgatttgtatgatatgcggaaatttgctgtgcaaaaagggcaaaccgatcatgttgccataagcgatatactaatggctttgcacatcaatatggctaccaacctctggggggatattccctatagtgaggcatttattggcgttaataacttaacacctgcatttgataatcagcaggctttatttgataccgctttaaatatgcttgatgctggtattacccttttgcagccgataaacgatacaacaatagtagactctaccagcgattttattcacaatggacaaacttcggcatggcttaaaacagcccatgctcttaaagccagaatgttgaatcaactatctaaaacgaactcttatagccctgatgcagtactggcagaactacaaaatgcttatacttccaacagagatgatgcacaggttacttcttttgaagtacgtaatccctgggcgcaggtagctttagataatgcaggcttggaccttgatggctggctgtctgcttattttgtaggagttaccaaagattctatttatgatgtatttgaccccaggcttcccttaatagggaccattacgcgttatggtgactatcgcggcacaccaaacggtaaagggcgtactggtaccggtaccgaaaataaagaaagctatcttgccgtaggtggctggtattcctccgataactcgcctttgcagattattacgtattcggaatgtaagtttatagaagcagaagcgcaatttagaaagggcaataaaaatacggcttatgcagcgtatatggagggtattacagccaatatggaaaagatgggcgttgctgaaactgccattacagactataccaccaatcctgtggtggcggtaggtgcggatgcacttaccctgcagcgcatcatggcagaaaaatatgtagcttgtttcctgagccccgtaacctgggatgatatgcgccggatggattatgactacaaaggttttatgctgccgcaaaatgctgctttaaacacctttatccggcggttgagctatccggtaaatgaatcttcggccaacagcgcccatgtgccggacgtgcagcttacagataagttgtggtgggaccaataatgtgagtagcgagttgtgaattattgtaggtcgaaagcttaaaataagtagtgttgaaggcagtgtgaatacaatatgtgaaggacataaaaaattagtttataaaaaagtacctggattttaaattcaggcacttttttatatgtattatgactataaaatacccggtatgaacaggaccaaaccaatgtatagcttgttaagcgcttttttattggcaatatgtattgcatttactttacccgcctgtactgccaaaacagatgatgcttccattcagcaacgggtgaatgaggaattgaagaaagaccgcgcaggtgcggcattaaatgcaacagtagataacggtgtagttaccattaccggtgagtgcagcggcgataactgtgcgcaagatgtagccgacaaagtaagaaagatgcagggcgtaaaggacgtgcaagtgcaggtgattgccaaaccttagtatcaatttttatgaagcatcttccatagctcccgaactgatctcaacgggttgtttgcaattgttaccacacgcaaagcaatgccagatttgttctgcagcttttgttttattgccaaacaatttattgattaatacagcaaacagattagtctctttttgtggtatgtcaaccatttggatctcgtggctgctgcaatgggggcaggcataatgcggatgtttattgcctgctgcctgctttaatatttcgacagcacggggcacctgcacttttgccaccatcagtttaatgccgccaaccgcattagcaagtatcggatcaatcgttacagtgtattcatccttcagccagcaattgatgtgctgctgctgcaaattgcccatagcgatatgcgcttctacataattattgaaagactgtacgggaataaattccatattgctcatgctttagtaatagcttttacatttataagaaaagatatacaattaatagttcacgaaaggttaaacctatacgcgccgtttgagcggcgggtaatgcggtgtaataccattctcaaataagttacactgcataagctgcaagcaggaagcttagaagtaagtatttgccggtgaagaacaccggcaaaggcatgaaatactattttcaattaagttgccctatatttaagctgcaagcgggaagcttagagctttgagtcaggcatatattatgctacttgatctcaccgctgccggtgttcttcacgataagtaaagtatttgccggtgaagaacaccggcaaacgcgtgaacaccggcaaacgcatgaaaaaggttcgaaattttatctatccacccttgtaatagctgcattttttgtgtactcctcccatagctcgctgaatgttttaccggtatgctctctggcaaaatcatctgtatatgttttgctccgcatagcagcatccagttgctttacaaaatctttatcatggttttgctctatccatacaaaaaagcgggcagtaatgcggtagctgttatcatagttttgctttgcattatattcagtcagtttccagttggcaccggcattatctacgcccattttataacgcacataatcggcaataccttctgttatccaacccggcccggcgtcatcgggatatgcctgcacaatatgcattacttcgtgcgttaccacatcaatatcgccggggtgcttgtgaaaccattccgggttaaaacgtactatatcgccgctggtagctgccacaccatcataggccgggtctataataaatgttactttttttgccgtattcgggttatacatatcggactctttaggatatactgcaaagaaagcatctatcaggcgctgctttacagtagcatcaagtgcagtgtctttattaataaacagcaaggtatatttccctttggtaatgctattggtggatatcgttttatattcctttgcggtatcctgcgcggaagaagaaatgactgctgccagcaatatgcataacagcaaaaaagagactttttgatttttcattagttattatttgaaaaagaatacggataatcttttgcatcggtgccttttgaagtgttaggtttattgcccattaccacactaaagctgccgccagcttgtatatcgggctggcttatccagttatgtgtgtactgcttaccatttaatgtagcactttgcacataacggttgctatcgctgttgttgggtgcactaataacaaactgtttcccgttatccaatgtaagcgttacttttttgaacagcggcgtacccagcacatactggtcggttgcagggcatacgggataaaaacctaatgccgaaaatacataccatgcagaggtttgcccgttgtcttcatcgccgcaataaccatcgggtgtggctctgtataagcggttcattgcttcgcgcacccaatactgtgttttccacggttcaccggcgtagttgtataaataaagcatgtgctgtataggctggttgccatgcgcgtactgccccatattggctatctgcatttcgcgtatttcgtgtatcacacccctataataactatcatcaaaaacgggtggcattttaaagacagaatcgagcatatttacaaatacctttctgccacccatcaagtcaatcaagccctgcacatcatgaaatacgctccacgagtaatgccagctattgccttcggtaaatgcatcgccccacttgaatggattgaaaggcgttgcaaaagtgccatcttcgtttttgccgcgcatcaggttgtgcgaggaatcaaataagtgacgatagttctgacttctttttgcaaatacatcaatttctgtctgcgggcgcttcaatgctttcgccaattgataaatggtaaaatcgtcatacgcatattccaatgtgcgcgctgcattctctcttatctttacatcataaggcacataacccagtttgttgtaataggcaacgccggttctgccggtaccttcgggaccttcgttgttggcaccatgcaccagtgcttcatacagggtgttaatatcgtagccacgcaagcctttgatatacgcatccgataccactgatgcggaattattgcctaccattacattggcataaccgggactgctccattcgggcaagaagccaccttctttataatcgttaatcaagccttcctgcatctctctgttgatggatgggaacatgagatttagaaaaggatataaagcacggaacgtatcccaaaagccggtgcctgcaaacatataaccgggtaacacctgcccgttgtaaggactccaatgtaccggcttaccattagcatctatctcatataatttgttgggaaacattaccatgcgatataagcaagagtaaagtgtacgcacctgatctacgctgccgcctgatacggctattttacccagcactttgttccatgcagctttggctttccgttctactgtttcaaaattgtcgttacctatttccttcaggttttgtgctgcctgttccgggctaatgaaagaggaagctacttttacatttacctgtccgcctttattttttatgctaaagcccaccaatgcgcccacatgatcctgctgcatttccaggctatttttttccagcacgctatcgtgccaggtgtaggtaatggtaaatggctgatcgaactccattacaaagtaatttttgaaattggtgagcttgccggcagcgtatttggtagaataaccaacaatcttattctctcccggaattaccttgatatatgaacctttattaaaagcatctactactacaaaggcgctatcggttttgggaaaagtaaagcgaaaacgtgcggcgcgttcggtaggcgttatttcggtggttacatcgtggtcggcaagatatacgctgtaataataaggctttgccacttcggctttgtgtgaaaaccagcttgcacggtcgtcttctttaaacactgcgttgccggtcaccggcataatggcaaactgaccataatcgttcatccatggcgagggctgatgcgtttgcttaaagccttttattttatcggcatcatacgtgtattgccagccgctgcccatattgcccgtttgcggtgtccaaaagttcatgccccagggcacagcaacagcaggataggtattcccgttggaaagtgaaggtttggaatcggtgcccattaaggtgtttacatattctacggggtcttgtacttcattaaccaattgtgcattggtgatagtgcatacacacatgcacatcattaatacaaaaaagcttttcatgttgttttattggtgttttttgtttgaatcacaaacctgcctgttggcagacagggcgtcaaagtaaagaagattcacaaagaagtatcttgcttatttcaaaattctttatgctcagcgcactttcagctaaatatgtttagtgtaggataaatctgtttaggttgtaagtgtttttgagtgtgatttcttataatcaattattgttttccttttttctcctgaaagaaaaagtaacaaaaaagtatgaatgtattgatgtctttttaatggtattcatgagaatgcttcgcttagttatttcgtgaactactattttcttttgcctcaatgagctactccgtgggttcaaggacggcatgatcgctccgcgcgtttgtccggccaacgcctccacttactctaagatggatttttgttattgagtttatggtttggctaatataaaatattcttgaccttagcgcctttgcatcttagcggttcaacaaaaaactaccgatcacctgccacctgccacttatatgttgcagcaactgaaaggagttgacttcaaatgaagcattgtattgttgggttgcatattctttccaggcttctttaaattgttgcagatgcaaatcgcggtaagcaatggtaatgtgtggcgaaaaatggtattcattattactaatgaattctttagaataagcttttgcaaactgatgcaacacttctttttgtaaatgaacaagtggttcgttcattaccggctgcacatatattaccggattgtgtttgttgctgaaagcaccaaagtcttttatttcctgcgtaaaaggaggagtggcaatattcatttcattaaaccactgcaatacctcttcgtgcatgtttgcaggcactttaaacggtgccttgagtgtgatgtgcgatgccgttcttaatgcccctttgctttggaaacgttgtgccatatcgtttttaaatcgtatgatttcctcatcaattgaatagggcagcataatggcaataaagtaaagctgttgctgtttcatgttatttattatacgtcagcctgtaaggcgtttattacatttttgtgccggtgtatatttgcctgaataaaattttattgatagaaacttattaccacagcacaaagggagtataggcacggtggaacacagagtaattaaaacatactttgtgaatttttgtgccgttgtgacttcgggattcaaaaagaagcaggtggcttataaaaattacaaaggcggcatatacagccgcctttgtatgttgtgttaataagagcatatttaatcgcgtgttaccagtccttcgtcattgctgggcaatataacactgtctgatgcataagaaggttcaatggcaatcgccgtgccggtggtaataaaacttaccaaatgattgctaagacgatttttatcggtgtaaaacaaaccatgtggcgacccttcataattgatgcactggttaacaggtatcagtttggaagattgctggctgctggtttcaggcggcactatcttatcggcatcgccatgaatgatgagcgcaggcacattgatggcggttgcatctttacggaaatcggtatagctgaatgatttgatacactccaaagtagcccttggcgatgccattgctgcaatagtgcgataatattgcagagaggcgtcgcttaccggatggctgaggaaatgaacaccaaaaaactctttaccaaaattgtctaaaaaaccaatgcgatcttcctttacgcctgcgagcataccatctatggcatctgccggaacaccgtctgggttatcatctgttttaagtacaaaaggtactatcgaagatacaagtactgctttgctaaccctttcgccgccatacctcgtaaaataacgggctacttcgccgccgcccatagagaagcccaccagcgttatatcattaagatccagttgctctatcactgcacgtaagtcgtcggttaaagtgtcgtagtcgtagccaaaccacggacggtcggacataccaaagccgcggcggtcgtaggctattacacgcaagcctgcattgattagatcatctacctggtattcccacatttctttacttaatggccagccatgtatcaatatcacgggcttgccggtaccataatcaaagtaagccagttgtactgcttcgccggtggtcttgtctgttgattttataaatttcataggaggagtttttagatgtgtaagaagcagtagtaaaagtatgccatttttaaagaaggatttgataaggaatagaacgaaggtaccaagacaatggaaagacatatccgtttttaaccaaatacaaaatcagatttatatttactttatgctacctacagattccgtacaaagccgccgctgagtttgattgtatttaagtttttgtactggcggcaattgcggaatgacggtgtcaattattacattagtagaaaataattctccgcaggcacttaataaaacattcgtagtatatttatccatctatatttaccgctgctgcttttataaccgccacacttatactttgctttaaatctacattaaaaagacgaaggatggacgcaggatgaacgaaggaactatggctttactataactttatcataaagcattctacgctatggccaagactactgaccccttatttaaacaggtgaagggtaccattggaaagcaaatcgtaataaaacaatacggtgatacaacagtcatcagcaagcacccggacatgagcagggtgaagccgagtaaactgcagcaaaatggcagaaagctgtttgccgaagcagtggcttatgcaagagctgttaacaggaatcccgagcaaaaagcgacttatatacaaaaggtaccctgcgggcaaagtgtatatcattatgcattgaaggagtacttggagaagaacagggaggggtgatatccttgtatgagtttgttgcaattgcaacattatcagcagcgatttttgattgcagaactatgaagttagagaagatacgattccgggtagaaatccttattttgtcaatatcttactttgtttaatatcacctttaccgaaaaggcaattttgctttttgcataggctattgcaattacctaacttgacagcaaaatcctacaacttaatactatatgagaaaacaacttagcaccacctggctataataaacaaggcgacttgcgccgccttacatgttttcacaacggaataatccttattgtgatttgctttcaaattagaatgctaaaataaaaaatattaatcaatgaataagaaaattcttggacttgacttgggtactaattctatcggctgggctttaattgaggaagattttgacaaacgtattggtagcattattggaatgggaagtcgtattcttccaatgtcgcaagatgaacttggaaagtttgatagcggtgcgcctatcaatacaggtactgccgaacgcactaacttcagaggcattcgtcggttaagagaaagacatttgttaaggcgtgaaagactgcatcgtgttttaaacctcttacgctttttgcccgaacattatgctgctcagattgattttaaaaaaagagtaggtcaatttaaggaggaatcggagcccaaattggcttatgcttttgatgctgcaaccaacaaagctgagttcatttttaaaacttcttttaaggagatgctgaacgattttgcacagcatcaaccgccacttgtttccgataacaggaaagtgccgtatgattggaccatttatcacctacgcaaaaaggcattaactgcgaaaatacaaaaggaagagcttgcatggattctgcttaatttcaatcaaaaacgcggctattaccagttgcgcggcgaagaagaagcaaatgaaacgcctgagaaaaaggtggaattttactcgttgttagttacagatgtagaagcagccgaagacaaaaaaggtgctgatacctggtataacgtgcatcttgaaaatggctggatttacagacgtaccagcaaagtgccattggattgggcaggtaagatgaaagagtttatcgtaactaccgatttaaatgaagatggtacggagaaaacagataaggaagggaaagtaaaaagatctttcagagcaccattggagaatgattggacactcatcaaaaagaaaacagagcatgatattgataaaagccataaaaccgttggcgaatacatttatgacaccttgcttgccacgcctaatcaaaaaatcaaaggcaggctggtaagagtagtagaacgtaagttttacaaagaagaattaaaagctattttagaaaagcaaaaggagtttcatcctgaattgaatgacggagatttatacaatgcctgccttgaagaattgtatcaaaataatgaagcgcaccagaatagtattgccaagaaagatttcacacatttgcttttgaatgacatcattttttatcaacgaccactcaagagcaagaaatcattaatcagtaattgcaaatttgaagagcgcacttttgtaaaagatggcattaagcaaacacagcccttaaaaggaattgcaaagtctcatcctttgtttcaggagtttaggttgtggcagtttattcagaatttaaagatttataaaaaagccacaccggaagatgaaaatattaccgacacttacctttctacagaagacgattatgtaaagctgtttgactggttgaacagtcgaaaagacattgatcagaaaacactgcttaaacaatatttcaaagtaaaaaatgcggatgcttaccgctggaattatgtagaaaataaaatttatcctgccaatgaaacaagagcagaaatactaaagcgtttacataaagccaatgtgcccgaagattttttaactaaagaaaaacaagaagctctatggcatattctgtactcggtagaagataaaagtgaaatacaaaaagcgcttacaacatttgcatataagaacagcttgcccgatgaatttatagagcagtttaaaagatttccacatctggagaaagagtatggttcttattcagccaaagctttaaagaaattactcccgctgatgcgtatggggaaatattgggatgaacaaaccattattgatagtacgcctttatatcagcacaatattcaacaggtaataaccaatcttcagaataaagaaaaaaaactgacagaagaagataggcaaagaggtaaaacaattaataataagctactcgaaaagctgcagcggcttgctgatgatccagccgcttataaaggtttggagcatttcttagcctcctatctcgtatatggaaaacattcagaagatagtgatgtattgcaatggaaaacaccggcagctattgaagattatttgcgggaatttaagcaacattcgctgcgcaacccgatagtggagcaggtaattacagaaacattgcgggtagtaaaagatgtatggaatttttatggaaatggagaagaaaacttctttgatgagatacatatagaacttggcagagaaatgaaaaatccggccgaagaacgtaaaaagattactgctcaaatgaatgacaatgaaaataccaacttacgtttgaaggccttattatcggagttgatgagggatagtgaagtagaaaatatacgttcttattcgccttatcagcaggacattttaaagatatacgaggaaggtgttttaaatgccaatgatggaaatattcccgatgatattttaaatatttccaaacaggcacttcctactgcttctgaattgaagcggtataaattgtggctggaacaaggttatcgttctccttacaccggtttaatcattccgctaaacaagctatttacaccggcttatcagatagaacatatcattccgcaatcaaggtattttgatgattcgttaagcaataaagtgatttgcgaggcagaagtgaatgcggataaaggcaacatgactgcttttgaatacataaagaaaaaaggtggttctaaagtaaacggctcaccaataacgcttcttgctcaaaatgactacgaagatttggtaaaaagaagtttctcaaaaagccgtagtaaagccaaaaaattgttgatggaagatataccagaaggctttatagaacggcaattaaatgatagccgatatatcagtaaaatagtaaaaaatttgcttagcaatattgtacgcgaagatgatgagcgggaagccatatccaaaaatgtagtgcctgtaaccggagcggtaacttcgcaattaaagcacaactggggcctggaacatatttggaatgaatcggtaacaccgcgtttcatccgattaaacactcttaccggcactaccaactttggtagtatcaatccaacaacaaataaatttttaccacaagttccattggagctacaaaaaggttttaataaaaaaagaattgaccaccggcatcatgctttggatgctttggtaattgcatgtaccaccaaagatcacatcaactatttacattcccttaattctgagagaaagaacttcagtttggtttcaaagctgcgtgaaatagaagaagcccaggtaaatggtactattcgtaaagtaccaaaagcctttattaagccctgggaaacttttacgcaggatgctaaagaaaagtttcaacacattattgtgagctttaaacaaaatacacgggtaattaccaaaacaaacaacaggtatgagcactgggaaaaagatacagacggtaatttgaagaaagtgcctatcaggcaaaccaagggtgaaaataaggcaatcagaaagccgatgcataaagatacagtagctggtttggttaagttgggattcaggaagatggtttcgcttgcagcagcattagacagttgggaaatgattacagataaggagctaagaaatgaaataaagctgcttgtaagtaagggatatgataaaaagaagctgctacatttttttaagactaaagaaaacaagtggaataataaagagatgagcaaagtagaaattttttattgggatgtagataaatacggcaagcccaacaatgccgcctcaagagtaaagctggatgaaacatttaaccctgtaatgattgcttgcattaccgataccggtattcaaagaatcctgtacaatcatctgtataaatacaatgaagagaaaggaggtaaaattattgaacatcctgaattagctttttctccggacggcattgatgagctcaataaaaatattcaggaactaaatgggggtaaatggcatcaacctatttataaagtgcgcacgtatgagccacggggcaataagtttagcattggacacacaggaaacaagaaagacaaatacgtagaagctgccaaaggcactaatttgttctttgctatttatagaaatgaaaaagaaaagcgaagctttgataccattccgttaaacatagtaattgaaagaaagaagcagcatttatcgcctgtacccgaaaagaacgaacagggagatatattggaaatgtatttatcaccaaacgatttggtgtatgtgccggaggaaggtgaaaagcaaaatattcattcaattaattttaaagacttgtgtaaggaacaggtagatagaatctataaaatagttagttttaccaataacagattgtatgcaattccttttgcagttgcaaaatcaattgttgacaaagtagagtttacacagctaaataaacttgaattttctctggacaaacgatccataaaagatggatgtattaagctaaaagccgaccgtctcggaaacataacactcgcataagtttaatgctatggtaaaacgcactctctacttcggcaatccagcttatctcaaaaccaaaaccgaacaactcgtcattgaatcggcagaaagagacgagccggtaactgtacctattgaagatattggattgctcattgtagatcatgcacaggtgaccatcacatcgggactgatggcaaaactgctggaaaagaatgtagctttagttacctgcgatgccacgcatcatcccaccgggctaatgctgaaccttgacgggcatacgctgcaaagcaagcaatttgctgcccagttggaagcgcctttacctgtaaaaaagcagctttggcagcaaaccgtaacggcaaaaatctataaccaggcaatgctgctaaagcagcagggaagagaaaataagttgttgctcaactatgcaaaggatgtaaaaagcggcgacagcgaaaaccacgaggctaaagctgccggctactactggaaaaatttgtttccgccaattattgaatttaaacgcgacaggtttgggatgccacccaataatatgctcaattacggttatgctgtgttgcgtgcggtggtcgcccgtagtttggtgggcagcggcttgttgcctacgctcggcatttttcaccgtaaccagtacaatgcctattgtcttgccgatgatattatggagccttaccgcccatttgtagataagctcatctgcacaatggtgaacccgctggaaccggaatttgacctgacaccagcgcataaaaagcaactgcttacagtgcctgccatggacgtgtgtgtagatggcgaaaaaagtccgctgatggtggcaatccaacgcactactgcatcacttgccaaatgctttgagggcaaagcaaaaaagataatatatgccgaactggagtaatttttttgaaccacaaagaataaaaggtactaagattcacaaagtagtggtttgtgttttccattgatttgacaatgaacacttatacatttcatgattgaatggtaattcatcaaaacagcttgaatgtttgaaagactaaacgcttaccgcattatgtgggtacttgtacattttgatttgcctaccgaaacgaagaaagaacggaaagcttatacagagttccggaaaaaaattatgcaggatgggtttcagatgtttcagttcagcatgtatatacgccattgcagcagcaaggaaaatgcagaagtacacatgaaaagagtaaagaaaatattaccagcaaaggggcatataggcatcctttgcattaccgataagcagtttgggatgatggaaatttaccacggtaaggaaaacgtaaaagcgccaggaacaattcaacaactggagatgttctgaagaaaaaaatgtcaaaaaacgaaaaaagaggctcaaattgcctcttttttcgtttgaataatttagttctaatgcagttctgatgggggatttagcaaatgctgatgcaaaagaactaaagttgaaagcaaatcacaacacttgtcgcgtgattggtgaataatatagtgatgcaaaagaactaaagttgaaagcaaatcacaacttgtgccagttttatcagtgcgtgcctgtgatgcaaaagaactaaagttgaaagcaaatcacaacgctctttcaccctacttccggctcagtgggatgcaaaagaactaaagttgaaagcaaatcacaactactaaacgagggcaacgaaaaggatgggcgatgcaaaagaactaaagttgaaagcaaatcacaacggacactacgcccgataatgtaaaatcatggatgcaaaagaactaaagttgaaagcaaatcacaactacactgcctgatgattccgctatcagtctgatgcaaaagaactaaagttgaaagcaaatcacaactagtttgccctatatatcgcacatttaaaggatgcaaaagaactaaagttgaaagcaaatcacaacgccattcttgcatactactttaccacaacgatgcaaaagaactaaagttgaaagcaaatcacaacaacagcacataggtttgcgcgtgcctgatagatgcaaaagaactaaagttgaaagcaaatcacaacgaccccttcggtggaagcggaacagtgtggatgcaaaagaactaaagttgaaagcaaatcacaacatgttacttgtccctgccgcgttgctttgagatgcaaaagaactaaagttgaaagcaaatcacaacaatccttcacctaacctgtagtgttcaaaagatgcaaaagaactaaagttgaaagcaaatcacaacgaaaagctgaacggattgtgatagcttacgatgcaaaagaactaaagttgaaagcaaatcacaacgtagctgctacgccaattctcagtaaccagatgcaaaagaactaaagttgaaagcaaatcacaacggacttgcagcgataatccgcttaataccggatgcaaaagaactaaagttgaaagcaaatcacaactatgatggtgcaggtagaactgcccaccgggatgcaaaagaactaaagttgaaagcaaatcacaacgcaagcagacattaacagccacgaatgtagatgcaaaagaactaaagttgaaagcaaatcacaacaagcgaatcaagaatgccttgcatttcattgatgcaaaagaactaaagttgaaagcaaatcacaacttgaatgttactgatggcagttgcccgccagatgcaaaagaactaaagttgaaagcaaatcacaacaagtaaatactccagcatggcctttatatggatgcaaaagaactaaagttgaaagcaaatcacaaccacatcgacgagtaggaaaaacggcttgcagatgcaaaagaactaaagttgaaagcaaatcacaaccaataccgccatcgggcgaatagcctttaggatgcaaaagaactaaagttgaaagcaaatcacaacggcactctatgcagttgccacaccctactggatgcaaaagaactaaagttgaaagcaaatcacaacaataatgagaccattaccattatgacggagatgcaaaagaactaaagttgaaagcaaatcacaacatgcaccgatacgctttaaatgatttacggatgcaaaagaactaaagttgaaagcaaatcacaacacccaaaacaaaggcgtcgtattcacccccgatgcaaaagaactaaagttgaaagcaaatcacaactcatctattaccattacaaataagtcaaaagatgcaagagaactaaagttgaaagcaaatcacaacctggctcattaagacctattccaatgaaaagatgcaaaagaactaaagttgaaagcaaatcacaactcctatttgcaaggaaacattacacctgttgatgcaaaagaactaaagttgaaagcaaatcacaacgcgcaaataggtcgcgcatcggaaacagaagatgcaaaagaactaaagttgaaagcaaatcacaacttatatgcagcataattgcaaaaaaacaagatgcaaaagaactaaagttgaaagcaaatcacaacatgttcgccgatacgctgcatagcatcattgatgcaaaagaactaaagttgaaagcaaatcacaacggcttcatgttcgtggagctttattttcctgatgcaaaagaactaaagttgaaagcaaatcacaactgatttgtgagcggtttataatctcaaaggatgcaaaagaactaaagttgaaagcaaatcacaaccaatataggagttgggacaaatggttaaaagatgcaaaagaactaaagttgaaagcaaatcacaactcataccacaacagcacctcttcaaaatcagatgcaaaagaactaaagttgaaagcaaatcacaacttaaatgcttctacaagcgacagataggtgatgcaaaagaactaaagttgaaagcaaatcacaactcgggcagtggtggtacaagtggtttatcgatgcaaaagaactaaagttgaaagcaaatcacaacatgccttgtgcgttgctgtttgctgccagtgatgcaaaagaactaaagttgaaagcaaatcacaactattgccctcacaggggctttgtattagatgatgcaaaagaactaaagttgaaagcaaatcacaacagcttcttatccttcattctgccatcccaagatgcaaaagaactaaagttgaaagcaaatcacaacacctttcttcaacaggcttaccaacgaatagatgcaaaagaactaaagttgaaagcaaatcacaacggtgtttgattggttgtaaatgcgcctaaagatgcaaaagaactaaagttgaaagcaaatcacaacattatgagggcagactctataacagtgagggatgcaaaagaactaaagttgaaagcaaatcacaacatctttttatgctcgagcaccacgagggatgatgcaaaagaactaaagttgaaagcaaatcacaacctactataaattggcatggtgaacaggatggatgcaaaagaactaaagttgaaagcaaatcacaacccttaatccgcgatgccgatacgcatggtagatgcaaaagaactaaagttgaaagcaaatcacaacctttctgcataatatacgcatcacaggtaggatgcaaaagaactaaagttgaaagcaaatcacaacgagcagtacggtaaggccgcaccggatattgatgcaaaagaactaaagttgaaagcaaatcacaacgcagtgtccattactacagtatctctgtacgatgcaaaagaactaaagttgaaagcaaatcacaacgaggacaggaaccggatgtcggggccctccgatgcaaaagaactaaagttgaaagcaaatcacaacagctctactgcgtaccgcacaaaacgcaaagatgcaaaagaactaaagttgaaagcaaatcacaaccaagtggcgtggtaatacccaagccccattgatgcaaaagaactaaagttgaaagcaaatcacaacttctatattgttattataactcataccatggatgcaaaagaactaaagttgaaagcaaatcacaacactatcaataaagatgtcttgccatctgatgatgcaaaagaactaaagttgaaagcaaatcacaacataatcggttatgtcacatcctttgaagatgatgcaaaagaactaaagttgaatgcaaatcacaacaaagagcttctttttatgttgcgggtgcaggatgcaaaagaactaaagttgaaagcaaatcacaacccgattgataaatgggtgctaatgcttttagatgcaaaagaactaaagttgaaagcaaatcataactgtctgctatgaaggcttaaagtttgtcgtgatgcaaaagaactaaagttgaaagcaaatcacaactgctattagagcattaataacatttacaacgatgcaaaagaactaaagttgaaagcaaatcacaacaagcattgcggaaaggaagtaccggttggtgatgcaaaagaactaaagttgaaagcaaatcacaactatcttccagaataataaggattgaaatgcctttcgtccggaacagatgctattttatcattgtgatataaggtaatttccttcgtcagcataacaaagccggagtttgattactgaatgtaaatgcaataaattccaggcattttaatgtttcggacacctatggtaatacactccgccgggtttgtaaaatagaagccctactaaaccaagggtaacagaacagtaacaaaagcaaacaatgccttattccccctccacattgtcgcaattgcacaccctgcacacgggtggttaccattagttttgccataaataaatactatatgagaaaactaaaattacaaatgcaactatccgtggacgggtatgttgcaggacctaatggagaactggactggatgacctggaacctggatgacgggttaatacaattcatcaacgatttaacagacagttccggtaccattttgctcggcagaaaaatgaccgacggattcatgaactattgggagggtgtggtaaataaccagccggaaagccctgaatacccgtttgctaaaaagatggtggacactcctaaagttgttttcagcaaaaccctgcccgcatccaaatggaccaatacgacgctggcaaacggtaacctggctgatgaaattgccaacctgaaaaaccaaagcggaaaagatattattgtatatggcggagccggctttgtttcgtctctcattaaagaaggacatatagatgagttcaacctgtttgtaaaccctgtaatgattaacaaaggcatgcggatttttgacctcgccgacaaacggcaaaagctgtctctaatggataccacagcctatccatgcggcattaccgtattgcgctaccagctcgcgcgggaataataatttatcctgtacccatgcctatgttcttcagagtgttggcggtgtacgccctgaagaacataggattttttacacataccctgtggtattaaccgggacaacccaccggttggcatttacagccggttacctatttcttagcaggattttagatagctattagttaaaaactgtattcccttaaagaggacagcaggattaaaataggatgaaaatagatggaaggcagctaaaggtatcccctgtttacatatttttatttttttaaatacattttgtacatcgtatgtttaacaggatattgctgactgcttgtatctgcctttattttttttcaacctttgcccagcctaaagttccggaacatgtattttatcaaaagctggaaaacggattagaagtgcttgttctggaagaccataccattccatttactaccatcgaaattgcctgtaaaaatggctcgtttacagaaactccggacttcaacgggttaagccatttgtacgaacacctgttttttaaatcgaacaaggactacaaaacacaggatgattatttgaaagagataagtgacctgaatatagaatttaatggccgcacgcgggaagaagtggttacctactattttaccctgcctaaagcaaatacggaaaaaggtatgcaatttatgaacgctgccataagatacccggtctttaaaaagaaggatatgcagaaggaaaacagtaccgtagatgcagagtttcaaagacaggaatcgagcccgtactatatgttgattgataccctcgaccatatgctatggggcagcaactacagccgtaaaaacatgataggcaaccataacattattcttactgctactcccgaaaaaatggaaaccatacaaaacaggtattattatcctaataattgtttgcttgttgttgccggcgatgtggagcacaccgaaatttttacagaagcaaaaggcatttttggttcgtggaagccatcggaaagagacccttttacaaaatggccgataccggaggtaacacctttacagcaaaataaatttgtagttatcgaatcggagcttgcgcagatgcctttgctgctttttcgctggcaaggccccgatacgaggcacgacttacaggcaacttatactgctgatgtgttttcttatatcctcaaccagcggttgtctaaactaacagccgcattggaggataaagggctggcaacaaacattggggtaaattattactcgcaaaaatatacagggcctatcaccctatcgcttactcccaatccacataaaattaaagaatgttacgaggccatacaaaaggaaatagcacaatgggacgacgatagttatataacagatcaacagattgaacgggctaaaaagatattgtacattacccaggtggaagaacgcgaagaagtacaaagttatgccgacctgctttgtttctggtgggcttctgcatccatagaatactacacgttttaccgggaaaatctcaataaagtttcccgccaggatataaaggactatgtgagaaaatatattaaaggaaaacctttttgcgccggacttattgttccgcaaggtgcagacatgaatgctgccaacaatttttactcgtctaaataaataagataatgcaattgattgtatgtaaaaccggtaagttaatgagcttgctggcgctgctgtttttatcattcactgcttttgctcaaaccactacggtagcatttgaagtaaatggcttaaaagtgatattgaaacaaacccagaaagaaaccttggtaatgagtatgtattataagggtggcttaacgaactacccggctgcggatgcaggtatagaatcgttggccttatcgggcattatagatggtggcaaccataccttttctgctaatgattttaatgaccaacgggacgagtatggaatacacctcaccggggaagctgccaatgattatggcgttgttaagttaagatgcattaccaggtatgccgaagaaggctggaagttatttgcatcggctattacggctcccatctttgatgcaaagaagtttgatattttaaaacaacaaaaaacagacgaattaaatgcagggctttccaatgccgatgcaagattgagccaactggctacagcaacagcttttgccggcactccttacgccaataatcccgccggtactgttgaaaacatagcccgtttaacacgcgatgcggtagaagattactattacaatatcctgttgaacagaaaaagaatgttcctggtagttgccggcaatatttcgaaggaagatcttgaacagaaagtgaaaaatgctttttcggacattcccgaaaaagcgtacacacctgtgcctgttaaagaggagccctttacaagagatgtgtataaaatagaaggcaggtcattggctaccaattatgtttgtggtattgtgaatgctccaggtttaaacagcccggactacccggcatacagattagccgttactattttgcacagcacgctattcagggaaatacggttatcaaagcgcctctcttatgcacctgccgcctacctgtcgggaggtaaaatctcgtatcttacgatgtatgccagtacaacacaaccacaggaaacggtaaaagcaatgtataatgtgttatcgcatgtaagagcatccatttatacagataaaacagttgccgacctgcagaatagtgtgtcgctgagttatcttaaacagcaggaatctatgtcgaatatcgtggatgcattgggtgaagcggaaataatgggcgactggagactggcagagaattttgatgtccgggtgagtgcagttacggcaaaagagattcaaagcgtattcaaggcttatacaaacaatattacctgggcttatatcggaaatcctggtttaggggagcaggcgtttacgcagtaagcgcttgttgccggaaggaaggatgctacagagcattgcagcatacttgagattctttttatccttttttcttcgggcatcttcgtctccccgttatgcagtgtggtaatgaaagaaagattcacaagacgactatggagttgatataacgttgctgagttagtagccttggcgacggccaaaagttgagattgccccgacggctgtacaaccctatgacatcttagcaatcagatggtacaaaagcatataaaactttgttgaactggcagattaaaagtatttttcggtactattactcaaaaatatcagccagacaatacaagcctatgcctgtacaaacaaagaaacattggcagcagcgattgcacgatgtggtgtatgagtctaatacaatagcgggcaaagcattcgatattacactgttgctattgatttttacaagcatactcgtagtgatgctggatagtgtagaagcatggcattcgcgctatggttatatcttcaacatactggaatgggtttttacctttttatttactattgaatatatactgcgcctcatttgcataaaaaaaccgtggcgttatgttaccagttttttagg

SEQ ID NO: 1103 - DNA, 24563 bp, synthetic construct
  misc_feature 1..24563: note = Synthetic
  source 1..24563: mol_type = other DNA
gaggtggcggacacggtaggcgcgggcgattcgttcaccgccgccttcgtagcctctgtcctgaaaggcaagcctgtctccgaagcccacaagatagccgtagctacctcggctttcgtctgcacgcaaaacggcgcaatgcccgtgctgcccgcccggctgactggaaggggcaccaccgtttaaaataatctgattataatgaaacgcagattagcgcagattcacgcagattaaataataaaataataatccgcgaagatctgcggtaatctgcgtttttaattaaaaatcctctgtgagcctctgtgcactctgtggtgaaaactcattccgaaggctcctgctccggcacgtctggcgcttctcctccgctggcggtgccacccgatacgctggcaagcgagcctgtcaagccgttcagcttgtcgatgaaggcattgatttcatcggtgggctgcacgatggcgtaggcgttcaccgtctgcacgatttcctggtagaggcggttcgcttcggcggtggcttcggcagagctgatgctgcgctgctcctgttgcaggctcatctcgtcgttgcgggcgtcgaaggcttcttcgaaggcggcgtttgcctcgcgaagggcttccacttcgggcgagaggcccagcgtggtgacggctgcggcgttgtcggtctcggcaagcattgccaacattccgcggatttcggcggtttccttattgtattcgtgtctgccgatgccgcggtagggcgacatttgctggtagagcagttcggcggcatggcggcgttcgtctacgggcgatttcaggagcgcgttgatgaccgagctgatagcgcccgccgcattgtcgcgcgtcacgtccgtctcgcgcatctgcggggtggtgacgaaggcgcgccggcggttgacgatagacgccagcagctgggttgcctcggtgtaggcaggtgccttgtcggtgatgtggagggcttcggcggtcgtggcggtgatgtatttcactaccgtggtgtggaagttgctgcatgcgccgattgtcatctgcgtcatgccgaatgaattggatttgttttgccataatgatatgtttttaaaggttattttatttgcttgtaggggcgtatcgcatacgccctgaaaacatccacgcggataagcggatgcattcgggcgtatgcgatacgcccctacgtggtgatttggtgaaatgcggagaaatgattatcttcgccccggtaaaaaacttaaatgaggctacgatgaaacacaacgctatttcttttctgattatatcgctcttcttgctcttgctggcgggatgcgccgggcagcaacggcggttcgtcatcggcgtgtcgcagtgcagcgacgacgagtggcgggcgcagatgaacaaggaaatcagccgcgaggcgttgttttatcccgaagcggaggtggtgttccgcacggcgaaggacaacaacgagcagcagatacacgacatcgaactgatgatacgcaaccgggtggacttgctggtggtttcgcccaacgaggcggaggtgttggcacccgttatcgagaaggcatacgggcggggcattccggtcatcctgaccgaccgcaagattcattcggacaactatacggcttacatcggtgccgacaattacgccatcgggcacagcgtgggcgaatatatcgccgcgcgcctgcaagggaaaggcaaggtggtagaggtaatggggcttcgcggctcgactccggcggcggaacggcatcgggggatgatggaggtgctggagaaatgtcccggtatcgaggttgtggcttcggtagacgcgggctggctgcgcaaggaggcgcgcgagcgtttcgactcgattcttgccgcctgtccggacattgatatggtgtattgccagaacgaccgtatggcggcgggtgcctacgaggcggcggtgaaatacgggcgcgagaaagagatgctgtttgtgggcattgacgcgctggctggcgaaggctatggcatcgcgcaagtggcgagcgggcaactggacgctacgtttatttatcccacgggaggcgaccgggtgatgcagacggcaatggcgattctgacgggaaagcctttcgagcgcgaaacatttctttcgtcggctttggtcaatcacaacaatgcccgcgtgatgatgttgcagaacgagcagatacatcagttggataacaagatagaccgcctcgaccggcagattaaccgctatctgacgcaatatgcttcgcaacgcacgttgctgtacacctgcatcgtgatattggcattgtttggcatcgccttgtttgtggcggtgcgggcattttgggcgaagaaccgcctgaatgtggagctttcggaacagaagcggcaattggaggaacagcgcgaccagctgatagacctctcgaagcaactggaggaggcgacccacgcgaaactggctttcttcaccaacgtgtcgcacgacttccgcacgccgcttacgctgatagccgacccggtggagcaattggaaacatccaagaacctggacgagcacgaacgtttcctgctccgcatcatccataagaacgtgacggtattgctccgtctggtcaatcagatactcgacttccgcaagttcgagagcgggaagttgaagatgtatctctcggagttcgacatcgcgaaggaaatcaacgagtggactgaagcgttccgcaccttgtcatataagaaacacgtgcatttcaatgtctctgtagctccgtcggacaaggcatatacgatgatagccgatgccgaaaagctggagcgcatcacgtacaacctgctttcgaacgcctttaagtttacgcccgaaaacggtcgggtagaccttgccctttcgcaattcgagcgggacggagcgcagtggctgcgttatcaggtctcggatacgggtgtgggcatttccgccgaacacgtcaaacatatcttcgaaagcttctatcagatagacgtgcactatgccggttcgggcatcgggctggcgttggtaaaagcctttgccgaaatgcacaaaggcaccgtctccgtagataccgccaagggtaaagggacgattttcactatcgagatgccgatgaaacaggcgggtacgcttgccgaaggggtggagaagaatgccattatggcgaacctgaaagaaggggcggtgctttctgcagaccaggaaacggtgcaaacagtatcggaagtggcggatgataaggataaggagacgattctggtgatagacgacaaccaggacgtgcgcgactatgtgaagatgctgctcgcttcgcaatataccgtcatcgaagcctcaaacgggcaggaaggcttgcagcaggcgatgaaatacgtgcccgacgccattatctgcgacgtgatgatgccggtgatggacggtatggagtgctgccggcggttgaaatcggaaatgcagacctcgcatattccggtgatgatgctgaccgcttatacgatggacgagcagaaggtgcagggatacgagtgtggggcggattcgtacatcctgaaacctttcagtgccaagctgctgcaggtgcgcctgcggaacctgatagacaaccgccgccgtctgcaaagcttctttgccgaccgttcggctctgaaacaggagtcaatcagcgaggtggacaagggctttgtggagaaactgcgccagttgattgaagcccgtttgggcaatgcaggtttgagtgtggaagacttgggcggagaattaggactgagccgtgtccagctttaccggaagtctaaagcgttgaccggctactcgcccaacgaactgctccgcatcgcgcggttgaaacgtgccgcatcgctgctggcctctaccgacaagaccatcgccgaaataacgtatgaagtaggtttcagcgcgccttcgtatttcaccaagtgctataaagactacttcggcgaaagccctaccgatttcttgaagcgaatgaaggagtaagtcagaaggatgcgttatgccggaatgtattggtttattccgcaaaaatatgtaagtttgcttcctgtaaattatcatcttattataagctaattatgagtacttgcaataacatggatacacattggctgtcagcagacaaagacccgatggggcaggccatatatgactattaccagaccggacgggcagaaaagctccgggtattttcatcccagtttgacgaagacgaactgcctgtaagcggcctgttccgcacgttcgaacagatgccgcccttagagcaaacggcactgcgcatggcgcaagggaagattctggatgtaggagcaggaagcggatgccattcatgggcgctgaaagggctgggaaaagaaagcgtagccatcgacatatcccccttgtcggtagaagtcatgcaaaaacggggattaaacgcacatctggcaaatgtgttcgacgagcggttcgccggacaattcgacaccatactgatgctgatgaacggctcgggcattatcgggaaattaaagaacatgcccgcattcttcacacgcgtcaggcaacttttggcaccgggaggatgcatcctgatggattccagcgacttgcgctatctgtatgaggaagaagacggaagctatatgattgaccttgccgcaaactattacggagaagtcgacttccagatgcaatacggaaagacaaaaggagaatctttcgattggctctacattgattttgataccctttcggcgtatgcttcacaatatggattccggaccgaaaaggtgcaagaaggcaggcattacgactatcttgcccggttgacttatatgtcgaaagacgcataatcattcattcaagcaagagaaaatacaatattttcaataaaaacagtcgggaagttgtatattgtttcaatattatctgtatctttgcaccgaaatgaagaataaatatacacgatgaaaagcaagaacaacagactcgattccatcaagatgattatctccagcaaagaaatcggaagccagggagaacttttggcagagttggaaaaagaaggtttccagcttacccaagccacgctttcacgcgacctgaaacagctgaaagtggcaaaagcggcaagcatgaatggcaactatgtgtatgttttgcccaacaacaccatgtataagcgtattaccgagccgcaaagcgcatctgaaatgttacgccatacgggcttcatatccattgaattctccggaaacatagccgtcatcaagacacggccgggatatgccagcagccttgcctacgacatcgacaacaatcattttcatgaaatcatcggtacgattgcgggagacgacactatcctgttggtcttgcgggaaggggtaacgcgtaccaatgtgaagcaagccctcgaaaacgtgattacgaacatcaaccaataacatataaagaataaggataaatacaaatggactcaaaacaaatagacgtaatggtggcagatgcttcgcacgaagcatacgtagatacaattctggataccatccgggaagctgccaaagtgcggggcacaggcattgccgaacgtacgcacgaatatgtcgcaaccaaaatgaaagaaggcaaagccatcattgccctttgcggggatgagtttgcaggctttacttacatcgaatcatggggaaacaaggagtatgtagccacttcgggtttgattgtccaccctaaataccgtggatgcggacttgccaaacgaatcaaacacgcttcgtttacgttggcacgcctgcgctggcccaaagcaaaaattttcagcctgacctcaggggcagctgtcatgaaaatgaacaccgaactgggatatgtaccggtaacattcaacgaactgaccgatgacgaagcgttctggaaaggatgcgaaggatgcatcaaccacgagatactgatggcaaaaaaacgcaagttctgtatctgcacggccatgttatacgacccggcactgcatacagacgatgaacatacaaacttctgacaaatgaagaattaagaatgaagaattacacataataaatatagccttatggaagaaaagaaaaaagttgtcgttgctttcagcggcgggctggatacttcgttcaccgtgatgtatctggcaaaagaaaaaggatatgaagtatatgccgcttgtgccaatacgggcggattcagtgccgaacaattgaaaaagaatgaagagaatgcctataaattaggcgcggtgaaatatgttaccctcgacgtaacacaagaatattacgccaagagcctgaaatacatgatattcgggaacgtgttgcgtaacggcacctatcctatttccgtaagttcggaacgcatcttccaggcacttgccattgcccgctatgccaacgaaatcggtgcacatgccattgcgcacggctctaccggtgcgggaaacgaccaagtacgtttcgacatgacgttcctggtcatggctccgggagtggaaatcatcaccctgacccgcgatatggcattaagccgtgactatgaaatcaattacctgaaagagcacggtttcgaagccgacttcaccaagctgaaatactcctataatgtaggaatctggggcacttccatctgcggaggggaaatcttggattcggcacaaggactgcccgaaagtgcatacctgaaacaagtcaccaaggaaggaagcgaactgctgaagctggaattcaagaaaggcgagctgtacgctgtcaatggggaagtgttcgacgataaaatcaaagccatccagcgtgtagaagaaatcggagcaccttacggtatcggacgggatatgcacgtaggcgataccatcatcggcatcaaagggcgcgtaggattcgaagccgcagctccgatgctgataatcggtgcacaccgctttctggaaaaatacacgttgagcaaatggcagcaatactggaaagaccaggtggcaaactggtacggcatgttcttgcacgaaagccaatacctggaaccggtgatgcgcgacatcgaagccatgctgaccgaatcgcaacgcaacgtaaacggtacggctatccttgaactccgcccctattgcttctctaccgtaggcgtagaatcagaagacgacttggtaaagaacaagctgggcgaatacggggaaatgcagaaaggctggacggcagaagatgccaaaggctttatcaaagtactctccactccgctgagagcctattacgcaaaccataaagacgaaatgatgtaaaaaatacaactatggaagggaaaaaactgacccgcccgcaaagcaacaagatgttggcgggcgtatgcgccggaatcgcgaactattttaacctcgacccgacactgatccgtgtaatatacgcgctgctcacggtctttaccgcctttgcagggataatcgtgtatttattattatggataatcattcctgaagataaataacaaagcccatgattaaagtaggaattataggaggagcaggatatacggcaggcgaactgattcgcctgcttatcaatcaccctgatgtggagattcatttcattaacagttcgagcaatgccggaaataagattaccgatgtacacgaaggactgtatggcgaaaccgatttgacctttaccgatgaactgccactggatgaagtggatgtggtatttttctgtacggcacatggtgacacgcgcaagtttatggaaagccacaacctgcccgaagacttgaagataatcgacctgtcgatggattaccgcattgccgctgaagaccatgacttcgtatacggtcttcccgaactgaaccgacgcaccatctgtcatagcaagcatattgccaatccgggatgtttcgccacctgcattcagttggggctgttgcccttggcaaaacacttgatgttgaaaggtgatatcattgtaaatgccataaccggaagtacgggagccggagtaaaaccgggagcgactacgcatttcagttggcggaacaacaacttgagcatttacaagccgttcacgcaccagcacctgccggaaatacgccagtcgctgaaacaattgcagaacagcttcgatgcagacatcacgttcatcccttaccggggcgacttcgcccgaggcatctttgccacgaccatcgtaaagaccaaagtggaattgcctgaaatcgtgaagatgtacgaagagtattacgctgaagactcgttcgtgcatatcgtagacaagagcatcgacctgaagcaagtggtcaacaccaacaagtgtctgattcacttagaaaaacacgaagacaaacttctcatcgtgtcttgcattgacaacttgctgaaaggcgccagcggccaggcggtacacaacatgaacctgatgttcaatctggaagaaactaccggactcaagctgaagccaagcgctttttaatagccctattcgtttcatcaataaaaacagtaaaaaataaccagaagaagaatgaaggaaataccctctgaattcttcattcttaattcttaattcttaattcttaatttaaatgagacttttcgatgtatatcctctctttgacattaacattgtcaagggaaaagcctgccacgtgtgggatgacaaaggacaagaataccttgacctgtacggagggcacgccgttatctccatcgggcattcacacccgcattatgtggaaatgataagcaaacaagttgctatgctgggattctactccaactcggtcattaacaagctgcaacaggaagttgccgaccggttgggagcgatgtgcggctatgacgattaccagctgttcttaatcaattcaggagccgaagccaatgaaaatgccctgaaactggcgtctttctataacggacgcacacgcattgtttctttcggcaaagctttccacggacgtacctcgctggcggtagaagtgaccgacaatccgaaaatcatcgctcctgtcaacgccaaccaacatgttacctacctgccgctaaatgatacagaagccatgaaagccgaactggcaaaaggcgatgtctgcgccgttatcattgaaggtattcaagggataggcggcatccggatacccgatacagactttatgaaagctttgcgccaagcttgcgacgcaaacaacaccgtactgattctggacgaaatccagtcgggttacggacgaagcggcaagttcttcgctcaccaatacagcggcatccgccccgatatcattactgtagccaaaggaatcggcaacggtttccccatgggaggcgtactcatcagtccgaaattcaagcccgtttacggacaattgggcacgactttcggcggtaatcacctggcttgcgccgcagcaattgccgtactggatgtcataaaagaagagaagctgatagaaaatgcggcaaaagtcggcacacatttattagaagaactgaagtgtttcaagggcatcaaggaagtgcgcggatgtggtctgatgatagggctggaatttgaagagcctgttaaagagctacgtacgaaactgctcttcgagcaaaaagtctttacaggtgtaagcggaaccaatgtcatccgtctgcttccccctctctgcctcagcatgaacgaagcggatgagttcctcacccgcttgcaaaatgcgatgaaaacaatagggtaataaatttgcatagtagcactacctgtctaagggaatgaagtgaagtatcttcaatgtctacgagatgcttcacttcgttcaacataacaatagaaaaatgaataaaaaatcccccgttagaggacgagggaacctaatgttttcacaacggaataatccttattgtgatttgcttcaaattagtgagaacaaagttaaggaaaaagtttgaaaagacaaattttgtcgcaaaaaattcatagctttgggaaaaatatataaagctatgaaaccaaaacacatcttaggattagatttaggaaccaacagtataggttgggcagtgattaacgcatccaaaaatgaagaagataaagaacaattggatggtataaattgtgatggagtacgaatcattccaatggatgcatcggttttaggcgattttgataaaggcaattcaaaatcgcaaacagcagaccggacaaaaagccgtagcgtccgccggttatatgaacgaaacaaactgcgccgtgagcggttgcaccggatattggatttattaggatttttaccatctcattattctcaacaattggaccgttatggtaagtttattactggaactgaacccaaattgtcttggtataaaaatgaacaagggcattggtctttcatctttcaagattcttttgatgagatgttggctgatttttatcaagagcaccccgatttcatatcaaaagggcaaaaggttccttatgactggacgatttattatttgcgtaaaaaagccttgacacagaaagtcaataaagaagaactggcttggatattgctcaatttcaatcagaaacgtggatattatcaactgagggaagaagaacagcaagaacgtccttctaagacacgtctatactttgatagccaaatcgtaaccgatatcattgataccaatcagacatataaaggaatgaaagtgttttctgttatattggaagacgggacaagaggaaagattttcaagaaagaaatacctgattggattggtcaaaagaaagacattattgtgacaatcgatcttgataaagacggaaaagacaaatatgatgaaacgggtgaacttagttgtcgttttaagattccatctgaacaagaatgggaagaacaatgggaactgataaaaacaaaaacacaaaaggatttagatgattcagggaaaaccgtgggtgcctatatctatgataccttgttgcaaatgcctaaacaaaaaattcgggggaaattggtgcgtacaattgagcgtaaatattataaggaggaattgcgccgaattttagaaaaacaaaaagagtttcatcctgaatttcaagaccgaactttatacgaagcttgtctggaagaattatatccgcaaaatgatgcacaccgcaatctgatagccaatcgtgacttgatttacctgttagttgacgatatcttgttttatcaacgtccgctgaaaagcaagaaatcgttaatcgctgattgtccctacgaagaatacatccatacagacaagcatacgggagaaatccaacattttggaataaaatgtattgctaagtcgcatcctttgtttcaggaattccgtttgtggcaattcctttccaatctgcggatttaccagaaagagaaaacagtagagggaaaattataccttgatgtggatgttacttccgaatttttgaaagacgaagaggattatgccgatttatttgactggctgaaccaacagaaaagcatcaagcaagatactttcttgaaatgtcctttgttcggattgaaaaagaatgacatggcaaactatcggtggaattatgtggaagacaagccttatccgggtaatgaaacccgtgcgctcattctcggacgtttggaaaaagcaggaatacccgccgacttcctgacacggaaaaaagaagaggccttatggcatatcttatattctgtttccgacaaagaagagcttggtaaggcattgatttcgtttgcggaaaagcaacagcttggcgaaaactttgtagaagttttcctgaaaactcctccttttgataaagagtacggttcttattcggctaaagccgtcaaaaagttattgcctttgatgcggatgggaaaatattggaatgaaaatgatatagacggtcagacccgtgaccggattgataaaatcatatcaggggaatacgatgaagccattcggacacgtgtgagggaaaaagcgattcatctggataaggtatcttccttcaaaggacttccgctttggctggcttgctatgtggtttacaaccgtcattccgaagcaaaggatattcagaaatgggaaaatccttccgacatagacgattacctgaaaaggttcaagcaacattcgttgcacaacccgattgttgaacaggttattttggaaacattgcgcaccgtccgcgatatatggaagcaagtgggacacattgatgaaattcatgtggaattgggaagagagatgaagaaaaccaaggacgaacgtgcgaaaatgacccggcagattcaggagaacgagaatacaaatctccgcatcaaggctttgcttaccgaattcatgaatcctgaatttgaaatagaaaatgtgcatccttattcacccagccaacaagatttgttacggatttatgaagaaggagtatggaacagtgtggatgaagtccccgatgaaatagccacaattataaagaaatttaatgaaagcgacattaagaaacgccctactacgtctgaagtcttacgttataaactttggctggaacaaaaataccgttcaccttatacaggcgaaatgattcctttgagcaaattatttacgcctgcctacgagattgaacatatcattccgcaggcaaggtatttcgatgattcattcagtaacaaggttatttgtgaatcagaagtcaacaagttaaaaagcaatatgttaggatatgagtttatcaacaaacatcacggcgaaaaagtacagttgacaggaggcaagtctgtggaaatcttctctgtaggctcctacgaacaattcataaaagacaattactctcgcaatgctgccaaaatgaagagattgctcatggatgacattcctgaacaattcatcgcccgtcaactgaatgatagccgctacatcagcaagttggtcaaatccttattgtccaatatcgtacgtgaagcaggtgaacaagaagaaatgtcgaagaatgtaattgtctgcacgggcagtattaccgaccgtttgaaaaaagattgggggataaatgatgtttggaacaggattatacttccacgtttcttacgattgaacgaactgacagaaagcaatcgttttacgtcggttaccgcaagcgggaatgtgattcctgcaatgcctcttgaattgcagaaaggatttaataaaaaacgtatcgaccatcgccatcatgcaatggatgccattgtcatagcttgtgccaaccgtaatattgtaaattatctcaataacgaatcggcaagtaaaaatgcccaaacttcccgttacgacttacaacgcttattgtgtgataaacaaaaaacagacgataagggagattaccgctggtttatcaaaaaaccgtgggacacttttacccaagatgtttataccgcgttgcaagagattattgtcagtttcaagcaaaatttgcgtatcatcaataaaaccaccaatcattatcaacattatgaagccggtaagaaagcaataatttcccaaaagaaaggagacaactgggctatccgtaaaccgatgcataaagataccgtatatggagaagtgaatcttcgaaggataaaaactgtatcgttaaaagaagcattgataaatctgaatgctgttgtggagaaagatttgaagaaaaagctgaaagaattgttatcgcataaccagaatgagaagcaaataaagaagtatttcgaggagaataaggatgtttggtcggaggttaatctgaagaaaatagacgtttattatttctcgaaggaaacgaaagaccgtttctttgccactcgctttggtaatgacttggtttctgtttttaaagattgcaaggacatggataaagccaaagataaaattaagaaaataaccgatacaggcatacaaaagattttgctacgccatttggaagcaaatgaaaacaacccagaatgggcattctcacccgaaggcgtcgaaacgatgaacaaaaacatcatcgaattgaatgacgggaaatggcatcaaccgatttacaaagtacgggtatacgaaaaagcagataaattcgccgtaggacaaaacggtaacaaatctacaaaatatgtagaagccgctaaaggaacgaatctgttttttgcaatttatgaaacagaggtggaagacaaaaatacaagtgagataatcaagaagcgtagttatgccacaattccgttgaatgtagttattgaccgtcagaaatgtggattaccctctgtgccggaagatgagaacggtaacctgcctaagtttgtgctttcacctaatgatttggtatacgtgccaacaaaagaagaaatacagaacggaaatacagttccattggataaaacacgtatttataaaatggttagttgtacggggaatcaatgtttctttatccaatttcatgtggctaatgttattgtagataaatatgaatattctgcaatgaacaaaatggaaagagctataacaggtgaaatgataaaagaaatttgtattcctatccagatagatcgattaggaaacataatcaaaaagatatgataaagaaaacactttactttggcaatcccgcatacttatccttgcgcaatgcccagttagtcatcaaacttccggaagtggaaaacaatgcaacacttccggaagtgatgaaacgtcagtcggaagtgaccaaaccgatagaggatttgggagtcgtggtgctggacaataaacaaataacaatcacttcaggtgcgatggaagccttgttggaaaacaattgtgcccttatcacatgcgacagcaagagtatgccggtcgggctgatgcttccgctttgtggtaataccacgcaaaatgaacgctttcgagagcaacttgccgcttccttgccactaaaaaaacaattatggcaacaaaccattcagatgaaaatcaataatcaggccgccgtattatccatttgcacgaaagaggaatcgaaatgcatgcatatttgggcaaacgatgtccgtagcggtgacccggataatatggaagcacgtgcggctgcttattattggaaaacactctttgccgatttaaacggattcactcgcgaccgcgaaggcataccgccaaacaatttgctgaattacggttatgccatccttcgtgccatagtggcacgtggattggttaccagtggcctgctgccaacattaggcattcatcatcacaaccggtacaatgcttattgtttagcagatgacatcatggagccttaccgtccatttgttgataaattggtctttgatttatactgtcaatacggtgaagatgtatcgcttacgaaagatataaaagctgccttactttccattcctacagtcgaagtgcggataaacaagaaacgcagtcccttgatgattgccgtaggacagactacagcttctttgtacaaatgtttttcaggtgaacttcgccgaatcgtttatccagagttttaaaatggaccgttttagtgaatatcgggttatgtggatattggttcttttcgatttgcctaccgagacgaagaaagacaaaaaggcttatgccgatttccgtaagaacctgcaacgtgatggatttacgatgtttcaattctccatatatgtccgtcattgtgccagcagcgaaaatgcagctatacatataaaaagagttaaatcttttcttccggagttcggacaggtaggaatcatgtgcataacagacaaacaattcggtcaaatagagcttttttatgggaaaaagcctcaaggtgtaaagacaccaggtcagcaattggaacttttttaaaataaagaatcccgccagacacgacgggattctttattgaaaacctaattttttctttttctagacgttcatataaatcattgaaaatcaatacagaatagaaatcctgttgttttcaatggttcaaagatactaatttgaaagcaaatcacaacgaacctgctacgcaaaagaagccccgccgtgttgttttcaatggttcaaagatactaatttgaaagcaaatcacaactttagtatgttggttgttagtgtctttaagttgttttcaatggttcaaagatactaatttgaaagcaaatcacaacggtgccatggttggcaaggttaatgaggtgttgttttcaatggttcaaagatactaatttgaaagcaaatcacaacgaataacaattaatgattaaacttaatcctgttgttttcaatggttcaaagatactaatttgaaagcaaatcacaacatattatccggtgaaaatcgctatcaatgtgttgttttcaatggttcaaagatactaatttgaaagcaaatcacaactattcggtcaagagagtttcgccgccgattgttgttttcaatggttcaaagatactaatttgaaagcaaatcacaactgaatggcaaaagctattctacaaatacaggttgttttcaatggttcaaagatactaatttgaaagcaaatcacaactattgaatttataaacaaaatatttagcgtgttgttttcaatggttcaaagatactaatttgaaagcaaatcacaacaggttttagttcgttatattcgtggtgtcggttgttttcaatggttcaaagatactaatttgaaagcaaatcacaactaatttttcgatgtatacggatacaaaaagttgttttcaatggttcaaagatactaatttgaaagcaaatcacaactcacccgtcacggtgtacgcctcgaaataagttgttttcaatggttcaaagatactaatttgaaagcaaatcacaacgacttgtacaaggtaatttattcgattcctgttgttttcaatggttcaaagatactaatttgaaagcaaatcacaaccaagttcaaaatcataaacgaacacatacggttgttttcaatggttcaaagatactaatttgaaagcaaatcacaactttctaacgaacatgatatctcgccatttgttgttttcaatggttcaaagatactaatttgaaagcaaatcacaactgatgttcgtgtggatgatattcgatacgggttgttttcaatggttcaaagatactaatttgaaagcaaatcacaactacgactgcaacaagttcaagaacggacgcgttgttttcaatggttcaaagatactaatttgaaagcaaatcacaacgggcaacgctagcggaaagttaggggaagcgttgttttcaatggttcaaagatactaatttgaaagcaaatcacaactcctgccattggaggaacgccggcgatagcgttgttttcaatggttcaaagatactaatttgaaagcaaatcacaacgcatcttttgtcttgcaatacaattcgaggttgttttcaatggttcaaagatactaatttgaaagcaaatcacaacataatgtgcaagtatagctgaatataccagttgttttcaatggttcaaagatactaatttgaaagcaaatcacaacctccgttacctaacacataagtagtcgtggttgttttcaatggttcaaagatactaatttgaaagcaaatcacaactggcgagcagcgcacccgtacatgggttccgttgttttcaatggttcaaagatactaatttgaaagcaaatcacaacagaaatagatcgtattgattatgaactcgggttgttttcaatggttcaaagatactaatttgaaagcaaatcacaacccgaatccgaaacaaaacaatttcacgctggttgttttcaatggttcaaagatactaatttgaaagcaaatcacaacttcatgtgttcttagtatgtatatacaagagttgttttcaatggttcaaagatactaatttgaaagcaaatcacaacactatagtagatggctatcaagttatagaagttgttttcaatggttcaaagatactaatttgaaagcaaatcacaacgggcagttgaacccttcgttcagcttcctagttgttttcaatggttcaaagatactaatttgaaagcaaatcacaactaagcacgaagcactgaaagataccgaaagttgttttcagtggttcaaagatactaatttgaaagcaaatcacaacagggtatccgcatccatgctgggaatacgggttgttttcaatggttcaaagatactaatttgaaagcaaatcacaactggttcagggaactaatcgcattaccgcaagttgttttcaatggttcaaagatactaatttgaaagcaaatcacaacgaaatggacaggcagcagatttaagaagagttgttttcaatggttcaaagatactaatttgaaaacaaatcacaacagaaacgtatgaaaaacacggacgcttgtatcggctgatgaggacgttcatgttgtgtagcgtgtatgcttgtatgaagcaatacgggcgcatgtgttctgtatggatattagctggcgggtgcaagttcccaatgaatcttaatagcggaaatcatattgccaagagcaagaatgtctgaatctgaatgaagttggcggtaagtacatagtctgacggacagaaacttcatataaggcatatacctatgggtaagattgctaaacaaactaaaccttatagcaatattcggaacggttggtgtaaatggaacagatataagatggaaagtcaatatccttacccgaggaggtcttacggacatgcagaattttttgcagaatgtatggagtaatgcttgccgcgataagccggcagaagtcatagtaatggggtagtagtcgctattggtgtgtagcgaacaaccgcttgctaacttccgcaatgtctaataataggaagcaccgtatgcggaacggacgtacggtggtgtgagaggtcggaaaacgaaagtaggaagaaaaccatttcgttttcctcctactcgattattaggtttgttttaaaaacttatttcggcaatgttccagaccaatcgttttgttctacgccaaatccggaattgacttctgcagcaggaattgggaatatcaaatctgaaattttgtaattgctataagtaaatgctatattcggtgcttgtatagcaaatacatctgctgcttcgtcccaacggcgcaagtcatacagacgtaaaccttcttggaacaattcgcgggcacgttcgtctttgatgaaagacagcagttcgtcagctgttgcgggcagattgtctacggaagtaatgtctgcgtttcgtttcgctacagtcagaagagaattgcgtgcgctgttcacatcacctgtttttgcatcagcttctgccataatcaggtacatttccggagcattgaccaagtagttggttgcgtatgcagggtttccgctagaatgttgtgaatattttcctcccgtaaatacaggagcggcacttgtagattcgtcagaccatccgaagatagatgtacggcaatcgttttctccatacattgcctgcagtttcgggctcgggctgaaattataggtagaccataatgttccgcttgagttagccgaccagttatcggtttgagtaatagctaatgaaagcaggctttctgtatttgaagtattgccactgaacaatgcggcgtatgctgtagcatcgtatgttaaagtagtgatgcctttttcattcaatgcttgttgtgcatactgtttcgcttcactccagttctccagatacaggttggttcttgccaataatccgtaaacggctgctttattcatgtataggatagaaccacggtcacctccggctgcatcgaaatggctgattgcgttgtcgaaatcagacaaaatcgccgtataagtttcaccaatggtagaacggcttacttgggttagcgcttcaatcggtgcttgatcgattacgacgatacccggctctgacgagaagtcactgccgttcacctttacctgatgggcataaatgttaaccatcatcaattcggcataaccacgcaaagcgtatgcttctgccatgcatcggtctaattgggttttttcttcgtcattgcttccttcatataaagcttgcgatgcttggatgacacgggttgcgttgtccgctaccttataaccatattcccaaatgtcctgtaagtaggtatcggtatcaaccacggtataagtatagatattgttaaagtggttggtctttgagttccaataagctatatcggtcggtatatcaccgatactgatggcataatttccggcaaagttatagtagaaaaggttataataggtaccgttcaatgccgttgaaatgttgtttacgctcgataaacctccttccgaatcaattccgttgtagtaatccgtttccagaaaactttcaccacaacttgaaagaccaaatccgagggttgctatagcaaaggctttcaatatattctttttcatataaatctcttttttaattattcctcaatcattagaatgtcaactggatacctccgatgaatgtgcaaattgcagggtattgccatgcgattacaccattggctgacgtttcggggttataaccgatgaagtcgtttgatgcgaaagtataaaggttatctaccgagatatatgcacgcagtttttggataaacgctttggttgtccatttttgcggcagggtatagcccaatgtgacgttgctgattctcaaatagcttccgttatacaagaaacgggaagaatattgagtcgcattgttcggatcttggtaaatatattgcggatacttggcgtctttgttttccggagtccaagagttaagtgccacgtcttcaagcggtgtgcgcaatgacatgccgaagccggtaaatacagcacctgaatcgtaaaccttacctcctacacgatagttgaagttgatattgaaatctaaatctttccatttcaagttcgttccgaaacctcccaatattttcgggtcagcatctcctacgtaacgttttgatgcggcattataatccgatgtagtctcgttgcctgtttcgttcaggtaccaaaggggcttaccggtttcgcggtcaacgcctgcatattctttcatatagaactgggtataaggacgtccctcttcgacaatttggaaagtatattccaaaggatcgtcggtagaaagcttgataacctcattcttgttccaagtcaggttggcaaagaagttccagttgaagtcttttcgctgcattaatgctgcgtttacagaaaattcaacgccccggttgcggattttaccgatgttttggtaggttgtcgaaataccagtcgtcattgacagaggtacttcaaacaaagcgtccgatgtaattgagttgtagaagtcaaacgtaaagtgcaagcggtgcaataaagaaaggtcaaagccgatatcaaacttcttcgatacttcccatgtcaaatccggattggatatgctggtcgggatcatacccggaatctgattgtagttataacctgctgaatagaaaccgcgggcagcataccagtcgatatcctgattacctaccgtaccgtatgaagcgcgaagagtcaggttgttgatgatgttgttgtctttcaagaaatcttcacctgtcatgcgccatttagcacctactgaccagaagttaccccaacggtggttggcaccgaatacagacgaaccgtcacgacgatatgatccggacaaataatacttgtcggcatacgaatagtgcgcatccatgaaataagaagccaagcgtgcctcttgtttataatactcagagccttggtctgtaccggcagtggtcaggtcacgcataccgtctgcagagaacgggaagtctgacttagcgaaatattcgtaatgatagctctttttctgcatttcttgtcccaacataacgctcacgttgtgcttttcatcgaatacatagttccaacccagaatgttgttccaggtaatgacggtattcttagaattatacaactgacccaatccgttgtagtccataccttgtggattatattgggcactccaatactgatattggttcagttcgttcaagtttacacccaatgtcgtttttgcgtaaatgcctttgccgaaatcaatctggaaataggggttcagattgatggtttgcattttgttttcgttcaattcaccggcagtttcgtccattaatgccattgggttataattattgatattcgcatagttgccttcgctgtcataaaccggatccatcggggtcatgctcgaaatggctgctactaccggactactcatagaaccacttgtagaaagcgagaatccattttgggtagaatagctataagaggtattaacgccaactgtggcccatttgaatttgctgtccaagttcaaacgtccagagaaacgttcgaaatcagcgcttttaaccaaaccttccgtattcaaatagcctaggctgacataatatccggtagaaccgctacggccctgcatacttaaattatagtcttgatagtaacctttgcgggtaatttcgtccatccagtctgtagatgttttgcggtcccagccgaaatattcgtctgccagataattataattgtcctgccactctccgccttgtgctgcggtcagaccgtctgcaaagaggttcatggtttgttcggcattggcaaaatccatattgttgttcgccatgctcacaaaaccttgctttacatccaagttgatattgaatttgccttcttttcctttcttagttgtgatgacaatcacaccattggctgcgcgtgaaccgtaaatagcagttgctgcagcatctttcaatactgtaacgctttcgatatcagacggattcaacatagacatcgggtcgacagagttattgctgctagcagtcagtgagccgtcgtctgtgtccgaatcaaccggcatgccatcaatgacgtatagcggctgagttcccgaatttaaggaaccacgaccacggatatagatagatccccatacaccaggcatactagtagagttattcatctgtacgcctggaaccgctccttccaatgcttttacaaagtttgcgtcactctttctcagaatcgcttcattgctaatcgtagtggcagcacctgtaaatgcggccttgcgttgtacgccataaccggttaccactacttcgtccaatgtccgggtgtccgccaataaaactacattcacaacaggttgaatctcaacttcctgcgtctgcagtccgatgaaagaaatcaccaaagttccggccgaacttggcacattactaattgtaaagttaccatctatatcagtaaccgtacctacagtggtaccttttaccaatacagatgctcccactacgggtaaaccgtcttcgtcagaagtaaccgtaccggttaccttcttcacttgcgcgtttaccagaccaaaacctatcatcaggcaggtcattaacagcatcaattttcttttcataaaaaattctctcttaaatttaaccttaaataaacacttttatctaattcagtttgcccgcaaaggtaagcatttatcttataacttgtacacttttggaaacaaaagataagaaagccttcgctttttaacactttaagatttcatttttgcataaaaagccaacgaatatgcggctctatggatatttaaaataggcaaaaaacgatgcaagagacacttgtgagcgcatttgcggataaatcgaacttcttacgttaaaaaaatggattcatgaaaaaaattagctacaggctggtgtacaatcgcaaaaaacacctcaatgccaacgggaaagccttgattcaggttgaagcttatttaacaggacaaaaggcatatttctcgacccacatttatgtgaagcccgaacaatgggattcgaaacacgggcgaatcgtgcttcatccgcacgaagaagcgttaaaccggatgcttgacgaatttcttctaaacctccaatatcgggagctggaaggctggaaacagggaaaggcggttgccttatcactgctgaaaacggaacttccggaagccacggaagagcgttttttcgctttcggtagaaaatgggtagaacattcggagcggaaaagaagcacccggaacaacctgaacaccacgttggcgctcgtgcaagagtttcgcccacacctgaacatttcggacatcgattacgcattcttgcttcaattcgaatcgtttttaaagcaaagagcgttaaagacgaataccattgccaagcatctgttccacctccgcacgttctacaatgaagccgtccgcgaagggcttgccgctccggaatcttctccttttactaaatacaagatacggactaccgagagccggcatgtgtttctccttcccgaagaattggaaaagctggaaaaattggcactggcgctggaagggaaaccgctgtgtcattcgctggacgcgtttctattttgttgctataccggattgaggtattctgattttacgaagttatcggaaaagaacctcgtctgtccggataaaaaacatgcttggct

SEQ ID NO: 1104 - DNA, 24560 bp, synthetic construct
  source 1..24560: mol_type = other DNA
  misc_feature 1..24560: note = Synthetic
cagcacttctacaataagcaccttgcaggccacttcccacaacaccaattcatgatagcacgctacaatgccgatcgcccactactctccgacggcaaagactacatcatgtggcaatactccgagcgcggacgtgtatcaggcatcagcaccaacgttgaccgaagccgcatcatcggcgacttctcactgcgcgaactcggcatgtagtacacacaaacctttctcccaaacctacaccctaagaaaacaaatcacacacatcatactccccacacacgacacaaacgcaaaggcgagcatcgtttcccaccggcacaacgcaaaaacgacgagcacacctttgcgttaattgtatgcccactaccaacagccgcacagtttccccaagaatagaaaatgaccatcctcttcgaagacaaccacctgctcatcgtcagcaaacagccaggcgaaatcactcaaggcgacaaaacaggcgacaccaccctgctcgacaccgccaaagcctacatcaaagaaaaataccacaagccaggcgaagtattcctcggactgccccatcgactcgaccgccccacaagcggcatcgtcgtactctgtcgcaccagcaaagcactcacgcgtatgagtgccctctttcgcgaaggaaaagtcagcaaaacctatcacgccattgtacctcgaatacacaccaccgacaaccagtggcaccaactaacccactatctcatccgcaacgaaaaacaaaacaaaagctacgcctatcccactcaacgccagggtagcaaacaagcccaactcaagtatcacatcatcagccacaacgaccgctacaccctacttgaaatccaactactcacaggacgccaccaccaaatacgcagccaactcgcagccattggcctcaccatacgcggcgacctcaaatacggcgcaccacgctccaatcccgacggaagcatctgcctacatgcacgcaccatctccttcacccatcccgttacccaacaacccatcagcctcacagcaccctatcctaccctccccctttggcacaccttcaaataaagaggtgctccataaatacacgctctgcaaattgcacaagttggaagtgcgggcgtcctcgcccgcaagaacaccaccgatgcgactattgcaggtgggatgttcgcaccccacacgtaaaggttcctgtcgcagtgccttaagagcgcaggcatcccgtctgctacaagcattttataaaggttttaaatcgcacgcactagcacaaaaagcacgcctctttgtggatggttgcaatcaaacaatcctatcgttgcggaaacacgataggcttctttcgcgtgaacaccgtacgaaaattacgtgaacaccgtacggtgcgcagcgaaaacataggcaacttcaagcaaagaggtaacgtttttcaagcgaaagcctcttactgaacaataatgcagctcctttcggaaaggttacgcttttgggataggatgaagttgactatgaaggggaatcatcgtacgccccttatgctatgcgctatacctgctcacacacagtagccttgatatacagagtcggtcagtttccttctcggtctgcccaacacagcatctcaaaatctctttgaaacctccctggctcttgtctaggccttcacaacactgacgatatccgtccctatattcttcttgcgtaggaacatgtcgcaaaagtttgctgaaaacctaagtctcgctctgcttattgccaaaactgggagcgcaggcatcctcgcctgcaagaataccacagatgcgactaatgcgggagaagacgcccgctctcccaactttggcggcgatggagttaaaaaaatacccccaaatcatagtgctgatttagaggctaaagtataagtataaaaaaacactgcttatcggaatttcaggagattgatcatgctaaatcgcccaagtcaagaaattcgtcggacataacctctcgttgcatccaacaaaccatatcacaccaacataggtcagtccctataaacaagtcctcaacgaataaaatgcatcggctgccaaggctcatacgaaggttcttgagcagttcccgtacgcaattgcttcaacaagtaagccatgttcagacccagtgtgcgcatcgtttgcataccctcagtgtccagcgcagcctgaccaggttcacgcccatacacaatgttccaatattgcgacgtcagcacaggcatattcatcatctgaaaaggcattagcagcgattgcaacgcagccgtagcacccccacgacgacaaaccgccacaccagccgcaggcttgccagcaaaagcacttccaccgctaaaaaacatacgctgcaagagcgaaagcaccgtaccattcggttgaccataatacactggcgtgcccactatcaaaccatcgcattgacgcatcaactccacggtctcattgcaaatatcgtcattaaacacacattgccctttcgtcatgcattgaacacaagcaatgcaaccacgaacaggcttagcacctatctgaaccaattccgtttcaatttcagcagcttcaagcaccttagccacctccttcagagccacaaacgtgttgcccgccttgcgcggactaccattgacaagaagaactttcatcgtaaaaaataattacctataaaactttaaaaacaaaaatacaaggcaaaaatacgcgtttcaaaccaccaaaaatccacacaacgcaaaaaaaacaacaaaaacgaaaaaaaaatacagaaaatttgcttgtattaacaaaacactctacttttgagttttgaaaagtggagttggcaaacaccgtagcctaaacttcacgaagctgtcgaagaagaaaaaaaacttaaagcaaagatagtcagcgacattaagaaccattcgctgacaacattgctgcaacctgcaaacaagataacacacaaacaataaatatctattaacacaaacaacatcaatacaggctatgccctacttacattttgacaagatgcagatgaccaacctgcaagacagcctcttcaaagagctgctcatcaccaacaggcaaggcgcatactgctcaacgacacttgtaggatgcaacatccgcaagtaccacggcctacttgtcgtgccggcacctgagattgacgacgagcgccacgtattgctctcctcgctcgacgaaacagtaatacaacacggcgcagagttcaaccttgggcttcatcgctaccaaggcggccactacagcccaaagggccacaagtacatcacagcattcacctgggacaaagtacccacttggacctatcgcataggcggtgtaaccctgcaaaaagaaatcgtatttcgccgcaaaggaggcttccaactactcgtgcgctacaccgttatagatgcccattcattaaccacactacgcctccgccccatgctctccttccgcagcgtgcgccattggacacaccaaaacaacgtagccaacaccggctacgaatccgttgaccaaggcatacgcatgaagatgtatgcaggctaccccaacctctacatgcaaacaaaccaacccgcccgcttcgtttatgaaggcgactggtatcgtgggttggaatatcccaaagaagccgagcgcggctacttcgacgtagaagacgccttcgtaccaggttattttgaagtagaactcaaaaaaggcgaaagcatcgtatttagtgccggcactcaagaagccaaagcagccaagctcgaaatgagcatggaagccgaaaaagtaggccgcgacagccgcgatagtttcttccactgcctcgtcaacgctgcccaccaattccgcgtagaaaaagacaacgacctatacatgttagccggcttccactggttcaaagcacgcgcacgcgacacctttgcagcattgccaggactcacactggccatcggcgaaaaagaacgcttcgaacaatacatggcaacagccgaaaaagccctgcgtgactatatcgtaggccgtcccatcagtgttgacatcgcagaaatggaacagcccgatgtattgctatgggcagtgtggtgcctacaacaatacgggaaatacatcagtcgcaaagaatgctacgagcgttacggcaagttgctcacagccatggtggactacatttgggaaggccgccacgaaagtctcttcgtacacgacaacggcctactctatgccagtggcggtcgcgaaaagcccatcacatggatgaacagcacagcaggcggcaggcctatcgtgccacgtagcggctatatcgtagaattcaacgccctatggtacaacgccctcaaattctacgaacaaatcctcaccgagtttggcacagaagacgaaaagataaaggcccgccaagctggaaaagatgctgaaaaagtaggtcaatccttccgcgaaaccttccttaacgaacacggctacctcttcgactacgttgatggtcaacttgccgattggagcgtacgccccaaccaactcctgggcatagcacttgacttctgccccttagacctccgtcaacgcaaaagtgtactcgacatttgcaccaaagaactcgtcacccccaagggcatacgcagcctctcgcccaagagcgggggctacaacccactctacacaggctcacaaccacagcgcgaccaagcctaccaccaaggcacagcctggccgtggctcacaggtttttaccttgaagcctatctgcgcgtatataaaatgagcggagtgaactacattgagcgccagctcatcggatttgaagaagaactcttctaccacagcttgggcaccatacccgaactcttcgacggcaacccgccattccatggccgaggcgcagtttcattggccatgaacgtaagcggcatattgcgagctatacgaatgttggaaaaataccaacgcgaagaataaacagccaccagcgccctttactaaaaaagaatagcaataggcgcacaggccaatcaagcaaccaaagagacacacatagaccctacttatgaaagttttaatgttcgggtgggagtttccacctcatatcctcggcggtctgggcacagccagctacggcatcacaaaaggccttgcagccattcccgacatggacatcacattctgcatccccgcgccatggggagacgaagacaaaagcttcatgaacatcatcgggatgagccaagtgcccatcgtatggaaagacgtagactaccaatacgtgcaagaacgcatcggcgacaaaatgacaccagagcaatactttgcactgcgcgaccacatctacgccgactttaactatcggcagaccgatgacctcggctgcatacagttctcgggcaaatatcccgacaacctccaagacgaaatcaacaactattccatcgtagcaggtgtcatagctcgtcaacaagaatacgacatcatccacgcccacgactggctcacctatcccgcaggtatccatgccaagcaagtcagtggcaaaccactcgtcatccacgtccatgccaccgacttcgaccgttcacgaggcaaagtaaatcccaccgtctatggcatcgaaaaagacggcatggaccacgccgactgtatcatgtgcgtcagcgaactcacacgccaaacagtcatcaaccactaccaccaagaccccgccaagtgcatcgccatgcacaacgccgtctatccgctcgaccccgaaatcaaagaattcgttgacatccccatcgaaaacgaagccgagcgcgacaaagtagtaaccttcctcggacgcatcaccatgcagaaaggaccagagtacttcgttgaagcagcagccaaagttctcaatcgcaccaaaggcatccgtttctgcatggcaggcagcggcgacaagatgaacgagatgattgacctagttgccaagaaaggcattgccgacaagttccacttcccaggcttcatgaaaggccatcaagtcttcgaagctttccgcgaaagctatgtgtacgtcatgcccagcgtgagcgaaccatttggtatcagtccgctcgaagccatgcaatgcggcgtacccagcatcatcagcaaacaaagcggatgcgccgaaatcctcaccaattgcgtcaagaccgactattgggacattgacgccatggcggatgccatctatgccctttgcacttatcacagctaccaccactatctcaaagaagaaggtcgcaaagaagtagatcaaatcacctgggaaaaagtaggcgagcgcatctacgaagcctataagcgtgcactcggctggcaataaacccacacctcatttatagataccaattaaagaatacacaaaaactcacacataagacaacgacaagaaccatgaaaaccgtttgcttatactttgaaatccatcagaatatccatctgaaacgctatcgcttcttcgacatcggcaccgaccactactactacgacgactacgaaaacgagcgaagcattcaggaaacagccgagcgtagctatgtccccgcactgcaagccctgctcgaaatgtcggaacgctatggcagctatttcaagtgcgccatcagtctcagcggaagtgccattgagctcctcgaacgctatgcgccccaagtgcttgacctactcacccaactcaacgaaacaggttgtgtagaatttctcgccgaaccctacagccacggtttctcgtcaatgaccaaccgcgaaactttccgcgaagaagtaaagcgcctctgcaaaaaaatcaaaaccctcttcggcaaagagcccaaaatcttccgcaacagctgcctaatctacagcgacgaaatcggtgccgaggtagccgacatgggcttcaaaggcatgttggcagaaggagcaaaacacgtattgggctggaaatcaccccacttcgtttaccactgcgcacgcaaccccaaactcaagctactcctgcgcgaccacagcctcagtgaagacatcagtttccgcttcaacgacagttcgtggagcgaataccccctcttcgccgatacctatgccaagtggatagccgacctgcccgaagaggaccaagttgtaaacatcttcatggagctttgcgccttaggcatattccaacccctttcaagcaacatcctcgaattcatgaagtcactgcccgaacagctcaaagaacgcggcgtagtcttcagcacacccagcgaaatttgctccaagatgaagagcaccggcgaactcaacgtgccctaccccacgtcatgggtggacgaagagcgcgacctctcgccatggcttggcaacgacatgcaacgcgaagctttagaaaagctctatagcgtagccgatcgtgtgcgcatctgcaacgacaagcgactcaaacaagactacgactacctccaggcctccaacaacttccgcttcatgagcaccaaggccaatagctatggcggttatcgcggcatctacgactcgccctacgatgccttcaccaacttcatgaacattctcggcgacttcaacagccgtatcaacaacctctatcccgagttcgacaacgaagagctcaactccctactcaccaccatcaagaaccaagacgaagagctcgaacgcaaggataaggaaatagaaaaactccaacacctgctcggtcaactcgaagagatggaaggcggatttgcaaaagccgaaacacccgcagcaccaaagcctgcagcaaaaaaagccgcgccaaaggcaaaggcagaacccaaggcaaaagccgaacccgccaagaaaccagcagcaaagaaagccgcgccaaaggcaaaggcagaacccaaggcaaaagccgaacccgccaagaaacccgcagcaaaaaagacagcggctaagaaagccacatcaaaaaagaaataacaccattaacaacctaatctaatattcatggaagaggaaggggcggcaccgtcaaacaaggcagtgtcgtcccctttcaaaacttttacacatatagtcttataacaacatttttatgaaacgactctcactccccattgcactgttcctcttaccgttcttactccttgcacaagcaccagcgggctattacacccgcgccaacggcaaatcgggcagcgcactgaaaacagcactctgtgctatcatcaccagcggacacgtcgaactggggtatgacaacctctggaacgcatacaaaaccactgacgtacgccccgatggaaagctttgggacatgtatagcgacatgaccaactacgaccccaacaaacccagtggtagctaccatcaagaaggcgacgtgcccaatagagagcattcgtttccaaagagttggtggggaggcaacaagaacatagcctactgcgacatcttccatgtcgtgcccgccgacggttatatcaacaacatccgtggcaatctgcccttcggcgaaacaagcaatcccaacttcagttcacacggcggctttagcaaacgtggcccctgcgatgcctcaataggctatagcggcacagtttttgagcccaacgacgagtacaaaggcgacttcgcccgcatctatttctatatgtgcacacgttacgaagaaagttttgccacatggaatagtcccatgcttgccggtaacaagtatccaggctataccaactgggccatcaccatgctcctacgttgggcagccgaagaccccgtcagtcaaaaagaaattgatcgcaacaacgccatcttcacactccagaaaaaccgtaacccctacgtagatttccctggattggaacaatacgtttggggcagtaagaaaaacgtagcattagacatcaacgactacgaaggaagtggccatggcagtagtacaggaagcaaacccgcagcacccacattctcgccagagagtggagagctttcacaaaacaccacagttaccatcaccgcagcagaaggatgcaccatctactatcgcatcacgggcggcgaactgcaaagcggagcatctcccgtcagcatcaccatcaccgaagaaaccagcatcaccgctttctgctccaacgaatatggcgacagccctacagccacagcccactacaccgtcaccgaagcacaagagcctgaacctacacccaccgaaggcatcttcaaactcatcacctcagcaagcgaactacaagtaggcgataattacttaatcgtttgggaaagtggtccacgcgctatggcagaggcaaacggaaaagtgcgctcatacgttgacatcgtgcttacagaccacaccttcgacctcagcaaagcagacaagcagccaacaatcctacgtttaggacagaccgacgggtactacaccttctacatccccgccgaaactgcttatctcgcactttcatccgacgccaacaatcttggaaccgaagcaacattaacaactggcgcacaatggaccattagcttcacgagcaataatgccaccattaccaataggcagtacgatgaacgctccatctattacaacagctcatccccacgcttcgccgcttacaaaagtagcagcagccagcgccccgtacagctctatcgcgaagtaagcacatcaaccggcatctcatcgcccatggtaaacaccgcctcaagcctcttgcaaagctctgctcccatctacacactccaaggccgccttgtcgcaccaggcacaaaactccgtccaggaatctacatccaaaacggtaggaagtacatcgtgagataacacactaccccatacatttacaaaagcactgaggaccttaattcttcagtgcttttgtatcttattgaagcacatgtaacaaagcttttggagcaatataaaagaaaagaaaatgcccccgaagaaggtcgagggctacctaaatgttttcacaacggaataatccttattgtgaattgctacaaaattagcactgcaaaagtggcaaaacattttgactgcagcaattcttttacagaaaatctttacatttgtgcgcaaaaaaacaaacaaaacgaataccatgaagaatattttaggacttgatctcgggcccaacagcattggctgggctgttgtacaagtagagaaagaaagtaccgaagaaacgctttttgctaacggcaaaatactgatggcaggtagtcgcatcattccgatgtcacaagataccttgaacaactacgaaaagggtgcttcaacttcgcaaacagataagcgtactggatatcgccaagtgcgccgccagtacgaccgcttccatcaacgtcgcgaacggctcaaccgcgttttgctcacgttggattacctccccgagcactatgctgagcaactcgaccgttatggcaaacttcccaaagacggcgaacctaaattggcttggcgacaaacaacagatggaaagagcgaatttatcttccgagaggctttccttgagatggtggcggagcttcggaaagtgcatcccgatttaaaacgtattccctacgactggacactctattatctacgcaccaaagcacttagcaagaaacttcagcccgaagaattatcctgggtgctccacagcttcaaccagaagcgtggttacaatgcagtgcgcggcaaggacgatgacgaaacaagcaaccccgacaaattacaagaatatcattgttcacggctcatcaatatcgaagacacaggcgaaaaactacgcgggaacaccaactacaaacttacctttgaaggaggtacagtgtttgaagtacctttgcgtcgtcttactatctcaatcggcgaagaaattgaatacatcgttaccacaaagcttgacgaagacggacagccaaagttgaacaaacaaggaaaacctgatatttcctatagaataccaaatgccgatgacgcttggacgctcaacaaactgcgagctgaatttaccatcgaccaaagccattctaccgttggtcaatatattttcaacgccatcctgcgcaaccctcagcagaagatacgcggcgagttggtacgcacggttgatagacgtttctatcgcgatgagctacgtcgtatcctcgaagtgcagataccactacatccagctttgcaagatagagaaaaacttgaagaatgcctacttgctctttatccaagcaacgaggcccatcgaaattccatgcagggacgcgacttcaaggcattgctcatggacgatgtcattctctaccagcgtccgctgaagagcaagaagtcgcttatcggcgaatgtaagtatgaaacacatacctatataaataaggaaggcaaacgcgagcccataggcttgaaatgcgcttcacgttccaatcccttgttccaagaatatcggctctggcaattccttgaaaacctgcgcatactcaaacgcaagacactcgacggcaaccactaccgcacagatgttgacgtaacaacgctgtttttacgcacaaacgaaagctacaccagcttgttcgactatcttcgctctcgtgcagagatagaccaaaagacattgctcaagttctttaagctgaaggaagaagactatcggtggaactacgttgaagaacgcaagtatcccacttcagagacgcgcgccgaaatgctcaaacgattgaaaaaagcaggtgtgccaaccgaattcctcacccacgagctcgaaatggcactttgggaaatactctatagcgtaagtgggcaaagcgaattagaaaaagccttgcggaaatttgccgagaaaaacaaccttgaccaagagaccttctatcagtgttttcgaaccatcaaaccctactctgccgactattgtgctttctccacaaaagccctgcgtcgtttacttcccctcatgcgacgaggtcattattggaactacaatgctatagacccgcagacgcaacaacgcatagagagacttatcaacggtgaagaggacactaccatcagcaaccgcgtccgcgaaaaagccgaaacattgcgaaccgaaaccgactaccaaggattgccaatttggctggcaagctacgtagtttatggtcgccatagcgaagcctcagagattaaaaagtgggcttcgcctgaagaaatggaccgagacattcgctgtttccgccagcactccttgcgcaaccctattgtggagcaagtttgccttgaagccctgcgcaccgttcgcgacatttggaaagaaatcggaagcatcgacgaaatccacgtagagttgggacgcgaaatgcgtgccactgccaaggagcgcgagtcgcgccacaaccgacagttggaaaacgaacagaccaacctacgcatcaaagccctcctgcaagagtttatgaatcctgagttcggcatagaggacgtacgcccctactcgcccaatcagcaagagctcttgcgcatatacgaagacactgtcttgtcgcaagaagcaggtcgcatagacgagcccatccgcgaaatcatacgaaaattctcacagaccgatgccgctaagcgacccaccacagccgaggtgcttcgctacaaactttggcttgagcagaaatatcgctctccctacactggcgaaccaatctctctcagcaaactcttcacctcagcctatcagatagaacacgtcattccacagtcagtctattacgacaattcgtatagcaacaaagtcatttgcgaagccgaagtaaacctcctcaagggcaatatgctcggaatgcccttcattatgcaacatgcaggcgaaaaggtgcaatgctccgtgggcaacattgtcacaatctctacgcccgaagcctatcgcgcctttgtagaagaacactataaaggaaagaagcaaaagatattgctcagtgaagaaatccctacaaacttcacagcaaggcagatgaacgacacacgctacatttcgcgcttcatcatcggcgaactctccaaactggtacgcgagcataaccccgatggaaccctggaacaagaggcagtgtcaaaaaatatcctcatactcaatggcgcagtgaccgacaaactaaagaaagactggggacttgtagatgtttggaacggcatcattgctccacgtttccggcggctcaatgcgatggaaggcagtcagcgttttggccacgaagccatgaaagatggcaagcgatacttccaaatagaaatgccgcttgaactccaacgcggattccagcgcaagcgcattgaccatcgccaccatgccatggatgccatagccatagcctgtgccacacgcaccgtcgtgaactatctcaacaacgaccattcccacgaaggagcaggacgcgaagacatcaaacgcgccgtaagcagtaaacgcagtgggcagtggcttgttaacaaaccgtggaacaccttcacacaagaggcacgaaagcagcttcaacaaatcgttgtcagcttcaaacaaaacctccgcgtcatcaataagaccagcaatcgctacgtacgctacaaccctcagaccagaaagaaagtaatcttcgtgcaacaaaagggcgacagctgggccattcgcaaaccactccacaaagagagcgtctttggccgcgtcaatctgcgcacccagaaagccgttaacttcaaaacagcttatgccaacattgagcgcatcgttgataagcgcttcaaacatgccgtgctcgctgccataaaacgctacggcggaaaatgcaccgacaagcaagttctgaagtatatgcaaggaatgccccagtggaaagactttgacttcaagaaagtgcagatctatgtgttctcgaacgacgatgtaaagacacaaacaagcgccattcgcaaacgccttgacgacagctttgacaaaaagaaaattctgaccatcaccgacacaggcattcagcgcatcctcttgcgccatttggagcaaaacggcaacaatcccaaagaagctttctcgcccgaaggcattgtgcgcctcaatgaaagcatgcttgagctaaacggcggtaaaccccatctgcctatctttgctgttcgcatttcagagcctttgggaaacaagttttccgttggaatgcgtggcaatcgaagtaagaaatttgttgaagcagctaaaggaacgaaccttttctttgctatctaccagcaagaagatggcagacgcctctaccgttccgtgccgctcaacgaagtcattgagcgccaaaagcaaggactttcctcagcgcccgaacacgacgagaatggaaatgcattgctctttgtcctatcaccaggcgatttggtttatttgccaaccaaagaagagcgcaatagcagaatagacgttcaagccattgataagacacgcatatataagatggtgtcgtgttcaaataatagagcttcgttcatacagcataacatcgcaactgctattgtagataagaaagaatacacagctgctaacaaaatcgaaatctctgatgaaggcatttctatcaagcaatactgccttccccttgaggttgaccgtcttggccgataccggctgaaataaaccaaatgttccactgcgcagagagctacgtgcttttctgcgcttttttatagccttttactaccatgataaaacgcactctctattttggtacacctgcctatctctctctgcgcaacaatcagctcgtttggcaaaaacccgagaccaaaggagaaaaaaacttttccgagggagaaaaagctgattcagtccgaacagttccgattgaagatatcggcgtagtggtattagacaacaagcaactcaccattacgcaaggactacttgaagcactcgttgaaaacaactgcgcagtcgttacgtgcaactcccgatgtatgcccgtaggactcttgcttccccttgacggcaactacacacagcgcgaacgcttcacccaccaaattgaagcatccctaccccttcgcaaacaactttggcaacaaaccgtgcgccaaaaaatcttaaaccaagaggccatactgcgaaaaaacacctcggttgaaacacgctgtatgcgacgttgggcagaagatgtgcgaagcggcgatcccgacaacgtagaagcacgcgcggcagcctactactggaagaacttgtttttcccccaaatcgacagtttcgttcgaggacgcgaagaagccccaccaaacaatctgctcaactacggctatgccatacttcgcgccgttgtggctcgagctttggtttcaagcggtttgttgccaacactgggcattcaccaccataatcgctacaacgcctactgcctggccgacgacatcatggaaccttatcggccatacgttgatgaacttgtactcaagcttctatgcaccgaaccatgtgaagaactcacgcgcgaactgaaagcacgtttgctccaaattccagtgatcgatgtcgtcattggcggacagcgaagtccgctcatggtggcagccacaactacgacagcctcactcgctaaatgctttgctggcgaaatgcgcaaaatcacttatcccgaaatacaataggcaggcttttttatggaacgttttagcgaatatagaattatgtgggtacttatattctttgatttgcctaccacgaccaaaaaggagcgtaaagcagccgctcgctttcgcaaaaacatcatgggcgatggtttcacaatgttccagttctccatctacgtgcgccactgtgccagcagcgaaaacgcagccgtccacgtacgccgtgtcaaagcctttatgcccgaatatggtaaaataggtattctaaccattaccgacaaacaattcgccagcatccaactcttctatggccaaaaatctgtagccccaaaagccgccggccaacagttagaactattctgaggtacgcccctttccgcattgtccagagagagccccgcatcccataacgcatcaattgggagcgcgggcgtcctcgtccgcaaagagtaaccactataagtcaaatttgactaagacagacggactgaaactgagttcaatccgtctgtcttggttagaaacaaccttgatttttcttttctaagtagcctctttactcattgattaacaaatctttgtaaataatgagctgtttctaagggtcaaagatactaatttgtaagcaattcacaactattaagcaattcacaactattaaagaaaattaaatggattccatttagctgtttctaagggtcaaagatactaatttgtaagcaattcacaacacaacgacttcgccaattacgccctctgcagctgtttctaagggtcaaagatactaatttgtaagcaattcacaactattaaatgaaccttgatttaggttcatttgctgtttctaagggtcaaagatactaatttgtaagcaattcacaactaccaccacgcgcgcccgaaacgccaaaccgctgtttctaagggtcaaagatactaatttgtaagcaattcacaactacacccttgcagatgctctttcgtttcggctgtttctaagggtcaaagatactaatttgtaagcaattcacaacttttgccattatattcaataaatagcttggctgtttctaagggtcaaagatactaatttgtaagcaattcacaactacgaaaagaaacaagcgcgtgaaattctcgctgtttctaagggtcaaagatactaatttgtaagcaattcacaacatatgcgcaggatatgcgtttaacagcggggctgtttctaagggtcaaagatactaatttgtaagcaattcacaactatcttcctacgtattactcgttcgtgaccgctgtttctaagggtcaaagatactaatttgtaagcaattcacaacatcacagacgtgctaacagcgtttgtaaaagctgtttctaagggtcaaagatactaatttgtaagcaattcacaacaaaattgttcttcactatattcatgaggttgctgtttctaagggtcaaagatactaatttgtaagcaattcacaaccagagggcagatctacagtaatgcgaagagctgtttctaagggtcaaagatactaatttgtaagcaattcacaaccttcactgcgaagttcagcttcaaaggcggctgtttctaagggtcaaagatactaatttgtaagcaattcacaactaactatgtaaatcagaatgatgatagggagctgtttctaagggtcaaagatactaatttgtaagcaattcacaacacaaacatggaaaataattggctaaattcgctgtttctaagggtcaaagatactaatttgtaagcaattcacaacgacggctctttgcattcgccgccgttaagtgctgtttctaagggtcaaagatactaatttgtaagcaattcacaacgcaagcagcactcgcaaaggctcaagcatgctgtttctaagggtcaaagatactaatttgtaagcaattcacaactaagtctttgtttttgcccaacgctcaaaggctgtttctaagggtcaaagatactaatttgtaagcaattcacaaccacggcttatgcctaatttcgcggcaataggctgtttctaagggtcaaagatactaatttgtaagcaattcacaacagacccatgctcgtcaccgtactcggtatgctgtttctaagggtcaaagatactaatttgtaagcaattcacaacattgcttgaaatacaacgagagcgcgaaatgctgtttctaagggtcaaagatactaatttgtaagcaattcacaacaatcaacgcgaagccatgaagacgcagttgctgtttctaagggtcaaagatactaatttgtaagcaattcacaactctttagtagtataggaattagggtattcggctgtttctaagggtcaaagatactaatttgtaagcaattcacaactcttgaagcaagcgaagctcaacgcggcaagctgtttctaagggtcaaagatactaatttgtaagcaattcacaacctttgccacgtctattataggcatgacgcggctgtttctaagggtcaaagatactaatttgtaagcaattcacaactacattaaattttgtcacttttcaaggttagctgtttctaagggtcaaagatactaatttgtaagcaattcacaacctattggccgctaatgccgtcaaccaatgagctgtttctaagggtcaaagatactaatttgtaagcaattcacaaccaaagaatggttatgatcaaacaactattcgctgtttctaagggtcaaagatactaatttgtaagcaattcacaacttgcattttcaggcgtgtgtttatagactccgctgtttctaagggtcaaagatactaatttgtaagcaattcacaaccctttaagccaaaatactccacatattactccctaagttttccgactttcgagaaccagacgcaagtaaccccaatctaaatcgccaggtattcgagccttcacatcggcaagcggagcgtcatcgcccaaaagatcaaaagcggcatttatgatttgtagcagttgaggcggaagaatttctttgatcttgatatcgccagaagccacaaaccgctgcaagtgattacaaatcgtgccaaccgtaaaaccacgactcttagcgatctcgcctattgaaagtccatttacaaacaaatcataggaaatatcccacgtcttgggctttggttcctttgcctttgttgcctttttagcacgctttcggctaaggcgtccttcatctaaagcatcgagcatagccgtctgttttgccttgaggaatgtcgtggggtcaaaacctttttcagcaatagtgttgagcaaatagagacgcgccagccattgttgacgcaaatctggcaaacgactttgcagaagtttcatagcctgtttgttttcgctttttacatccttggtcaagcgtattggatctgagagaatttcttctaatttattcttaaaataatcagcagcagccaccacacgctttcgaaaatcctcctgctgaatcattgatatggccaactctgcaatttttttctcccatttacgagccacttccaccacttccaagcgaagccgctccgtcgcctgcaggtgtcgctggtacaacggtgcaaatttgcgagagaggtattcagaaaacacacgcaccacaccctcctctgcttgccatatcggctgcatatcaaaaagttctgtgagcaaatgacgctcgtattcctgtttcaagataggaagctgtgtcatcattgctgccgacggatcttgctgcccaagcatataacgatccacacgcccgtcgttaatgatagcgctcagaggtatcggctctgaaagcaccaatccatcgagcgaacgcaaacggctcaaagccacataggcctgcccaggagcaaatgaatggccagcgtcaacaatagcacggtcaaatgtaagtccctgactcttgtgaatagtaacagaccacgccaagcgcaacggatattggctgaacgtacctagcacctccgactcaatctcacgcgtcttctcattcaaagcatagcgcgtattctcccattgcacaacatctacctcaatcaacgagtcacttccttgaggagtcaccacaatacgatcttcagaaagctctgttacacacccaatcaaaccattatagtacgcaccattattcgtatcgttcttgataaacatcacctgcgcaccctccttcaaacaaagcgtcgcttctgtaggaaaagaagtttcaggaaaagtgccctccactttcgccttaaactcaaccatacgcgacggaagacgcatcaactcctgttcattgaagcgagaagccatatgattgtgcgtagtcaaacgaatatagccttctccaggcttagggataaaacctggcttataccgcgaatttaacagagataaatcagattccgaaagatgtcccgtgcgaacatgatttagcaattctacaaactgcaactcttgttgacgataaacatgcgaaagctctaccgtcacatattgaatctgccgcaaagcattcgaactaaaaaagtatggcgtttcgtaataacacttgataagcccctcctcttcaggagtaacaacaggcgtaagctgagctaagtcacctatcatcagcaactgcacaccgccaaaaggcctatgatggtcgcgataacgacgcaacacatagtcaatcgcatcaagcaaatcacagcgcaccatcgaaatctcatcaataatcagcaaatcaagcgaagcaataatcttgcgtttatccctaccaaagtcatatttactcttcaattcagccccaggaacaaacggcgaaagcgaaagttgaaaaaaagaatgtatcgtcacacccccagcatttatcgcagcaacgcccgtcggcgcaacaacaactacacgtttccgagtcctcgccaccaagtcgtgcaaaaatgtagttttacccgtacccgccttgcctgttagaaaaacactaatacccgtatattccacaaactcccacgctacgcggcgctccttgttgatatctacaactttttccatagccttcaatctttgtaaacaaaaaaacacggatagtaaaacgctacccgtgtcaacatttcttgagagcctcttgtcggattcgaaccaacgaccccgagattacaaatcacgtgctctggccaactgagctaaagaggcgggtgggtaagctctctgcatcgcgccgctacaaccaactacctttgctgcggtcaagccctggaggatttgaagggagctggccgtgcagcacttacccgttttgtcgttttgacgatgcaaaagtatgtcaagaaatccatccaaacaaatttttaagcagaaaaaaaactctttttatttgcacgtaagcaattttagtctaactttgcacccgcaaaaagcaatacaaaagctttttcaaacaacatacagagatccgctagctcagttggtagagcacaacacttttaatgttggggtcttgggttcgagccccaagcggatcacaaagtgatgccaacggaatcacgaaaacacttcaaagcaaaacaagaacaaagcactatcttgttttgcttttcctttataaatcaaggacatacactgcaacttcttgaaaattgggggtcagcggctaaagtcggttggtaaggtgcgccttaccaaccgactttagccgctgacccggaactcacccctgcgcaacttgcctatatctaccaactcctcggcaatggcatagcgatggacaatactatcttctatgcctttatgtactgcgcccgtctgcatatcattaaggcgcaagacgaagaagtggtcattgtcagccactggcgcaaagcatatcccgtgaagcgtaacgacctactccttgctgcacagacgatggacttcatcgacaacttgcccacgtataaatcttcgtctaaatacgaagccgaccagtttaaagcctatgaaaataaacgcgacgacagctgctatttctttggatagtttgtaaatttgcaggcgaaatcctattcgttaaatcggaatttggcaaacatttatatttatgaaagatattatcatttatacctcagaacggctacgtatatcaccaaaaacagcaagtgtagcagaatctatttctgccgctctatccaagttgaacgtagaacaccgagagttatctaataatcaaaattattggtgtcgggattatatgcctgtaatgattttcagtgatggcacttactctaaattcagatataatccagattatttagttgaatgcaagacgtaccataagactatagtcaatcaggatgaagtttgtaagggtctgcatctatttactccaactaatatgaatatcatatttgatggaggaaactatgtgagatgtggcaataaggttattatgacggataagattttcagcgaaaatccccaatggtcggctcttgaacttttgcagcatctaaaagattccttgtgtgctgaagaaataatacttttaccctgggacatgaaagacttctgcggacactcagatggaatggttgcacctctggatgataatcgaatacttttgaatggatgttggaaaaacaaagccaaaaaatttcataacagactcttaaaaatccttgaagctaaattcgatgttgttcaactcgatttagactgtaaagaagataaggattcatggtgctatctgaattttttaagagtgagcaatggtatattacttccatgtctttctgaaaataaagatagcgagagcgatattgcagctttgaatttttttaaaaaacttttcccagatttgaagattatccccatttatgcaaaacctttgataaaagaaggcggtgcactgcattgtgtaacatgggaatatattgcaaaaaagaaggagatttaatgaaaagtaaattccaatttttagcacatcgtcctgcacgtgtctttttatacccatcaatgcttccgtactttcgcagtatggaagcattttctttatctataaacgtgcccacgagttggcaggaactcacccctgcgcaacttgcctatatctaccaactcctcggcaatggcatagcgatggacaatactatcttctatgcctttatgtactgcgcccgcaagacgaaatggaatgagcagcagcgggcaagggctaaaatcctgtttcgtatgtttccttgcttagaacaagcctataacatctaccttgaactcattgatatttttaacaaaaagtccataccatccgcagcaaggttgaacttggcaagatggtacaacaaagttgagctgttcaacgatgaaggcttcagtaaagtaacagaaaccttcgagaaccacaacgaaaccataatcaactactttgaggacagactcacaaacgcatcagcagaatcgttcaacgccaaaatcaaagcactcagaagtcagttcagaggcgtcggagatataaaattctttatgtttagattagccactctttattcctgatagggtgcgccttaccaaccgactttagccgctgaccctgatttattgccgtatgttgctcactttgaggtacaaaaaaacggaacgttgaaattccgtctaattgtcctttttgtagcgcctacgggaatcgaacccgtgttccatgcgtgagaggcatgtgtcctagccgctagacgaaagcgccgttttggttttattataaatgattggccgttttggttttattataaatgattgtcaatgctttttcattgacgatgcaaaagtatataaaagtttgaacgcgccaaagttttgttcttcttttttaagtaatggaaaggaattcttttaatataggcgtatcttgatgcttagggttaccaagagaactttattctgccgcaataatttccattccttttaggactgcctgttcattagtgggaagtaaatgccagtggcgctcaggcagggttttcttgagtgctttaataacggtttccaccttaacaataggatgaagtttcaacaaacctccaaggacgaacatattgaaacatttcatcatttgtagctcagcggctgtctccatcgctggaatgtgaaaggaatggatatcgtttcttgttggtttgtcttgaataccaaaactatcgtaaattagatctcctcctgccttgacgcgaggctggaatttgtctaatgaaggttggttcaagcagattgctgtatcgtatttactgagaacaggtgaagagatgggatcatcgctcagaattactgtaacattagccgttcctcctcgttgttcaggaccataggcgggcatccaggaaacttcttttccttccatcagtcctgcatacgctaaaatcttgcccattgaaaggacaccttgtccgccaaaaccggctataataatttcgtgcttcatgagaaaactaattaatgtgtgtttcttcaaaccaaaggcaaaggtaacaagaaactcttggcaaccaaatctctctcgtacaaatttagtatggttaatcttttatataatgattgttgtaaaagctgtaagactttcctggcgcaatgagttacaaattctcgctttctatttggcttttcatagggattgactacttttgcgagtgaaaaacgtttttacaaatgctatcaagtgagaaaaacattgagcgcattgtgcatatattgcaagagagtaagcaatatgctgaattgcagttagagtatgccaagttggatgcaacgggaaagattgccgcagcgctttcggccaccattctttttgtcgttttgtttgtcatcggagctatattcgttgtactcctttcctgcacagcggcttttttgctcaatcaatacgtgacgcacaattctgccgtctcctttgcaattatttcggctatgtatctcgtagtcgcaattcttgtatatatgcgccgcaaacagtggataatcgacccggtttcgcgcatgttaggacgtctgttgc

SEQ ID NO: 1105 - DNA, 24557 bp, synthetic construct
  misc_feature 1..24557: note = Synthetic
  source 1..24557: mol_type = other DNA
cgttacagagagcagccactgcgtgagcaggcgcgaatctataaagacggtcacagttcggatcggagtctgcaactcgactccgtgaagctggaatcgctagtaatcggatatcagccatgatccggtgaatacgttcccgggccttgtacacaccgcccgtcaagccatggaagctgggagtacctgaagacggttacctaaaggagctgtttagggtaaaactagtgactggggctaagtcgtaacaaggtagccgtaccggaaggtgcggctggaacacctcctttctagagaagaccgatttaattattaatggttaattattaatgattaatgactgatggtatatttgattctttaaatcttgctggcaacaaaataaaatttgcaaatttgctaatttacaaatttgctaattagaacaaagtctcatagctcagctggttagagcgctacactgataatgtagaggtcggcagttcgagtctgcctgggactacaagcaaaagaagcttaaaaagaaggaaatttctaggagtgagctaggggaaggatcctcttacctcttaccacatatctcttacctagagacagggggaattagctcagctggctagagcacctgccttgcacgcagggggtcaagggttcgaatcccttattctccacaacaaacgtacattgacatattgggataaagagcataagagatcaataatagattattgattaatctaacgaaatattaaaaagaatcaaagagaacgagaggtacctagataattgacaattatcaattgttaattgtcaattgactaggactacaagcgcgaaaagttatgtaaaggcgtatgggggatgcctaggctctcagaggcgaagaaggacgtgataagctgcgaaaagttgcgtgtattggcacatacgagatgatacgcaaatatccgaatggggcaacccagtacattgaagatgtactacatcgtaaaggtgggcaaacctgctgaactgaaacatcttagtaggcagaggagaagaaaacaaaagtgattcccaaagtagtggcgagcgaaatgggaatagcccaaacccactttgttacggcagagtgggggttgtaggacccagatataggttgtagagctggattagaagtgtttggaaagacacaccacagagagtgaaagtctcgtataggtacagttttataaatcttatgggaatcctgagtaggtcggggcacgaggaaccttgactgaatcagccgggaccatccggtaaggctaaatactcctgagagaccgatagtgaactagtaccgtgagggaaaggtgaaaagaaccgtgaataacggagtgaaatagaccctgaaaccatacgcttacaagcggtcggagcagcgttaggctgtgacggcgtgccttttgcataatgagcctacgagttactgttaccagcgaggataagtatttcagatacgaatccgcatcgaaagagagtctgaatagggcgttaagttggtagtagtagacgcgaaacctggtgatctacccttgggcaggttgaagcgctggtaacacagcgtggaggaccgaactggttgtcgttgaaaagacttcggatgacctgagggtaggggtgaaaggccaatcaaactgggaaatagctcgtactccccgaaatgcatttaggtgcagcgttggtgtgagtttaatagaggtagagctactgattggatgcgggggtttcatcgcctaccaattcctgacaaactccgaatgctattaaatgctcatcagcagtgagggtatgggtgctaaggtccatatcctaaagggaaagaacccggaccatcagctaaggtccccaaatatatgctaagttgaccaaacgcggtctgactgcactgacagctaggatgttggcttggaagcagccatacatttaaagagtgcgtaacagctcactagtcgagcggttgggcatggataataaacgggcataagcatattaccgaagctatggggtagtacagaagtacctaccggtaggggagcattctataggcgtcgaagctaaagttgtgagacatagtggagctgatagaaaagaaaatgtaggcataagtaacgataaggcaggcgagaaacctgcccgccgaaagatcaaggtttcctcagctatgctaatcagctgagggttagtcggggactaacgcgcacccgagtaggggaagtggatgtacaacaggttaatattcctgtaccattaatctgataaaagtgacggaacgagataactaccgcgtactgacggaatagtacgttaaaggagcagttatagctttgatagtacactgaggcttcggctaaggtgatagagtggtgacaacgtttccaagaaaagcgaagattaatgcccgtaccgtaaaccgacacaggtgattgggaagagaattctaaggcgctcgagagattcatggctaaggaactaggcaaaatagacctgtaacttcgggaaaaaggtcgcctatcgtaagataggccgcagtgaagaggtccaagcgactgtttatcaaaaacacaggactctgcaaaatcgaaagatgaggtatagggtctgacacctgcccggtgctggaaggttaagaggagagcttagtggtaacacgaaggtttgaattgaagccccagtaaacggcggccgtaactataacggtcctaaggtagcgaaattccttgtcgggtaagttccgacctgcacgaatggtgtaacgatttggacactgtctcggccatgagctcggtgaaattgtagtatcggtgaagatgccgattacccgcagtgggacgaaaagaccctgtgcacctttactatatcttcgtattggtcttggataagtgatgcgtaggataggtgggagacttagaagcggctattctggtagttgtggagtcgttgttgaaataccaccctttgcttatctgaggtctaactttgcgtaaggcaaaggacaattcgtggagggtagtttgactggggtggtcgcctccaaaagagtaacggaggcttctaaaggttccctcagcacgcttggtaaccgtgcggagagtgcaatggcataagggagcttgactgagagacccacaagtcgatcaggtacgaaagtagagcatagtgatccggtggttccgtatggaagggccatcgctcaaaggataaaaggtacgccggggataacaggctgatctcccccaagagctcacatcgacgggggggtttggcacctcgatgtcggctcgtcacatcctggggctggagaaggtcccaagggttgggctgttcgcccattaaagtggcacgcgagctgggttcagaacgtcgtgagacagttcggtctctatctactgtgggcgttagaaatttgcgtggatctgactctagtacgagaggaccgagttggacgcaccgctggtgtatctgttgtcttgccaagggcatagcagagtagctaagtgcggatgggataagtgctgaaggcatataagtacgaaacccgccacaagatgagatttcttttaagggtcgtgggagatgaccacgttgataggttacaggtgtaaaggtggtaacatcatagccgagtaatactaatcacccgtagacttttcgcgcagcattctttttttactgaaacgttagttagaacaattgttaattattaattatcaattgtcaattgagaaaatatgttttttatccctatatgttaaaaatatgattaggaattggtattttaggttaagatacaaaaaggagttttaaaaagctcttatcttttacctcttacctcttacctaaaacgatttaaggtggttatagtcaaaggtctcacctcttaccattccgaacagagcagttaaaccttttagcgcagatggtactacacttgttgtgggagagtatgtcgccgccttcttataaagagcaattctgataaagaattgctctttttttgttaataaaaattttactttaaaaacttcttagcttcattcgcaatagcagtaataagtttattgctaactccattgcttaattgtcgagtatggataagaatacgtttgttatccttactaaaatgtaagttataccaatttttattacctacttctgttgtttttccctcccattttacattaaatgtttgttctaagtcaatttggtaacgtcttggataatcattggctgctacaattacaatagggaactctttgaaaaaaggcattgcaaagagaggtttacgctcttctatagagtgttttctaagggcttctatatcttcatttttgtagctttctttagtaggatagtcgctgaactcggtgatgaaaaactctttttgaaagttgattttctcaagtttttcaccttgtaaaaatagctcttcgtagagtttttcgtagtttaaataggtgctacttgtaccatcattgtaaggttttccttcttttcttatattccttttgttaaactgattgccataagcatataagggattttcgtgagagatgggacgctcaccatcgtagttaggcacttcattggtagagagtatgtgttcccattgagatacattactttggaagagttcttctttcttcttttctaaattttcgatagtctcttcttggggaatgtgtgcggcttctttgccgattactaaaactttaccattagggttaccataccctacaaatagattgttggctttgcagtaggctactgcctctttgaatgcttgtgtgtacatataatttaagtttttaaaaatgttatattcttttctgataatactcttaggtactcctttttcataataaactgtttcccataaaccattttcgagataagtacgaatgtatttttttgtttcattaccattttcgtcatattgagtgcaagaaaatacattctcatcatatctatcatagtctaaagaatcgtcaggttcttctttgtatttaacatctctaaagaggagaatattattttttccttctagatcagtagtatagtactccattttttttcgttcaaaatctttaaagagaattactgttttttctctatctgcattgatagtggtacgttctacttttccgtcgaaaaatttgtaggtgatagttttttcaactctgaaatctttgtaatagatttcaaaaaactttatttctacgattctaccattttcgtcataatgaatcacttctttattgcctttttcgtgatacactattttagcacctgtttcatcatactcaataagttcatcggtgtctgattcttcttctttttcattagggtcgtaatttatagttttaatatctttaccccaattctggatatattgcaaaagctccccatttttatcatatctccattcttcgctatagccacagcagtcttttattcttctctgaagcattccattttcgtagtagaagaattttcgagtgtgtattacactatcttcaatagttgccgtccattgggttaattgttcttttgtgttatattgaaaattgaagagaatatttctgaaggcgaaagtatccaagagataagatttgattagtccttttttatcatacacaatttttgatttatgagtgaatgttgtaaaatgacgtaaacttctgtcaaatattttctttacgtatggagggttaggggcataacgtgcaatgcgaaggcagtaatctaataattctgcaaaaaagtaaggaccataacctctcttcttttctaaaaattttcctatttcaacagtattatcttcagtattagttactgcctcatactctttataaactatctcaatagttttgttagcaaggtgtttattagctggaatattctctatgtaaaaagaagcatttttattgctcatattgttattgttttaaaaagttattatttacagaatagtacattcttttcttacgatatgtattgagttttctctgcggcgatagataatagcttcccattcttcgttaggaaaataatgaaatatagtcttttttatcttataaccttctggatcgtattcggtataagaaaaaatattttcgctaaacagaaaatcattccagttgtaaaagggacgatagcgatagaactcttcaagatactcaatgtctttacaaacaataacttctttgtacaaattgttgtctatgtaagtacattctaccttatcttcaaaatattggtagttaatactttcttttaatacaaagtctcggtaaggtttgtgttcaaagtactgtttctgggtaattctcccttgttcatcaaatagaagagactttttatctccactatcgtaatgcaagatttcctgcttgctgagcatatcatttttatagaaattgataaatacttttcgctcgtcttcatcttcttcatcttctgagtaaaatacattgtattgtacttcatttcctttttcgtcgtacaagaatgatttttttaaacaaaaacggtcataggaatactcttttacgcctattaactctcctttttggttgtagttatactcatatttttgagtgattatatcattttttacgatggctacaacatcacctttctcattgtataaccactctttggttttacctgaggggagaggggcaatcactttgctaaggagtttatttttgttgtacaaaaattgtcgtgtacaaggtatttgtcctgagattgtagctgtccactcaatgatttgatcgttttcattgtacttaaaggcaatgagaatgttgtctatttcatagcttgttataaaacctttatcgttgtaagttgttgtaaagtatttattatcacgagagtacctacgggaattaaagattttttgtatttcagtttttctatcaaaggaatttatatcatataaagtttctgccatttcgcaatattccctaataagtgtttggatagcttcaggaataaaaagtttataatctttaaatcgtatagtgctgttctcatcttctactatctcgtattctttgtaagtagtttgcacttttttgttagcaaagaaagtattaggcttcattatagcgatataaggtgaatcagggcattttaagttgttattttgtattttcattgttgttaaatcttttttagaaggagtaacaagcctaagttttattataggcttgcactccttgtgaaatgtaaattaaatgcttcttatctttccaccattttggtttctcagttccatatctccgttttttaaggtgattagtatgtctgatttgtgaaaaatagcttttacagcattactttctgcaactgtagatttccgtcctccagaatcgttacaaagatctgttctaccattgctgtaggtgattagaatagatttttcatcatcactaagagtagcgtcaattacattgctttgtgcaatcgttctgatacgacctcctgaatcactgagaagatctaatcttccatttacaatttttaaaatcatattattatagtttttagtgagtgcctactctaaatggttttcggcttccccaatgttttacaaaaatagtttgcgggcatcccgttttacttagctcgttgcccgaccaaaggcataaatacaaagcaaaaggaacgcccgcgtacgcgaacgcttccggctttactttcttgtacttattgaaaaattggtcgtatttcgagctagaaaataaaagcgaaacgctactaatatgtttattttgtgtttatctggtttttactataaaatatgttttatgagtttctgccagcaaatatacaaaataaaatgataggtacgtccttttgccttgttttttttattttgggagcaaaaatataataatagggcgcaacaacttgtcgttttgaaaaaactttatacttttgttgaaaaaatattgaaaatgagtttatcgaaaatgttttcaaggcatcgttttattgttgaacgattgcgtatcaaaccttgtactagtgaagaattagagaatgcttgggagagaagtatggagaatacagaggggcaacctcttgctaaacgtactttacaacgtgatattcaaattattaaagaagtttaccatataattattaagtttaacaaatctcttaaagcatacgaaatcacagaagataatgacccctatacccaaaacctcttcgaggcatttgatgtgttcagagctttgcaaaattatggtaatctttctaaagttattcagtttgataggcgattgcctgcggggacggagtatctctcacccttgcttagggctattaaagaacatcgtcagctaaagttgcactattataagttttgggataaaaaacaacaaccccaagtgcgtacgatagagccttatttgctaaaagaggcgcaaaggcgttggtatgtgttggcgtgggatgtggagaagaaagcgctacgggtgtttggcttggataggattacccgtttagatgacagcaaagatattaaatatcagcacactgtacctgagagtgtggagtgttttttcgacgatagttttggggcgtgggtagatagtgagcacacacaagcggaagaggtggtgcttgcctttaaaaaattgctcaatgattcagtttttatgcctaatccggcggaatacctcaaagcgatgcctctgcatccttcgcaagaggtagtaagagaaactgacaatgaaattgtactcaaactgcgcttaaaaattacaccagactttgttagggagatacaatcgtatggtgatagagtgaaagtactatcggataatgtgttaatttgcaaaaaatagcgtgagttcgatgtaaaagatgttagtgaatgcttggagctgagtatgtgagagattatgtctcagaatgtcgtagcacgataggcaatacgaggcacacggataggtgataattagcaaaaggtgaggagaattggcaggagaatcttgtacgattgttatggaaaaggtgtataagtagttaagagttaaaagttttttgaatggacaatgaatagtaaaaaaattgtagggtaggagaggcatttggaatttgggatttattcgaagaaaagacgaagaaaagacgaacaatgaacgaagaaaagacgaacctaagacgaatttaaagtgaagctaaggagaaggaaagaagatataatgatgatttttttggcaaagtaagaaggaagatgtaagtggaatgcttctgctgatgaggagaaaacagcgtattaacaaatctgagagagaaatttagaaggacttggagagtaataaaaaagatattttatgagagtagttattcagcgtgtaactcacgcatcggtggatatagataagcaaacagtagcttctatcggtagaggcttattggtattggtaggtatagaagatagcgataccaatgaggatatcacgtggttatcggctaaaatagtgaatttacgcgtttttgacgatgaaaatggggtgatgaatctttcggtaaaagatgtaggaggagaagtgcttatcgtgtcgcaattcaccttgcaagcctctactaaaaaaggtaatcgccccagctatataaaggcagcacgtccagaagttgcaattcctatctatgaggcgtttataaagcaagtggaaagtttgttaggaaagcgagtgccaacaggacagtttggggcgatgatgcaagtagccttgtgtaatgacggtcctgtaactattcttatagatacaaaaaataaggaataaaaaagccccgaagatagtcgaggcgctagatgttttcacaacggaatcatccttattgtgaattgctttcaaattgtgcgacaaaagtaggtataatatttttaatgtgcaaatatttttatataaaaaaaattattacatttgtcctttctaaaaacattataccaatgaaacacatattaggcttagatttgggctcaaactctatcggttgggctcttgtacaacaagattttgaaaacaaacaaggaaaaattatggctactggtagtaggattattcctatggatcagggtatattaggtgactttgagaggggaaatacagtttctcaaactgccgaaagaactacttatcgcagtacacgtcgcctgagagaacggcatttacttcgccgtgagcgacttcatagagtacttcacatattaggttttttacctcctcactacgatgttcaaatagactttaccaaaagatatggtaaatttatagataatgctgaacccaaaatagcttataacaatgggaattttatctttatgaatagtttcaatgagatgattaaggatttcaaaaaacaccaacctcagttattctacaagaaatctaatggcgaagagagtaaaatcccttatgattggacaatttattacctgcgcaaaaaagcactctcacaaaagattacccaacaagaattagcttggcttatacttcacttcaatcaaaaaagagggtactaccagttgcgtggcgaagaagaaactgaaaaccctaacaaagaagttgcttttcactctttaaaagttgtagatgtagaggctgaagctcctaataaaaaaggtgagatttggtatacaatccgtttggaaaatggttggatataccgtcgcacgagtaaaatccctttggacgactggaagggaaaaacacgtgattttatcgttactaccgaccttaatgacgatgggacaattaaattagacaaagaagggaaagaaaaacgttccttcagagcccctgatgaaaatgattggaatttactcaaaaagaaaacagaacacgatattgatttttctggaaaaactgtaggtgcttatatctacgaccatttgttacaaaaccctaatcagaaaataaaaggaaaattagttcgtactattgaaaggaagtactataaagacgaactaaaggctattttggctaaacaaatagctcttcaaccagaattgttcactgaaaccctattggcggactgtataagagaattatatcgcaaaaacgagactcaacagcaaaatctactatcaaaagatttccttcatctgtttgtagaagatatcattttctaccaacgcccattgcgtagcaaaaaatctactattgccaattgtaccttagaaaagcgttcgtatatagataaggaaactaatgagcgcaaagaagctcctataaaagtatgtgccaaatctaatccttactaccaagagtttagagtgctacaatggctacaaaacttgagaatttacgaaatagaaactgaccgtgaggtaactgctgagtttatcgaaacagccgaagattatgaggctctgtttaacttcttgatgtctcaaaaagaaatagataatgaaggtttactgaaatactttttacttacaaaaaaacctcaaattaaagacaaagtagctaaaagcgagcttaaaaaatggctcactacttatcgctggaactatgtgtatgatgcggcggataactcctccaaaaaataccctatgaatgaaacaggctatgaccttcagcggtacttgcagaaagtagaaggactccccgctaattttctaacctttgatataacatatcgattgtggcatttgttatattcggtgaaggacaaagttgaatttgaaaaagcattaaagaaatttgctcaggaatatcaattagacgaagcatcgtttgtagatagtttcaagaacttcaaaccctatcctaatgaatatggtagtttctcagaaaaagctattaaaaaattgcttcctctaatgcgatttggcaatcattgggactttaatcgcattgatgtatctactcaaaaacgtatagacgaccttatcaatggagtagcaaatgacgaaatccgtaccatcattagagaaaaagcagagaagtatcagctcaatagtgagagttgctttcaggggttaccgctttggttggcacagtatgtagtctataaccgtcacgccgaagctaccgatatagaaaaatggacttcagtgaatgatttagaagcatatttagaagatttcaagcaacattcactgagaaatcctatagtagagcaagtagttaccgaaacattacgcgtagtaagagatatttggcaacgatacggcggaggacaagcgaatttctttgatgaaatacatatagaactgggtagagaactcaaaaaaacagccgaagaaagaaaacaactttccaatagaaatcaagagaatgaaaataccaacctacgcattaagaaattacttgccgaattaaaagaagatgcaagcatacaaaacgtgcgtccgtattcgcctgtacagcaagaactgcttaaaatctatgaagaaggtgtgtttagtgctaccgatgaagtagaggaagatattcagaaaatacgtaaaaaagctgagcctaccacccctgagatacaacgctacaagctctggttagaacaaaagtataaatcgccttatacgggagaggtgatttcacttacaaaactatttactgaggagtatgaaatagaacacatcattccgcaaagccgttattacgacgatagtttatccaataaggtaatatgcgaatcagctgtaaataagctaaaaacaaatcaattaggattggaatttatccagaatcaccacggtgagaaggtgcgcataacaggtaataaagaagttactatcttcacagaagagcaatacaaagagtttgtgaaaaaacattacgctaacaattcagctaaacagcaaaagcttcttttgaatgagatacctgaaaaaatggtggctcgccagctgaatgacacgcgttacatcagcaagtatatttctgaaatactttctaaaatagtgcgttcagacgaaaaagatgaaggcgtaaactctaaaaatgtaataccttgtacaggtaaaatcactactgccctcaaacaagattggggacttaatgacgtgtggaacgagcttatacttcctcgttttgagcgaatgaaccagcttacccaaacagagctatttacctcatataacgacagacttcaaaaaaatctccctactgttccaatagaatacagccaaggttttcaaaagaaacgcatagaccaccgccatcacgctatggacgccttagtgattgcttgtgccactaaagagcacatcaattatatgaataaccaacacgcattggataagagtaaggataaaaaagaaaaacaacaatctcgcatagaccttcgcactattctctgtgagaaaaagaataataactggcagttcaagaaaccttgggctactttcactcaagaagccaaagaagcccttgaacatatagtagtgagttttaaacaaaacctaagagtgattaataaggctaccaactattatgaaaaatgggaagagaaaaatggtgtacttgtaaaaaagaaagtaaaacaagagggaactaattgggctatacgcaaaaaacttcatgaagattttccttatgggaaagtaaaatatcaagtgaatttcttaaaaatatccgagaatatttctaaaatagatcttatagtagatgaatttatcaaaaggcagttggaaaagatctatgttgagaatcatcgtaaagttaatctaacgaagaaatatttaaaagaaaatcccataagagaccaaaagggggaagaagtcattagtacagatttcagagaagaaaatattaaatacagaaagagaagaccaatatcggtactttcagatagaaatagaaaaacaggaataacttctattgaaaaaatgcttaaaacgattgctaaagtagctgataatgttctaaaaagagaattatttttgtatttagaagaatgtaataatgatattgatgtagctttttctcctgaagggattgagcaattcaactctaaaaggaagatacctgtgtatagattacctttttttgaagaaggagaaaaaaagaatgaactgggtaataaaggaaagtatgtagaagcagctaaaggaacgaacctcttttttggagtatatcaaggcaaagggaaacgcacttatgcaacaatctctctcaacgaagtaattgaacgacaaaaacaaggacttccttctgtccccgagcgcaatgaaaaaggagaaccattgttgtttagcctttcgcctaacgatttggtatatgtgcctatggaaggagaaatcgcagagacaatagattttaataatctcagcaaagaacagaaagaaagaatttataaaacagtgagttttacaggaaacgaatgtcattttgtaaaatctactatagcatctctcataaaatcctatgatgctaaatctaagataggagaattaggaagtttgaataagttagaggttactattagtggagacagtagaataaaagaagtctgtatcaaactaaaagtagaccgcttaggaaatatcaccaaagcatagaactctttttaaaaaccaataaacaccctttaaactatgttataccgatctatttacataggcaatcctgctcatttgaagttgaaagataagcaactcaaaataaccgaccccactacccaaactgtaaaaggaagtgtgcctattgaagatttgggtttgctgatgctcgaccattatcaaattacagtttctcatcaattactgcaagaattgatggagaataatgtggtacttatcagttgtgatgaaaaacacttacccttaggagcaatgcttcctttcggtgggaatactcaatattctgaacgggtgaaaacgcagttagaagtgagcgaacctcttaaaaaacaactttggaagcaaactgtagagtgcaaaattcagaaccaagctaaggtcttagaacatttaggaaagtatgctgacccgatgtacgactatctaaaagaagtaaaatcgggcgatacgaccaatatggaaggtattgcagcgcaacactattggaagtaccttatcgattatgattttcttagagatagatttggtgaatatcctaatcagtttttcaatttcggatatggagttttactcagtatcgtagcccgcgcattggtagatacaggtttattattagtattaggaattttccatcgcaataagtacaacccctattgtttggcaagcgacataatggaaccctaccgacccatagtagatttattggtaatggaatggctcacaacacatcctgaagtagaagaactcaacaaagaaagtaaagctcatatactgcagatggcaacccgtgatgtacagatagaaaagaatacccaccccttgatagtagcagtaaagaacacagcttcttctttatacaaatgctatacgggtgaaaagcgactgatagcttatcctgaattatgatcatagccgaacgatataatgcttatagaattatgtgggtattagtattatacgatttgccaacagaaacgaaaaagatgcgtaaagaagcacagaactttcgtgataaactcataaaggacggttttacgctctttcagttttcgatgtatgtaaggcattgccctagtagagagaatgcccaagtgcatatcaatcgtgtaaaacaaaacttacctcagtatggcaatatagctattatgtgtctaaccgataagcagtttggcgatatggagttcttttactgtcagagagaaacagcagctcccgaaacttatgtgcaattagagcttttttaagaagaataggaaagtgaaaacctcctcttttgtcttataaacaaaggcaaaagaggaggtttttcagtactgtttttaagcaaaacggattgatatttaaactcttaaaagattgaggttgttatcaatcgcaaaactacaaaatttgaaagcaattcacaactagatacctcagggtcaatgtcacaggaatgttgttatcaatcgcaaaactacaaaatttgaaagcaattcacaaccagcattatcgccttcatccttaggagattgttgttatcaatcgcaaaactacaaaatttgaaagcaattcacaacaagtttgtccatatgaaatattcattgtatgttgttatcaatcgcaaaactacaaaatttgaaagcaattcacaacatatagtgactttctgtgtactttggtcttgttgttatcaatcgcaaaactacaaaatttgaaagcaattcacaacaggaagagagggaggggagggggtgcgggtgttgttatcaatcgcaaaactacaaaatttgaaagcaattcacaactcttttattagcgatgagaaatatcaatcagttgttatcaatcgcaaaactacaaaatttgaaagcaattcacaacgagcttttaattctcctttcaatgtgtctagttgttatcaatcgcaaaactacaaaatttgaaagcaattcacaacaagtcctcacttgctcgacacttatcgttggttgttatcaatcgcaaaactacaaaatttgaaagcaattcacaacagcatcgagtcctacaaaattttagggtacgttgttatcaatcgcaaaactacaaaatttgaaagcaattcacaacctgtagcctatataagagactaccaaaagagttgttatcaatcgcaaaactacaaaatttgaaagcaattcacaacaagtttgtccatatgaaatattcattgtatgttgttatcaatcgcaaaactacaaaatttgaaagcaattcacaacaggattagaagtaacagaaggtgaaggtcggttgttatcaatcgcaaaactacaaaatttgaaagcaattcacaaccctaacaagagagggtttttgtttgaattagttgttatcaatcgcaaaactacaaaatttgaaagcaattcacaacacgctgttaagaggaatcgaatacacgaaggttgttatcaatcgcaaaactacaaaatttgaaagcaattcacaacgaggtgaatagtatcaagaggcaaacgatggttgttatcaatcgcaaaactacaaaatttgaaagcaattcacaaccgtatttgacatcggtatttgcaatcttaggttgttatcaatcgcaaaactacaaaatttgaaagcaattcacaactatcgcttgaagatactgttactctcaaatgttgttatcaatcgcaaaactacaaaatttgaaagcaattcacaactctgctgtaagttgctgcttgacggctactgttgttatcaatcgcaaaactacaaaatttgaaagcaattcacaacattagaagaggctatatacgtgtctaaccagttgttatcaatcgcaaaactacaaaatttgaaagcaattcacaacagagttccaacaagtaattgaaaaacaaatgttgttatcaatcgcaaaactacaaaatttgaaagcaattcacaacaagtttgtccatatgaaatattcattgtatgttgttatcaatcgcaaaactacaaaatttgaaagcaattcacaaccgttgttcttagacattacaagattccattgttgttatcaatcgcaaaactacaaaatttgaaagcaattcacaaccctttatcattataaaaatagtcccgactcgttgttatcaatcgcaaaactacaaaatttgaaagcaattcacaacggttagccattggactcatagaaaccttatgttgttatcaatcgcaaaactacaaaatttgaaagcaattcacaacgcctttatgaataggcatcgtaaagaactggttgttatcaatcgcaaaactacaaaatttgaaagcaattcacaacacctaagggctttactacaattttgttaccgttgttatcaatcgcaaaactacaaaatttgaaagcaattcacaacaatactctttcccataagatgtttcataagttgttatcaatcgcaaaactacaaaatttgaaagcaattcacaactgaaaaatttcgctttgaaaatatttgaaagttgttatcaatcgcaaaactacaaaatttgaaagcaattcacaaccagtcttcagctgaaaatgaatctgtcggggttgttatcaatcgcaaaactacaaaatttgaaagcaattcacaacacaagtcctcttcacttaaagatttccattgttgttatcaatcgcaaaactacaaaatttgaaagcaattcacaactggttattataatatctataactttttggtgttgttatcaatcgcaaaactacaaaatttgaaagcaattcacaactagttttggcatcgtttgataattctaccagttgttatcaatcgcaaaactacaaaatttgaaagcaattcacaacagtcgctacaatacagaaaaacggagttttgttgttatcaatcgcaaaactacaaaatttgaaagcaattcacaacttatttgtgaaagttcattagtagcctcttgttgttatcaatcgcaaaactacaaaatttgaaagcaattcacaaccagtcttcagctgaaaatgaatctgtcggggttgttatcaatcgcaaaactacaaaatttgaaagcaattcacaacattgtatattgtatttataaacgcctccttgttgttatcaatcgcaaaactacaaaatttgaaagcaattcacaaccagttttcagctgaaaatgaatctgtcggggttgttatcaatcgcaaaactacaaaatttgaaagcaattcacaacagcccctattcataagctctgcgcctatgtgttgttatcaatcgcaaaactacaaaatttgaaagcaattcacaactcaactcccagccttgccatacacctatcagttgttatcaatcgcaaaactacaaaatttgaaagcaattcacaacgtatgcttcattagccttgcggtgttgttcgttgttatcaatcgcaaaactacaaaatttgaaagcaattcacaacgaatttgttcctcataaatagatttaaaaagttgttatcaatcgcaaaactacaaaatttgaaagcaattcacaacagtcgctacaatacagaaaaacggagttttgttgttatcaatcgcaaaactacaaaatttgaaagcaattcacaacaattcttgttttgttaatggttacttccacgttgttatcaatcgcaaaactacaaaatttgaaagcaattcacaacgagattagggagaaggaaggacagtgatgagttgttatcaatcgcaaaactacaaaatttgaaagcaattcacaacaagaaagttgcacagtaataagggcgtctggttgttatcaatcgcaaaactacaaaatttgaaagcaattcacaactacaacataagagaaagagatgctatggatgttgttatcaatcgcaaaactacaaaatttgaaagcaattcacaacggatttcctgaataagggattgcgttttttgttgttatcaatcgcaaaactacaaaatttgaaagcaattcacaactgtaccctctactatattcacccgttcccagttgttatcaatcgcaaaactacaaaatttgaaagcaattcacaaccttaatctccttaatagccccgccttccacgttgttatcaatcgcaaaactacaaaatttgaaagcaattcacaacagaacaataattaacaattaaatatacaaagttgttatcaatcgcaaaactacaaaatttgaaagcaattcacaacaaggtagtcctataacagttttcccctcgagttgttatcaatcgcaaaactacaaaatttgaaagcaattcacaacaagaagtcgcaaaggaataatttcccctttgttgttatcaatcgcaaaactacaaaatttgaaagcaattcacaacggggcggggtgggctatttttcaagccctcgttgttatcaatcgcaaaactacaaaatttgaaagcaattcacaactgcaccctactacactaagagaaaccgctagttgttatcaatcgcaaaactacaaaatttgaaagcaattcacaactctaatggatttaataaaaaaggattcatagttgttatcaatcgcaaaactacaaaatttgaaagcaattcacaacggttgtcagtttggcgatttccttttacttgttgttatcaatcgcaaaactacaaaatttgaaagcaattcacaaccagaggcgcgaacaaaccttgcaactcgatgttgttatcaatcgcaaaactacaaaatttgaaagcaattcacaactcccctctttcccgattgaaaaatcacctcgttgttatcaatcgcaaaactacaaaatttgaaagcaattcacaaccaatattgaggatatatacttcgatatgaagttgttatcaatcgcaaaactacaaaatttgaaagcaattcacaacttctacatctgccttttgtccgtttatatagttgttatcaatcgcaaaactacaaaatttgaaagcaattcacaaccatataaatattcattatacctccgttcaagttgttatcaatcgcaaaactacaaaatttgaaagcaattcacaacctcccttgctattatcagaagaacaaggaagttgttatcaatcgcaaaactacaaaatttgaaagcaattcacaacagctcttttcacagttcaaaaagttttgtagttgttatcaatcgcaaaactacaaaatttgaaagcaattcacaacattttacaaagtgaagcccctaatgtattggttgttatcaatcgcaaaactacaaaatttgaaagcaattcacaacagtgaaagcgcctaatgctgaagaggcaaagttgttatcaatcgcaaaactacaaaatttgaaagcaattcacaacttttgcctttctcaaaagtactttaatgccgttgttatcaatcgcaaaactacaaaatttgaaagcaattcacaacttcgtatacccatctctctgtgaccatttagttgttatcaatcgcaaaactacaaaatttgaaagcaattcacaacttcgtatacccatctctctgtgaccatttagttgttatcaatcgcaaaactacaaaatttgaaagcaattcacaactagttgcatatttattagtttaaaaaacacgttgttatcaatcgcaaaactacaaaatttgaaagcaattcacaactagggcgcaatgtaaaagaatatttgcgttgttgttatcaatcgcaaaactacaaaatttgaaagcaattcacaacgcggctggtcttggaagttgatgtatgtaggttgttatcaatcgcaaaactacaaaatttgaaagcaattcacaacattaaattcttagcttgtgtagtgttcattagttgttatcaatcgcaaaactacaaaatttgaaagcaattcacaacctcttaactaatctttatcatttccacttcgttgttatcaatcgcaaaactacaaaatttgaaagcaattcacaactactattaatgtgcttaatgttattacttggttgttatcaatcgcaaaactacaaaatttgaaagcaattcacaactagggcgcaatgtaaaagaatatttgcgttgttgttatcaatcgcaaaactacaaaatttgaaagcaattcacaacgaacaaaagaaactcctaatgggctacctggttgttatcaatcgcaaaactacaaaatttgaaagcaattcacaacggtagggcgtggcaatgaaaaatttgaagtgttgttatcaatcgcaaaactacaaaatttgaaagcaattcacaacaatactttttgtttgattttacgaaagcgtgttgttatcaatcacaaaactacaaaatttgaaagcaattcacaaccttcaaactccggataaacattctttatctgttgttatcaatcacaaaactacgaaatttgaaagcaattcacaaccttcaaactccggataaacattctttatctgttgttatcaatcacaaaactacgaaatttgaaagcaattcacaacgccaagccctcgttagcccctatgaggatagttgttatcaatcacaaaactacaaaatttgaaagcaattcacaacgacaagtgtataaggtacatcgtgggtatggttgttatcaatcacaaaactacaaaatttgaaagcaattcacaactctttgcctctcgtttttttattaatcatcgttgttatcaatcacaaaactacaaaatttgaaagcaattcacaacgtaggaacctataaccacgccatacgcaatgttgttatcaatcgcaaaactacaaaatttgaaagcaattcacaacataaatgtttaatttatcaaatagttcaacaataaagcgcaaagatacaaaaaaaatattttataagtaacaaagcataaaaaaggttgcccagacttctgagcaacctctttctatattctattagatgattaacttcctaaggtataccaatgtacgcctatcaaatattgaaactccgctgaaaacgacaaccgtacggcaactaccagcagaaaagtcaatgccgataagcctatcttctggtacgtcttgctcacggtggcaatgagcatccctaataaaaaagctacccctgtgctcacaatataaatcagagctaaactgaaatgtgcatcaggcagactccctgcaataagcattaaccccgtaaacggaagaacaatgcgtaaggcactttgtaggcattcttggggtctctctcttacaaagagataactcataatcactatccctgttaagtataggggtagggttaccaaatgatctccataggctattgaatttataaacaagtaaagtgcaatagctgagataagttctaaaaagatttgtactgactttttcataataaaaatgattaattaattgaaaaaagtgttctcatgattaaatattttagaattttgcgacaaagttataagatattctcttctctgtcaagtaagttaacaaagtttaagattgttttaacttttaattgtagactttgtattgtttttaacaaattctatttgttatcaatcgcaaaactacaaaatttgaaagcaattcacaacagaatacgacttctacaagctcgaagccctgttgttatcaatcgcaaaactacaaaatttgaaagcaattcacaacttagtgaagccgcgctacttgcgcaataacgttgttatcaatcgcaaaactacaaaatttgaaagcaattcacaactcgtacggcaaggcgttcactttcaagtgtgttgttatcaatcgcaaaactacaaaatttgaaagcaattcacaacgtaatttgacttcttataaaatactcaacagttgttatcaatcacaaaactacaaaatttgaaagcaattcacaactaatgttatcggctgtttggcgaccggcatgttgttatcaatcgcaaaactacaaaatttgaaagcaatttacaaaatgtataagtaaataatctgaacaataacgccaagtaaatcgagcgaatcctctcccttttatgatttttatttgtttttttagatgataattcttacctttgtaccctaatttaatattaaaaattatgggtattatcgcaacacttattattggagccatcgctggatggttaggaggaactatctataaaggtagtggattaggtcttataggcaatatcattattggtattcttggaagtatcgtggggtattggcttttaggagatgtgtttcacgtctcacttggaggaggatggattggtgctatcttgacaggagctattggagctattgttattttattcttgataaatttgatatttaaaaagaagtaataaggaaggaagagcacatattaaaaatgaaaaaaccccgaaaatatatattttcggggtttttttagtacttctttttcagaattacctacttgcgttagcagtccaggtctttccatctgtagtatacaaaatgttcaatgaagaggcgttgattctaatgattttcacaccatctttcaagtcgatgtttactaaagtgttatctccttcttttttgaagctaacacctttaaggtcaggaatgccgtctgaaaaacggaaataatagtcatttcctgttttaacaactgtcacagctccgttatcagcagattttttttcatctccatttgaataagagattttacctttgtaggttcctacaaaaaggtcattgtctgctgggtcatcattcttgctacaagatatagaagaaaaagctactagtgataaacaaatcactgatactaaagcaataatttttttcatacttgattcaatttaaaaaattaatattaaagtttgttgcaataattataccattcgaatgctttatgcaatttttaatagttgttatcaatgggaaaactacaaaatttgaaagggattcgcgactatgtggctgtacaactgaatgtccgtaataagagttaatgttttaggcgaaa

SEQ ID NO: 1106 - DNA, 24557 bp, synthetic construct
  source 1..24557: mol_type = other DNA
  misc_feature 1..24557: note = Synthetic
agctggcacttctaaattaaaaggataaatatgatctttcggaatgttcattgcttcataagatttatgaatagtttttgctttgggttcagttacatggtaagttccataccacaagtttgatggcgtaacacttttattaaaataccaactcgctattttatttttagcagaataatcccatccaccagaaaaatctataactcttgctaccaattctcttttagcgataaaagctgccattcctccgccttgagattgtcctgaaactgcaattttttcccaattaattttaccatcttttaaataggcattccaatttgtatttttatcgttttttgaaagataaatcaaaagtttagtaagtctatttactattgcatcttgagaagtatcattaatcaaatcaaatttattactaccataaattcttctggttctaaaatctgctgcacagttagagtttttgaccaatgtttctcctctacatatttgagcaacagccggccttgtaatatattgtaaatttattacatggtacccttgttcaattgcagttaaaaaaaggtctttaggcccttttactgccatcccatttgtacctgctaaaaacaaaagcaacttaccttgcttaattgttggatcatacacaacaaggtgtggtgaattatattcctttattgttacatctgtatctgatggcttaatggttaactctacaattggctctggaaatttatagttaagttgagcatttaaatcatttataagaaaaagaagtataactaattgtaaagtaaaaaggtgtcgcataattaataatataattttttttcaaatttattacataaaacataacaatatacctacgttacattgttaagtattaatactcgataaaaataattctctttttattaaaatttcgatgtaaaattaatcacttattatactatattatccaatttaagacaatatataaactatatggctagtatttgattatatttagagcattattataagatattatgaaagttttaccttttaaaatacctaaaccagaacatgctacttttatctttcaaaaagatactgattccattttttacgataaattgcaccaacatgaagaaattcagttaagcttaatagttgaaggacaaggcactcttatcatcggagatactataaattattacaacgctggtgatattttaataattggaagtaatttacctcatgtttttaaaagtgacatcaaagcttctgagacttctgaaatgctcacactatttttcacagaaaccagctttggtgaacatttttttcatctagaacctttaaaagaagcagcatctttttttaaacgttctaaatatggattcaaaataaaatctaataaaaaacaacttcgcaagctatttaaacgacttgaaaataacaccaaattcaaccaatttctcttatttctaaaaatattaaaattatgttccactgcaaattacaccagtttatcttctttcctttacaataaaaaatattcagaaaatgaagggaaaagattacgtgacgtttttgaatacaccatgacccattttgaacaaaatatttctttagattctgtttcaagtatcgcaaacatgactaaaaatgcattttgtaaatactttaaaaagcgaacaaataaaacctacttccaattcttaacagaattaagagtagaacatgcctgtaaacttttaattcataataaagaattgcacattacagaaatagcatatcagtctggatttaaaaatatatctaattttaatagacaatttaagctgttaaaacaagcaacaccttctgattttagaaataataaaggaatataactaatagaaaaacaagagaatattaacattatttttttgtttttttcaccctcaattagtattctaaaaaacacttttatagtaaacttttagtaggaaatgttaaaataaaaaccgatttttgcaacgtgaaaatagcagctctaatattatctttatacttgctttttaagcctatgattcctttattggaatatgctgccttttacgattatataaaaaatgaactttgtgttaataaagatatccctgaatctacttgcgacggtaaatgttatttagcaaaacagctagcaaaagcgtccgattctgaaaaagacaatgaaaaagatcatagttttattgtagagtattctatcgttttctttcaaaaaattatcataaactgtttatttccattttcaacagaactgactaacaaattaatagctacatataataaaatttataaatttcattatataaacaccatttttcaccctcctattatttaatttctacatacaatagaaattcaaaaattccgagcgttgttttactaattaatttagtaacaaacagcaatacctatacctattatctatttaattaaaattgaaaatatgctagggttgtatgaaaattttatatcaaaagtttttatagctctcttgggtttgttgagttccatttttttgaagcaatattagtagctgttataacaaatataattaactaatataatacaatacttttcttgtaaaaagtattgtatttattggggtaaggctactacatctaactagttttaaattaaacaccaatacataatgaaaacattacattttattgtaattgtattatttgttgtggcaacttcttgcacaatagacaaaacagattttgaagctgaaatcagtgttgaaacaacagaatatgttgattttaaagaagctgcctcagtaactactggaaattatacaattagtattgaagctttaaacggtactttttataaaggttataacgaaattcatctaaaaattttcaacaaacaaactggtgaaaatttagaggatttagaagtaaattttttaccaatattaactgatactaatggtaataaagtttcttgtccgcataaatacaatttagattatgatacctcagaaggttattatttaggatactctgtatttactagcgaaagtgatgcaagtgcaaactggaaattgtacatcaattttattgacaataatcaaacgcattcggttaatcaaattatttctgttgaaaaacagactaatatgaatttaaacatgacatcgtttacaggaaacaataatgaacagtattttattgcattaatttctccacaaaaaccaagagttgctgaaaacgaattggttgctggaatttacaaatacaatcagccaacaaatgttggtggtgtttttcctgacccttcacagttttcttattcaatagttcaaggtcatactttattgttagatcctagaatgccagaaccatctatgggtaatcattcatcgcctaacaataaaaatttaacacaacaaagtgatagtttatactatggtgttgttaattatacaatgacgggaaactggaccttgaattttatttttcaaaaccaagacggacaagttataaaaggaacagaagttcctactgattttaccccaggaattgaaggtgctaaaagtgaactttacattgacattttattctaagccaatgaaactaataacttttataatactagtagcattggtaacagttgtaaatgctcaagaaacaccaataaaaaaggatagttccgttactgtattggatgaggtaatacttattgcggtaagaaaaaagaaaatagaaactgagatgaaaatggcagtttctgttgatgaatttttagcttcttctgacaacataagctttattaaacgtggagcttatgcgtgggaacctctgcttaataatatgagtacagaacgttcaacaataactattgacggtatgcatatttttggggcttgtactgacaaaatggatccggtaacatcatatgtagaaagcaataatctttctgaaattgatattacatctggacaagaaggtagcatgcatggagcaacagtagcaggaagtatagacttaaaacggaaaagtacagctttcggacttagcaaaaaatggagtggagcctatcaaactggttttgaatttaataacaatcagtattttaaccttggcaacatttcttattctagtgacaagctggtagctgagggtagtatttcgtatagaaaagcagagaattattacgatggagaaaacaacgaagtaaatcactcacagtatgataagtttaacacatctgtaggtatagcttataaaactagccctttatcatcaataaaagttgatgctatttttgataaggcaaaagatgttggttttccagctcttcctatggatttatctctttctagagctctaattacttctgctgcatataaacaattttttgaaaacaaacttataaaggtttgggatacaaaaatttattttaatgctgttgaacattatatggatgacaccacgcgtccagaaaatttggttcatatggatatgcctggatggagcacaacttatggattggtttctaaaattaatttaaaaaaggaaaattatgcttcagaaatacagctaaatgcatacgataatttatctattgcagaaatgcgaatgtatcctcaagaccgtagtgaaagaaccatgtttgcttatagctggccttgggttactacacgttatgcaggactttctgtaaataattcttgggatatttctaaaaaaagcttattaaattttggaggaacttttggggtaaactacaactactctaaatatgttgatttcaattggattttcaatcctggagcttcacagaaaaaaacaagatttcttccaaatctatatactagctatcagctaaatatagctgattttaatttttctgttggaggtggatatggacatagagctccatctgtttcagaaggctatggctattacatttataatagttttgacagatatgactatataggaaatcctgatttaaaaaatgaaatttcttatgaggctaatgcaagtgctggttttaaaaataacaaaggaagcattcaggccaaaataaactatttctatattcaaaattacatcatcggaagaattttaagtttaggaagcccaatgaactatcaatctgtgggagttaaagggtatacatctttagattatgcctcattatttaatttctcattaaatacaaaatacactatttttaagaagttgcactggaaaggaatgttaacttatgcaagaggtttagatgataataaaaataatttaccatttattcgtccgcttagttaccagacctcacttcattattcttttaaaaatttaggactgttcacttcactaaatggtgatttaaaacagattaattatagtcctgaatatggagaagatgaaacaccttcttataccaattggaatatttctgcagactacaccttttatatcaataattacagaacggttttacaggtaggtgccgagaatttgtttaatgaattctatagcacttatgcagactggggtaatattccaagaatgggacgtaatgtttttacgtcaataaaaattaatttttaaaataacaattaaacaaataataatcaaaatcaaaaaacatgaaaaatttaaaaaagtatcttttcttagctgtattatcattagcgtttatatcttgtgatgatgacgatacacctgttgctaacaatgtaacattatcgtttaacaacacttttgacaacactactatagttcttggagaagcaagttctactagtgctacagttaacacttctgaagcaggacaagttcatcgtttttctgaattaaaatatattataagtaatattcgtctggttaatgcagatggaatagaaattccttataacattaacgatttagataatggagcaactgttgttgaccattcaaaacctgaaacattacaatatgttttaaacgaaattccaacagcagaatatacacaaattaaatttggcctaggtataaaaactgaattaaatactttagatcaagtcagatttcctaatttttatgcagcagctgaagaaaacgatactgaaatgatgtgggaatggggaactggttaccgttttacaaaaattgaaggtttttatgatacagaccataaagaattgtctattcatacaggtagcacccttgatgaagaccctgaagatccaacaggagaagctttagtacaaggtgttgatgcttatagagatattgtattagatcttcctataagtgcaattgtaggcagtaatgctccaacaattattatcaaagcagattttaaccacttattaagtggagatagtgaaataattacacttagctcaggatctagtatgtctgataatgcaacaccaaacatccataccgcagtacaaatgacaaaatttgttaataaccttggtggtgatggttctacaaatactaaaggtatgttttctataacaagcgtagaaaactaaatttaaattataaagccggttatgatattgtatcataccggctttcaattcattttacatgaaaaaaataataagaaatattacactaatactgctattagcatcttgtaatacagacgattacaacccagtttcttataacaatcctgaaataaaattaaacattcctactggttttcctcaattaaatgatgcagtaactaataataagccaacaaaatatggaattgaattaggtaaaaaactattctttgacaataaattaagtgctaacaacaccatttcatgttcaagttgccatataccgtcaaatgcatttacagataagaagccattagccataggaatagaaggaagaataggactaagaaatacaccccctattcaaaatttagcttttatgaaattctataattgggatggtaataaacgtcaattagaaaaccaacctctcgtacctattataacacacgaagaaatggactcttccattcttgaagttataggtaaaattgaaacagaaaaagattatattgatttattcaataaaacctatggagacaaagagattactcctgaacggatttataaaagcatagctcaatatgaatataccttaatttctgctaacagtaaatatgacaaaataaaacgtaatgaaggagaatcatttactgaaaatgaagcacaaggttatcaaatttttaatcaaaaatgtgcaaattgccacagtactgaactgtttacagatcaaagctttagaaacattggctttcctataaacccaaataccgacgaagcaggccgtgctagagtaacaggaaatttagatgattatatgagttttcgcgtaccctcgttacgaaatattgaatttacagctccatatggtagttttggacaatttgctacattaaaagatgttttagattattttgataatggcgttttaaatgcagaaaatctagatcctatttttaaagaaaataacaatagaattccgttaacagaagaagaaaaacaagcccttatttccttcttaaaaacattaagtgattatgagtttataaaccaataaactaaattttctaccttagaaattacccatgatataatgctaagtattacccattacaataataaagtttatttatttttattactattttggtagtttaataatgctaaataacttaacagcattactaaaattcctataacaataacaatacctgaatgcattgcattcattagaataatggttgtactttttcctgaaattaaagtataccaaaaaaatggacaaaacacgcctactagcgtaatattcctgcccatttttattccatttttgtaccctattattttactatcttttggtttatctattttgttattgccatttattagggttatacatttttgtactgccaaggtatatgggcaccatttaaaaattgatttcatatagtttactatagacattggttaaaatttttaatacaaaaagtaaaatataaaaccaccgaccattgccattaacagtacagaaactataaatgccgcaatagctttaggttttaacatcgatgaaataattgctatttcaggtaaactagcacctgtaccaccaattattaaggacatggctgcccccatactcatacctttagcaattaatgcacttaaaattggtattgccatttcaattctcaaatacaaaggaattccaatagctgcagcaattggtattgcagacggactattattccctaagtatttttctacccaagcatcgggtacaaaaatggctgaaacagcactaataagagctccaataattacataaggaaaaatacgcttaaacaatgcccacccaaaagttaatgcttcattaaattttgtttttgatggtgcaatttgaccacacgccgtgtcggataattttgaagatgtattggcttcacatgccactgaattcatactcaattgttttgctttatcagaagtaagcccacaactaacctcgggctgtgatgtacaagatactgcagtttgctttgaacctaattgaatacgttttacctcatatcttaatgaagttttacctacaatagttccaaatactattgctcctaaaaaaacaactaaaaagtaaattaacgcgactttccaaccaaaaacaccaaaaataaatccaaccacaacaaaatttgctaatggagcagccagtaaaaatgaaaacaccatagcaaatggagctcccatttcaatcattcccatagatacaggtaccatagaagcactacaaaatggtgttggtatacctaataaggctcccattaccccactatatttaccggttttagctaatcttttctggagcttttcttgaggtataaatgctcgaactagccctgtaagtatagatactaaggcaataattaatactaaaactgcaccaacatgaataaattcatctaacgctaaatttaatttttcattcataataattgtttattaaagattaatgtttaacatatgcgttttaacacatatgttattgcaaaaaaatactatttattatttttaattcatttatttttagtctcttaatgccaacaactctttacattttaccatttcctttctcatttcagattcaggaatgctatgaattgatttttgtatcaagtcttgaaatttagtattgattggagtcaaatgatagaaaacccatttcccttcttttacctcttcaattaaattagcatcctttaatattctcaaatggcgtgatacattatactgataaacttctaatacctcaacaatttctgaaacgcaaattttctcatcaatattcatcaataaccacattatttttaatcttgtagtatcagataatgctttaaacacttttatataattgtccattttttcatttttaatcatatgcgtaaaattgcatatgacaaaacagtggcaaatgtaaaaagattattttaaatagcaataattttttattaaggtataaaatagcgttagatactcttgcgatgacatcaaaataaagctcctctaattaaacaaaaaaactaagctgtggtactaaagaaaaagaaactcttatattataaaaacattaagtgacactgaatttattacacaataatagcatagtatgcaattactatctttttttaaatattataataaaatcaactgtatcttttccaacaaacaaacacattgcaaattactttgggtaacaaacactatttattttagttaaataaatttttaaactataaaaaaaagcgacacctgaattaacaaatgccactttaaatgttttcacaacggaataatccttattgtgaattgatttcaaattgttttcaaatataggaattttttattttttttaaaaattcttatttttaaacagtaaatacttattataacccaaacaccatgaaaagaatattaggtttagacctaggtaccaactctattggttgggccttaactcaacaaaattttgataaaaaggaaggtaaaattgatggaattggaagtagaattattccaatatcacaagatatattgggtaaatttgattcaggtcagtctcattcacaaacttcagaaagaactggatatagaggagttcgcagattaattcaacgaaatttattacgaagagaaagacttcataggatattaaatattttaggttttttacctcagcattatgccgaaagtatcgattttgaaaaacattttgggcagtttaaaaagaatacagaggtaaaattaaattataaaaaaaatgaatctggcaaatatgaatttatattcatggatagctttaacgaaatggttgaagtatttcttaaaaagaaacaaaacacaaaaataccactagactggacaatttattatttaagaaaaaaagctctttcgaaaaaaatatcaaaagaagagttagcatggataatactcaactttaatcaaaaaagaggatattatcaattaagaggtgaggaagaagaaactgataataacaaacaagaagaattctatactttaaaagttaaagatgtaatacctactgaagataaaaataataaaggtatatggtataatgtaattttagaaaatgattggatttacagaagacaaagcaaagaaccgttagacaattggataggcacatcaaaagaatttatcattactaccacaatatctaaagatggaaaagaaaagagaagttttagagctccaaaagaagatgattggaatttattaaaaaagaaaaccgaacaaagtataaaaaattcaaagaaaacagttggcgaatatatttttgatacactacttgccaacccttcacaaaagattaaaggtaaattaataaaaactatagaaaggaaactttacaaaaaagagctttctgcaatattaaaagaacaaaaaaaacatcatccggaacttcaaaatagagacttatacaaaaaaagcatagaagagttataccctagaaatgaagctcatcaaaataatataaaagaaaaagacttcacttatttatttttaaatgacatcatcttttatcaaagacctttaaagagtaaaaaatctaccatttccaattgcagttatgaaactcgaacttataaaaagaagattgaactaattgaagatgaaaagaaaatagtaaaagaaataattgtaaaagaacctttaaaagcaatctcaaaatccaatcctctataccaagaatttagactatggcagtttttagcaaatcttaagatttatgacaaaaccaaattagatagagacgtaactagtgattttataaaaacagatgaagattatgtgaatttatttgactttttaaatgtcagaaaagaagttgatcaaaaaaacattattcaatattttattactaataaagttataactaaaagtgataaagaaaatattagatggaattatgttgaagataaaaaatatccatgtaacgaaactaaagctaattttctgtcaagattaagtaaagtaaaaaacattgatcccattacctttttaacgccaaaaattgaacaaagcttgtggcatattatctattctattaaggataaaacagaatttgaacaagccctaaaaacttttgctaaaaaacataatttagatattgattcttttatagataattttataaaattcccaccttttaaaaatgagtatggtcaatattctgaaaaggcaattaaaaagttattgcctttaatgcgtaaaggtaaatactggaatgaaaatgaagttgatttagaagttaaagagcgtatcaaaaatatattagaaagattaaattttattgattttgataaaactaaaatagacgaaaacattacagatgatgatattccaaaacctttattaaaaagttttattgaatttaaaaacaaaaatgcattacaaggattaaacacatatcaagcctgttatgctgtttataacagacactcagaaaacaacacttctagctattggaaaacaccaatggatatagaaaagtatttgaaaaattttaaacaacatagtttaagaaaccctattgttgaacaggtagttaccgaaaccttaagagttgttaaaagtatttgggaatattatggtaatagtgctgaaaatttctttgatgaaatacatgtagagttaggtagggagatgaaaaattctgccgacaaaaggaaacgaatatctgatagaaacaaagagaatgaaaatacaaatcaaagaataaaatctatattacaagaattaaaagatgaaggtataaaaaatattaaaccttattctactagtcaacaagaaatattaaaaatttatgaagaaggtgtttatcaaagttcaaatgaaacatcagatgaaattgagaaaataagaaaaaataatgcacccactaaggctgaaataaccaagtatagactttggctagaacaaggatatatttctccttatacaggtcagataataccacttagtagactttttacaacagactatcaaatagaacacattatacctcaatctcgtttttttgacaattctttaagcaataaaataatttgcgaaagtgaagtgaatcaattaaaagataacaaaactgcatatgaatttataaaaaataattcaggaagaattgttgatttaggaggtggaaaaacagttaaactatttaaactagaagattacgaaaaccactgtagtaattattttaaaagaaacagaagcaaattaaaaaaattattaagtgaagaaattcctgaggactttataaatagacaacttaatgatagccgatatattagtaaactaattaaaggattattgtctaatattgttagacaagaaaatgaacaagaagcaacttccaaaaatttaattcctgttaccggtgcaataacttcaaaattaaaaaatgactggggattaaatgataagtggaacgaattgattgctcctcgttttataagactaaataaaatgacctctacaagtaattttggatattgggacgagaaaattaatgcttttagaactcaagtaccagacgaaatagcttatggatttaacaaaaaacgaatagatcaccgacaccatgccttggatgctttagtagtagcttgtactcacaggaaacatatacagtacttaaacactttaaatagtgaaaagaaaaattatagtttaagagattctttacttataaaaaataaagaaggtcattatactaaaaacttcttgcttccttggtataactttacttcggaagcaaaaaataatttagaaaaaattgttgttagttttaaacaaaatttacgagtaataaataagtctaacaacaaaacttggcaatgggtagaaaaagatggaaaattaaaaaaacaattaatacaacaaactaaaggcaataattgggctattagaaagcctatgcacacagaaacagtatatggtaaagttcttataaaaaagaagcgaaaaaatccaatttctttaaataaagctatagaaaattgggaattaattatagacaaaaaaataaaagctatagttaaagaaaaggctaaattttacaaatctaacttaaaacttttaaaaaaatactttagagataatcctattcacatccatggtaaaaaaatagataaagttgatatttatgaaattgttgaagcaacggctagtagagtcgctttatcagaaaaatttactcgtaaacaattagaaagtattacagattctggaattcaacttattttagaaaatcatctaaaaaattatattgacgataaaggaaaagaaaggtttgatttggcttttaattcagaaggccttgatagtcttaataaaaatattatcactcttaacaatggaaaacaacatcaacctatttataaggtaagaacatacgaaataggcaataaatttaatattggagaaactggcaataaaaaagataaatatgttgaagctgcaaaaggcacaaacttattttttgccatttactgggatgcttctaagcaaaaaagagtttatgaaactattccattaattgaagtgattgaacatcaaaaatggcgtgcaacattacctaaagaagaattcaaaaaaacaccattaactcctatcaaagaagaaaaaggacagtttttattctctttatctcctaatgatcttgtttatgtacctactgatgaagaaattgataaccctagcctagtaaattttgaaaagttaactaacaatcaagtaaataatatttataaagtagtaagctttacaggaaatagactttatgctataccgaacaacattgcgagtccaatacaaaaaaaatatgagtttacacaattgaataaactagagtttgatttaaaaggtaaatcaattaaagataggtgttggaaactaaaaaccaatagactaggaaaaataatccaagttttaaaataattgcaatgattaaacaatctatatatattggcaccccttcttatttaaaaataaaacaaaaccaactggttgtacaatgccccaaaacaaacgaaataaagggaaccgtaccaattgaagatatggcgttgttaatgctagaccatttccaaatcacaattagcaatcaacttattacacgcttgcaaggcaacaatgtagttattattaattgcgatgcacaccacttaccattcggagtaatgttacctctttatggacatacagaacattctgaaagagtaaaatatcaattagaagctagtgagcctttaaaaaaacaattatggaaacaaactgtagaacaaaaaattaaaaaccaacaatctttattggcatattataaaaagccttataaacacatggatgtttattggcaatcagtaaaaagtggagacaccacaaattgtgaaggtaaagctgcacaatattactggaaacacttgttcgaaaattttacaagagaaagatttggttctgaacctaataatcttctaaactttggttacgctgtattgcgtagtataatagctagagcattggtaagtagtggtttgctacctgttttgggtatctttcatcgtaataaatacaacccttattgtttggcagacgatataatggaaccttacagaccttttgtggataaaatggtttataattatatagcagcaaacggaaaaacagaagaattaacaaaagaagttaaagcttatctattaaatatagctacacaagatgttgttatcaatggagtaacaagaccattacttgtagccgtaactactacaaccgcaagcctatacaaatgctactttggtgagttacgccaactaaaatacccagtgcttaactaatataaatcatttatttcaacttatgctacaagaatctaatcgttttaatgcttataaaattatgtgggtacttgtattttttgatttaccaaccgaaactagaaaagaaagaaaagcagcaagtctattcagaaaaaaacttattgatgacggatttacaatgtttcaattttctatatatctacgtcattgcccaagtagagaaaactctaaagtacataccaaacgtgttaaaatgaatttgcctaaacatggaaaagtttgcattttagaaattacagataaacaatttggaagtatggaattgtttcatggtgaaaaagaagttgatatgccacaacctgtacaacaattacaattattttaaaaataatctttaaaaacaatatttaaatagaatcaaaaaaaacaaggtttaaaaattaaattattggttaaacttaattttttttaattctaaaaaaaatcctgaagtattgattttattcaatacttcaggattgaccttgtgattgctcacgtaaaaatacaatttgaaatcaattcacaactattaatcccgattgttgggggtttgttgtcttgtgattgctcacgtaaaaatacaatttgaaatcaattcacaaccctgtaattcttgcaccaacatcaaaattacttgtgattgctcacgtaaaaatacaatttgaaatcaattcacaacaatccgaaagtaattgtgtgcttgtcggcacttgtgattgctcacgtaaaaatacaatttgaaatcaattcacaacccaacagcatgttctttgaaattaaaattacttgtgattgctcacgtaaaaatacaatttgaaatcaattcacaacaaaaaaacactcaattgaccgcgtattagacttgtgattgctcacgtaaaaatacaatttgaaatcaattcacaacagacaagggcgggtattataaatttaaggacttgtgattgctcacgtaaaaatacaatttgaaatcaattcacaactctttaggtctaaatgttttttctctcttgcttgtgattgctcacgtaaaaatacaatttgaaatcaattcacaacataataatcattacggcctaatagcatttccttgtgattgctcacgtaaaaatacaatttgaaatcaattcacaacttacgtgctcaatagcacgttcaataatttcttgtgattgctcacgtaaaaatacaatttgaaatcaattcacaaccattttattatatgtttaaatcgattaaagcttgtgattgctcacgtaaaaatacaatttgaaatcaattcacaacacataaggtttcaaaaactaataacttaggcttgtgattgctcacgtaaaaatacaatttgaaatcaattcacaactcgaaaacgcctttagataatttagcaatacttgtgattgctcacgtaaaaatacaatttgaaatcaattcacaactttatgatgacccacaacaatagcaatttccttgtgattgctcacgtaaaaatacaatttgaaatcaattcacaacatgctgtaactccagctaataaacacgtatcttgtgattgctcacgtaaaaatacaatttgaaatcaattcacaaccaaaatggcaagcgaagcaggaggaaaaggcttgtgattgctcacgtaaaaatacaatttgaaatcaattcacaacctgtctagttctcttaatctttcatttgctcttgtgattgctcacgtaaaaatacaatttgaaatcaattcacaacaagatgaacagctacattacgagaatgattcttgtgattgctcacgtaaaaatacaatttgaaatcaattcacaactgttgaccccgtgctaatggcagggaaagacttgtgattgctcacgtaaaaatacaatttgaaatcaattcacaacccgcttgtcaattcttcagaatcgtacttacttgtgattgctcacgtaaaaatacaatttgaaatcaattcacaacgaaagatgaccaaatagtttatctgaattacttgtgattgctcacgtaaaaatacaatttgaaatcaattcacaactcgtaaagatattggatatgacaaagacggcttgtgattgctcacgtaaaaatacaatttgaaatcaattcacaacttacgagtaataaaagaaatttttaaaaccttgtgattgctcacgtaaaaatacaatttgaaatcaattcacaacgaaaaagcactagaactaattaacggttaccttgtgattgctcacgtaaaaatacaatttgaaatcaattcacaacggttttattaatttaagcatatcgtaaatacttgtgattgctcacgtaaaaatacaatttgaaatcaattcacaactgcatctcttcataaacatctaatccaattcttgtgattgctcacgtaaaaatacaatttgaaatcaattcacaacatgcaaataatcttgattttgagaatgttacttgtgattgctcacgtaaaaatacaatttgaaatcaattcacaacaccgcctgaattaattggtgctacatacgtcttgtgattgctcacgtaaaaatacaatttgaaatcaattcacaacgacattcagcaattggcaaaatgtttgtcgcttgtgattgctcacgtaaaaatacaatttgaaatcaattcacaacttcaatcgcttgtgaacgtatcaataaaaccttgtgattgctcacgtaaaaatacaatttgaaatcaattcacaaccatcaattggtgaaattgttaaagctgcatcttgtgattgctcacgtaaaaatacaatttgaaatcaattcacaactactataaaagatttttagattctatattacttgtgattgctcacgtaaaaatacaatttgaaatcaattcacaaccagatactgctgtaactggtaaaacattctcttgtgattgctcacgtaaaaatacaatttgaaatcaattcacaaccaatttacaattacttaaagaaattaccgccttgtgattgctcacgtaaaaatacaatttgaaatcaattcacaacaaccattacaccatcttcttctttttcttccttgtgattgctcacgtaaaaatacaatttgaaatcaatttatagtaggtttattaacacaatttagtactaaaacatgtattaaacagtacaaataattataaaacacaatgcaataattgttgcaaaattgtacaattaaaacataataaaagtactttatttagcatagaaacacgttttgcaacctgttgcaacaaatgtattagtcttcgctgattttgttctattctttttcccttttgtaaagtagatttacagtgtaaaatgcaacattttatacccattacataatacaatctaatccaaaataattaaaatttacatttatgaaaattaatttttaccgaacacatatagttggtgttctatttttattgctttttgcagtccaattaagcttttctcaagtaaaaaaaactttaaatattctaccaactagcaattctgaaaacattgaagataaaattgaaactatccttcaacaattaaccttagaagaaaaagttaacttatgtcatgcacaatctaagtttagtgttaaaggtgttgaacgcttaggaattcctgaaatttggatggcagatggcccacacggtgtaagagccgaaataagttgggatgaatggtcgtatgctggatggacgaacgattctataacagcatttcctgcccttacttgtttagccgcaacatttaatccttcactagctggcgactatggatttagccttggcgaagaagcaagataccgaaaaaaagatgtgcttttaggcccgggtattaatatttatagaacaccacttaacggtagaaactttgaatatatgggagaagatccctttttagcttcaaaaatggttgtgccttacgtaaaaggtgttcaaaaaaatggagtggccgcttgcgttaaacattttgccttaaataaccaagaacatttacgagataaaattaatgttgaagtgagtgatcgtgctttacacgaaatatacttaccagcatttaaagccgctgtacaagaagctaatgtttgggctattatgggtgcttataataagtttaggggtcaatatacgacccatcacaaactacttacaactaaaatattaaaacaaaattggcaatatgacggagtagttattagtgactggagctctacacattctactgaagaagctgctttatacggcttagatattgaaatgggaacaggtaccgatggattgggaacaactacaaaaaaccattacaataattattatttagcttctccttttcttaaaaaattaaaaagtggagaaattccagaagctgtacttaatgataaagtacgtagaattttacgtctaatgttcagaaccaatctcaatagaaatagacctttaggcagtttaaacacaaaagaacaccacgatgtagctagaaaagtagctactgagggtattgtacttttaaaaaatgatgataattttttccctataaaagatgataaagaattgactattgctgttattggtgagaacagtgtacgatcaatgacagcaggcggcggttcctctgaattaaagcccaaatttgaaatatctcctttagaaggtcttaaaacaagatataaaaatgcaaccattttacatactatgggctatgaatctggtcgttctgagtacgatacagtacatccaccaacattagatgcagattctttaaaaactgaagctataaaactagcagaaaaagctgatatcgttttatttgtaggtggacttaacaaaagtcatttacaagatagtgaaggtgatgatagaaaacaatttggattgccttttggtcaagaagaactaatcagtgaaattacaaatgtgaataaaaatgttggctttttattactatcaggaaatgcggttgaaatgccttggttaaaaaaagtaaaaggtgttatacaaacttggtatttgggtagtatggcggggcatgccattgcagatgtagttagtggtgatgtgaatccttctggtaaacttccattctcatttccaaaaaaacttgaagacaacggagctcattcatttggagaattgtcttatcctggaattggagaaaatcaacaatataaagaagacattttggtgggttatcgatggcatgatacaaaaaaaataaaaccattatttgcatttggttatggcctatcttatacagactttagtctttcaaacatcagtaccaataaaaaagcctatttacgaaatgaaactattgtaattaactgtgatgtaagtaatacaggtaatgtaaaaggctctgaagttgtacaagtttatattggtaaacctaaatctaaaatagagagacctttaaaagaactcaaaggtttttcaaaagttgaacttgattcaggaaaaacaaaaacagttcgtattgaagtagatattgataaactaaaatattatgatagttcaatttctgattggaattttgagagtggagaatatctaatttatgttggtaatgcctctgataatattgctaaaaaaattaagataacaattaaatagaatttaaattaacaactgaagtaaacagtacaaataaaattatttgtactgtttttttttataaaaattaaacaactattataaaccaattttaaattttttaataaacaaattgataaaatcatcaaacatgtttatcaagcattgtttaatacaattactctttattctacaacatatatactataaataattacacgctaaacacatcatttttaaatcaattgtaaggtagttgttctaataaaattataagaaaagtaaacggtgaagtaacactactttcttaaagtatagcttaaaaataattccaaatatagtattagtactattctcttagtttttttacaaaaaaagaggatttttatcccccaataaaaatcctcttaacaaaataactcaactcaaatacagtactttattcttcggctacaaacctccaaacccatccagaatctccagcgggtgttaatgcgttatgtaaaattaattcggtatcagtcaaccttataatgtcataaaccccatcaggattagctctgttagcatcatcacccaaaatttttactccacttaaggttaacttctgatttgctacatctaagacaaaacttcctgtttcaggagctgcaccagtggtagctactctaatataattagcagctccatcaaggttaaaagtcatacttccattttcttgcccatcatttatacagcattctccagcattccaccaaagaccttcccatccatcaatattattaggagcgatcatataccaaaaaggaaccgattgattaaaaatccatgttttaccttgggtagtattttcaccaacaagatcataccaatcttgatctaaaggctggtctaatacatcaatttgaacatctatagttttagtaaaaaattcagctcctaaagaacccgtaaatgtaaatgtattattacctggaataggataaacaaaagaagcttcatcactaaaagctcgtcctatattataatcccaatatccagttacccctggtgttgccattttaagggtaattccatttccaccaggagtactttgagtagcgacaagttcaacaccgtcaatatcggtgatattttgtaaaatatcttcgtcaacaataggatcacaagcaacagcagtgaacactaaaaaaacgattagtatttttaatattgttttaattttcatatctctatatttaaaatttttataatttttaccaaccaggattttggttataaacaccattagataaacgaatttcagtttcaggaataggaactaatcctttagtctctgatctatagtttggactataagttgcgtctacaccagagtttcttacgttaagcgtataattaaatgcagtatcaacatctccccaacgtacaaggtcaaaccaacgcaatccttcaaaagcaaattcacgcaaacgctcttcttttattgcttctatagagtatcctattgctggcaaaccagctcttgctcttactctattcattccatcgtcagtttctgtaatttcagaatgcataagtaaaacatctgcaaaacgcataaaaataaaatcttgagcatgcatcaattgcatatcagtattactccaatcatataactgaacaaacatacctacattactaccagagccatcatcatgttgaatagaaatatattttttgttaaagaaacctgtttcatgatcacctttatcaggtgaataactatcagtaccttgtgcactatctcccataggaagaatagagccttcttttcttgggtctgcatcatcccatgaattccataaatttgggtttactgtaccccagccccaaccttgaccgaaaggaaccatagaattatcacgaatacccatatataaagcaagtctattggtataaatatttccattagtccagccccaatctccaaatgaaaagcgttgtacaaacatactttcatagtttccggtaccaaatgttggcgagtgcccatcttgacctacccatgacaacccttcagcatctgcccaaggtaaaactacagtacctgcactttgatttacataagaatatggccataaatttctaaaatcaggtgttaaagcatagccactattagaaatgcaatcttctagataagctgcaacatctgctgctgttaaagatccaccatcagctaaaggcaaatcacttgtagcttgaccttccatattggtcatatatccggtataatgtaaaaatacgcgacccaaatatgcttgtgctacccatttattagcatgtccatattgatctgttggaatacttgtaaaagggatattaggcatagtttcaatagctagttttaaatcagaagctatttgtgcaaatgtttctgtatacgtatttcttggaccatctttaggttgatctacagcaataattactggtacgcctccaaagaatttagccaatctgaagtaataaaaagctctcataaacaaagcttcaccaatagcttgatttttaaaatcttgagcttcttgctcactactaaaataagtagaaaaatcagctgtttcggttttctcaataatggcattacatctagcaataccgttataggattgtatccataaatctcgataagtatcttctgaaggatcttcaaaattatctacccattttgctgatttatcatctggacctccaccagctaacatcatgtctgacattaagtttgctgcaatagcttcattactatgaacatttgctgtataaagagcattataaacaccggccatggcctcttctatatcagtaggagtttgataataagtatctaaactttttccataaagattatcttgatctaaaaagtcttcattacaaccaactaaaataatgagtgctataaaggctattgaatattttaaatttttcatgtttttcaaatttttaaattaaaagtctacacttaacccaaacatcacagttcttggttgtggatacaaccctaaatctataccagacgcccaatcttgatcatgtccaaatctcacttctggatccattccatcatacccagtaaaagtgtataaattagatacagatgcatatactttaagattattaacaaaagctaaattctcaagaacttttccaaaattgtaaccaaaagttaaattatttattcttacataatcagcatcatgtacataaatatcagaaataaagtttgtatttctattagaagatgaagataatcttggataacgatcagaagtaccttcaccatgccaacgttgaaatatttgagtggtgtaattttgatcgaatctatctgcaaatgaacgatacgattgcattacctgcataccaaactttcctgtaagggtagcatttgcataaacacctttatattcaaaatttaattgaagtcccatttcaaaatctgg

SEQ ID NO: 1107 - DNA, 24554 bp, synthetic construct
  source 1..24554: mol_type = other DNA
  misc_feature 1..24554: note = Synthetic
gggcttgctgccgccgaacctgcagggcttatgggccaaccaggtgcagactccctggaacggggattatcatctggacgtgaatgtgcaaatgaatcattggccggtggaagtgtgcaatttgtctgaactgaacctgccgttggctgcattggtaaaggggatggtgaagcccggtgaaaggacagccaaagcttactatgacgcggaaggctgggtagcgcatgtgattgccaatatctggggttataccgctcccggcgaagaagcttcctggggcgctactacggccggatccggctggctctgcaacaacctttgggaacattatgctttcagcggggataagcaatacctggaatgtatttaccccattttaaaaggagccgctttgttctataacagcgtgctggtaagggatccggaaaccggctggctggtgacctcgccttcggtttcgcctgaaaactcattttacctgcctaacgggaaccgggcaagcatctgcatggggccaactatggacaaccagatcatccgggagctgttcacgaatatgatccgggcatcggaactgctgggaaaagatgaagaattcaggaaggtactctcgcagaaactggaagaaatccccccggccggtgttgtcggcaaagacggacgattgatggaatggctggaagaatacaaggaaacggacccgcaacaccggcatatttcccacctctatggcttgtaccctgcgtccctcatcactccggaaggaacgccggaactggctgaagcctgccggaagacgctggaagtgcggggagatgacggccccggctggaccatcgcctacaagatgctcttttgggcaaggctgcatgacgggaacaaggcttatcagctctttacccagctcatgcgccctacactcaaaacggatatgaattacggagcggggggaggtgtataccccaaccttttatcagcagggccgcctttccagatagacgggaatttcggcggtaccgccggcatcgcggaaatgcttattcagagccatgcaggatatatcgaattgcttcccgctttgccttccgcctggaaggcctccgggtcggtaaaagggctgaaagcccggggcaattataccgtggacttttcatggaaagaagggaaggttatcaagtaccgcgtaagctcgccgctgagcggagaaggcacagggcggaaagtacaggtaaaaataaacggcaggcttcaggaggtgaccgccgaagtactgcccgaaaccagccggactgcgccgggcagcgaaggcaaggaaggcacagaaggcagggaccaaataccacagcaggttcgccttcgaaatgaggattatatccagcgcaatggcggattgcagcatgttttccgcaggataaaaaaagaagggaaggctaccgttgctttcctgggcggctccattacccatatgaagggctggagagaccttgtgtgcgaacagctgcgcaaggattatcccgaagtggaatttacctttgttgaagcaggtattccttcgctgggaagccttccccatgcttttcgcctgcagcgggacgtgctggacaaaggcgccccggacctgctgttcctcgaatcagccgtaaatgacgaaaccaacggaaccccggtcagaacacaagtacgtgcgctggaaggaatcattcgtcatacccgtgaacagcatccccgggcaggcattgtattgatggcgtttgcggatcccgggaaaatggaaaattaccgcgcgggcaaagtaccagccgaagtaagggtgcatgaaacagttgcccggcattaccagctgccttttattgacctggctaaggaaattaccgaccggattgatgccggtgaatttacctgggaagatgattttaaggacctgcacccctcgcctttcggacagcaaaagtattttgagaccatttataccctgctccgggaggaaatgaagggcggagatcaaccggaagaggctttaatgccggccacgtcaacgccggccacgtcaacgccggccaccgcaactccggccaccgcaactccggttactgcgactccggttaccgcaactccggttactgcgactccggttaccgcaactccggttactgcgactccggagaccgcaatgcaggtccccgcaataaccatggcttcaatgcccgccgccattgatccgttcaattatagcaagggtcactacctggatgttcgccgtgcttcccggctgaaaggatttaaagtgattgaaaattggacgcctgccgcttccggccatcccggaaaaaccgttgccgccgctggtacccgggaaggttttacaaacgtgccggtgctggaaggaacgggacccggcgcacgattccgcctggaattcagcgggcctgtgattggcatcgggctggtatccggaccggatgcaggcattctgaaatatcgcatcgatgggaaaaagtacgagccagttgatctttatacccaatggagccggcaactccacctgccctggtacctgctgctggcggacgagctggggcctggcaagcacctgctggaggtacgtatcagttcccggcatcaccccgcgtcggaaggaagagcagcccgcctagtctgcttcctggaaaattaatgaaagttcagccggcgcggggcggccgccctatttagcgatcgcaacgtttagttaaagaaaaaatagtactttagccttactaaccaagtttcggaaatttcatgaaagttacccggtttctccttttggctgtgtgttccctgtgcgttgcccaagacaggctttttgcacaaagcaccagcgtttccctgtttgacggccgtacactaaatggctgggaagtcgttgacccggctgacagcaagtactggaaagtttccgacagcgtcattaccggcggcgacggcgtaacggccatccctaaaaacacttacctgagaaccgtcaaagaatatgaggactttgaatttcgctgcctctttcgccttaccggcgatgaatctaccgggatgatcaacagcggtatccaatatcgctccaccgattccggtaccgatatgattggttaccaggccgacatcggcaacggctattggggcgatatttatgatgaacaccgccgtggcaaactcgttgggggagacctggccgcccttcgcttcctgctgaaggaaaatggctggaacagctatatcgttcgggtaaagggagatctccatgagctgtatatcaatggcattaaggcctgcgaatacgtagaaaaggatccggatgttccccgaaaaggggtgatcgccatccagctgcacggcggcggggccgcgaaaattgaattgcggaaccccaccattacggaattataatgcgcctgctttttctggcaatctgctgccttccctgctggggatacggccagcaactatccgggcgcacgggcgccctgtcgcccgaggaagaactggccggattcaagctgcccgaaggtttcgtaatagagctggttgccagcgaacgtgacggagtggtaaaaccaattgacctggcttttgacgacgcgggccgtctatggacccaaaccgcccgcatgtacccgcttgatcccgttactgacattcaatgggagcagctcctggagctgatgaacgaccgggaaaaacaggaaagccatcctgccttcagacgggtactggacctttaccagggaaaaacgaagggcgacgataagatattggtcatttccggcctgtacggggaagaaaaacgggaagtagcggtctgggcggacggcctggccaaccccatgagcatccttccctataagaacggcgcgtatgtagcgcaaggttcggagttgtttttcctggacgatacaaaccaggacgggcttgcggataaacgcttgcccctgcttaccggcttcggttttaccgattcccataccatgacccacctgcttacccgcgggcccggcggctggatctatttcagtcatggcgcgctcaataaaggtgaagtttcctccttaaccggaaatgcacgccagaacgtggattacagtaagatcggccgcttttccctggacgcagcccgcctggaactggtgaccgccggcctgaataatatctggggcctgcagcttcgcggtaaaggacagtggtatggttcggaagcaaacgacctgggttattcggtggcgcctatggatcccgggaccagctttcccggcatcgggaacgagcggctgcgcccttaccagccctttatgcccgccctgcatgaattcagggtaggaggaaccggtctttccggcctggcatttgcggaagacgcttccggttcctttcccgccgaatggaaagatgtcgctttcctggccaatcccattaccagtaccattaacgcggtaaggatcgttcgccatgccgacggcagcgtcagtgctgaacaccttcccgatctgctgacatccaaagatgactggtttcggcccgtaaacctgaaattcggaccggacggatgcctgtacatcgctgactggtacaataaaatcatttcgcataacgaagtgcccacgagccatcctgaaagagataaaacccatggccgcatctggcgcatccgccacgtgagccaagcgccccgccccatcccgaacctttacgaggcaaaggcccggcagctgatcacttcccttcaatcgccttccctctgggaaaaaagagcagcctggcaccagctcgccgagcgtgaagtaaaacccgcgactgtcggctccctgcaagacctgctggccgataattcccgggacgaaataacccgcattcatgcactctggtcccttgaagcgctgaatggatatgatgcagcgctctggcgcagcctgctggaaccaggcacggcggcggaccggcagggagaagaccctgaccggaagggaggaaccccggacctgaagagcgaagtcacggaccggcaggagggaacctcggtccagcagcgacgaaccccggaccagcagggcggaacaccggaacggtcgggaaaagctccggacccgcgggaaggagccgcagatgaccttcgcagggaggccattcgctcgctggccagctttcagctttctcccgcggaaatagctgaattgctgaaaggcccggcggaggaccccaatcccatgatccgctcccaggtactccggactattgcggaaatcgattcggccaatgaagaccttcttgccatccttgtacgtgcctgccgccctgaattgcccggaaagggcctgggcgggccctacgaacggcggtttgaacgttacctggcccgcaaagcccttgaacaatacccggaagccctggaagcctttctgaaaaatgtaccggcaggtattcccgttgaaaatattttatgggctgttcaatcccttccgcagaagcaaaaagaagccgccttcctggaattctggccgcaagcccagcttcgcacgatcgatgaatccacttttgtaagcattgccggtatgttgggcaatcaggccatctacgatgcggtccgccctttgatggaagcgccgggtaacgccgcggatattgtccgctttgccatagccaaccagtcgcaggtgcaatcgccggagatggcgagcctgctgcagcagcctgtttccaacctgcttcaggaaaatgatcccgaaggaatcaagcttgcgctggatgcggccaatcgcttcaagatagatcttccggccgaaactgtagccgcgctttttgccggccagccttcggaacaaaccactgaacttattatcaacgccctggaagcccggcctggcgccaatgaagcggtgttcagccgcattgtaaaagatgatcaattcagcttcgccctgcgcagcaccgcccttcatcacctggcgaaggcgaaccaacagtccgccttttccgtattgaagtcctggctgccgggccttgataccacgcaggcgggcaagctggccgaaacgctttccggttccccgcagggcgccgcgttgcttgtaagcgtgtatgaaaagaagttgctcccggcccgggccttttccctttccaccgcagaacgtatccgtgaggcccagcctgaaagctccggagcaacgcgtcttcttgcctacgtaaaagaacagcagtctgcccgcaggcagcaggtacatagcaaaatggaacgtttcctggctattgccaccaataacaagggcaatccggtaaaaggcgccgcccttttccagacctgccttatgtgtcaccaggtaggcagtcagggcgttaacctgggccccgcccttgacggctccgccaatcgcgacagcgaagccctcctcaccgctatcctgagccccgatgcggccgtggaatccggctatgccgcctaccgcatcaccaaaaaagacggtaccagttaccagggcctgctcgttgaaaaaaacgaccgcggcgctaccatcgcctttatgggcggctccaccgtcttcatccaggctgctgagataaaaagccagggctttctccccggccgttcctttatgcccaaagggctgatagaaagttatagcgatgaacaggtagccgacctgctggcctatatcaggagcttgaaatagtattttctgacggcttgcggaagctttccattaaacgcggcaggtaaaggtacagggtgatcccgcggataaaaacataggcgataaaggccagccaaagaccgttattatgggtccaggatgtaagaacgatctcaagaccaataaaaagcagcagcgaggcaatggacgcattccgcatttccctgctccgtatagccccgataaagacgccgtccagctggaaggcaaaaaaggaaatggctatataaatggccgcataggagagatgctgtcctgcaatttcctgaacccccgcatcccgggtcaggaatgagatagcgggccttccaaaggtccagaccatcagggcgagcagcaaagccgtgccgccggcaagctgagtcgcattttttacatcgcggataaaccggctccggtcttttgcgcccagcgcccgcccggttaacatttccaccacataagcgaatccgtctaaaaagaaagcagataaggaaacaaactgaagcaatacatggttcgccgccagcgtggcatccccgaatttcgctccctggttggtgaaccaggcaaagcccccgagcaaggccagggtcctgatcatgatatcggaattggttttcagcatacccaaaagcggccccttccggagaacgtccgcccgggattttcgcaggaagcggaaaaggttaaaatgcagcgaccgaagcaccagccacaaggccagcccaaacgccgcccactcagcgatcagggtccccagggcaattccttccacgcccattttcaactcaaagacaaaaaagagattcaggcaaacattcaccccattcaaaaacaactgggtaatcagtagcttccgggtatgccccaatccaatcaaagcgcccagcagggcaaaggttgccagggtagcgggagccccccatatccggataaaaaaataccgcttaaccagctcgctgacctcgtcactcgcactcaataaccgcagcgccgcccagcaaatccctgactggaacagcaccagcaccacgccaattccaagccccagcaataaggccctggtcagcgccaaacgcgcctcctgatcatcccgggcgcccgccgcctgcgcaatgaacccggtagtccccattctcagaaagccgaagctccagtaaacaaaactgaacaccaacgcccccagggcaatagcgcccaattcccgcgccgtcgccgtccgcccgatagccgccgtatccgccagccccaaaaggggcacagacgcgttcgccaatataattggaatagccaggcgaacaatgacccggtaattttctagtttcgcccagcgcccagccaccctaaactcgtatgtttaaaatcatccggatacttcagtccataccccgctatccggtccatgcaggcatgccccagcaaaataatccccgacaattccacccactcccgcgaaaaatgccatcccacacatatcagcaccgcacccagcgccttatgatgaaagaaattgtacacccacgcgcccgttttgggcccccgaacatacccgagcatactaatgtcgggagccaaaagcagcaggggataccaccaccacgcaaaagaagtttgagcgaacaaataaatagaaaatccgaataaagcgatttcctccagtttcagtaaaagattcattgatcaaagataggagaaggtttgcatttttgcggcgggaaagagcattgaaaaaattacaagatttatttgcattttccgaaaaatggttatatttagggaaattaaaactatggaatgacccttacgcaacctgttaaaccttaaactccgtcaacaatttgcccatgaaaagcaatatccgtattacaagcataaagtaatatttacatcggtttatcattgcgtggagtcgtattagacttgcgactatggattttaaagattctattatgcagtttgccggccgggtcgaaaaactgctgccccagatccagacggaggaggcaaccaagaatgcattgataatgccatttatccagcttcttggatacgacgtcttcaatccgtttgaagttaatcccgaatttattgccgatctgggtataaaaaagggagaaaaggttgattatgctattataagagatgggcaaccggtaatcctggtagagtgtaagcatcatgcggatagcctcgacccccacaattcccagcttttcagatattttcacactactgatgcgaaatttggactacttagtaatggcctgcattatcggttttatactgatttgataaagcctaacaagatggatgaaaagccctttttcgagttcaagatcaacgagattcgggataacgagatccaggagctaaaaaagtttcataaatcttatttcaatctcgaaaatattgctaatacagccagcgagttgaaatttcttaatgaggtcaaaatgctactaaataaggagttaagtagcccaacagaagatttcgtccgcttttttgccaaacaaacttaccccaccattgtgactgcaaaggttttagagcagtttacttctattactaaaagagcctttaatcaaattttaaacgatcttatcaacgaaaggcttaagactgctcttaataaagagaacgaatccgaagcggctttaatcaagccggaaacgaaggataccttaaaagcggaaactacccaagatgaaattgatggttatttgataataaaatcgatcctgcgagcaaaggtggacgtacaacgagtggtgatgcgtgacaaccagacgtattgcgccattcttttggatgataataaccggaagccgatttgtcggctttattttaacgggaaaaagaagcaattagctctggtaggggcaaataaaaaagaggcaaaatacgagattgcgtcgctggatgatatataccagtattcggaagagttattgaaaacagcagaggtctactaaataaaaaagccccctgattatggacaagaggcgatccaaatgtttacacaacggaataaaatccttattgtgacttgctttcgaacgcaaggtaaaaaaaatcctgcaatagcaaaaattattgcaggattaagcaagtcacaactcatgccactaccacactatacacagcatgtactgtaatttccttaaaatgaagacaagcgagaacgctaaatcgaagggttgggtccctttttttagtcaagaaagctcgtacgccaagagaataaatgggtagtggtattgcaaaattaattatttatatcttgacataagtatctgaaaatcatgaagaaaaaattaggcttagatctgggaagtaactctgtaggttgggcgttagtggaacaagattttaaaagtaaggacggccgaattcttggaatgggaagtcgtattattccaatgagccaggatatattaggtgattttgataagggaaactcggtttctcagacagccgagcgaacaggttatcgtgcaacccggagattgcgagagcgctacttgctaagacgggagagactccatcgtgttttatatgttttaggctttctgcctgaacattatgcgaaacaaattgattttgaacggcgtttggggaagtttattaaggaagctgagcccaaacttgcttataaggtggttgaagacaagattaaagggaaaaacgagtatgaatttgtcttcatcgaatctttcaatgaaatgttatcggattttcgtgagcatcagcctcaaattctgttgagtgaagacggtgaatcccggcttgttccttacgactggactatttattatttacgcaagaaggcgttgacaaaaaaaataaaaaaggaggaactggcatggatcttattgaatttcaatcaaaaaaggggttattatcaactgcgtggtgaggaagaagagggaaatcctaataagatggtggagttttactcattaaaggtagtagatgtcaacgcagatgaaggtcaaaaaggcagttcagagatttggtattcgctaactctggaaaatgggtgggtatacagacgttcgagcaaaacgcccctgtcaaactggaagggcaaggttcgggactttattgttactactgacctgaacgatgatggaactgtaaagaccgataaagaaagtaatgaaaagagaagtttccgcgccccgggggaagacgattggacgttgttaaagaagaaaacggaaagggatattgagcagtctgacaaaacagttggaacctacatctatgatacgttattgcaaaaccccaaacagaaaatcaagggcaagctggtccgaaccatcgaacgcaagttttataaaaatgagctgagacgcattttgcaaaagcaaaaagagtttcacccagagcttcgaaatggggatatttataatgactgtgtacgcgagttatatagaaacaatgatgctcatcggcttttgttgagcaagaaggatttcgtgcatttgcttgtggatgatattatcttctaccaacgtccgttgcgcagccaaaaattatctattggtaactgtaccttggaatatcgaaagtataaagacgccagcggagtggaacatactaaatacttaaaagctattcccaaatcccatccgtattatcaggagtttcgtctatggcagtggctgtgcaatcttagtatctacaaaagagaagatgacacaaatgtcacgcttaagtttttaactaacacaagcgattacgcgaagctgtttgattttctgaataatcggaaggaagttgatcagaagtcattgctaaagtacttcaagttgaatgagaaaacacatcgatggaattttgtagaggataagaaatacccctgcaatgacaccgggtatgaaatccgaagaagatttgccaaaattgaaactctcccggagggttttctaaaccctgatatagagaaaaaaatatggcatattatctattctgtaactgataaaaaagagtacgaaaaagctctgaaatcctttgctaataaatatcaagtagatgaaattcaatttgttgatgcgttcaggaaggttcccccctttaaaagagagtatggtgcttattccgagaaggcgattaaaaaattgcttccattgatgcgactgggaaaatattggtgctgggatgccattgataaatgctcgagagaaaggatagaaaagataattacgggcgagtatgacgagaatattgatgaccgaatacgagagaaagcccgacatttccgagatgaaagcgattttcagggtttacagcactggctggcccaatacgttgcatacggacgagccgctataacagataaatggaattctgtagatgatttggagcaatacctggaagacttcaaactgcactcgcttcgtaatccgattgtggagcaattaattatggaaacgctgcgggtagtaaaagatatttggattaaatatggcaatggggttaaagatttctttgacgaaattcatattgagctaggcagagaaatgaagaacaccaaggatgagagaaagagaattgccaaccagatagcagaaaatgaaaacacaaatcttcgtattaaagccattttggcagaaatggtgaagtatactgaaatggagaacgtgcgtccatattcgccaatgcagcaggagatattaaaagtgtatgaagacggcgtacttaattcagatatagagatcgacgaagatattttgaagatcagcaaaatggcacagccgtcatcagccgatttgagaaagtataaattgtggttagagcaaaggtatcgttcgccttacaccggggcgattattccattgaataagttgtttacgcctgaatatgaaatagaacacattatccctcaaagtcgctatttcgacgacagctttagcaataaggtgatttgtgaagctgctgtaaatacactcaaggacaatcagcttggctatgagtttgttaggcatcatcatggagaaaaggtgcagattggtcacaaaacggttcaggtatttgaaataactgaatatgaagattttatcaaacgacattatgcaaaaagtcgcagcaagcgcaataagcttttaatggaggacatcccagaggatatggtcaaaagacaaatgaacgatacacgttacattagtaagtttatttcttcggtattatctaatttagttcgtgctgaagccaatgatgatggtattaattccaagaacctcattcccgtaaatggaaagataactaatcaactgaagcaggattgggggctaaatgacgtgtggaacgaattgattttactacgtttcgaacggatgaatcaattgactaattccagcaattttactgcatggagtaaaaatcaccaaaaatatctgccgacagttcccctggaattctcaaaaggcttttctaagaagagaatagaccatcgccaccactcgatggatgctttagttatagcatgcacgacgagggatcacgtcaatttgcttaataacaagtacgcaaagtcaaaggagcggtttgacttaagccggaagctcagactattcgaaagggtgaattatgttgatcctcggactggcagacgggttgagcgggaggtgcccaaagattttatcaagccttggattaactttacttccgaagcaaagaccgccatggaaaatattgtggttagtttcaagcagaatctgcgtgtaatcaacaaggcaactaaccgttatgaaaaatgggtggagagagatggcgttaaagtaaaagaggtgcgagcgcagaaaggggtgaattgggcgatcagaaagcctttacacaaagatacggtagccggattggttctattgagaagaagaaaaatcgtttcacttaacgctgcattggaaaccgtgaatgaaattgccgatagggaactgagaaaagaaatacaatccatgcagctgaagggtctggatcgaaagcagatcaccaagtattttaaagatatcaaatatcaatggagaggacaagatatatccagactagagattttctattgggataatgacaacgtagcttcgagggtctcgctcaacgacacattcgatgaaaaacgcatcggaactattaccgataccggtattcaaaaaattctgcttaatcatttagatagctgtaaaggccgtttggatgcaagaggcaaagatatacctgctcctctcattgcattttccccagaaggtattgaagaaatgaataagaatattgtttcactcaataatggtcggccgcatcagcctattttaaaagtccgcacttacgagccaaaaggcaataagttctatgtaggacaaacgggaaacaagagggcaaaatatgtagaagcagccaaggggacaaatttgttttttgctatttatcaagatcaggtaggaaagaggaaatatgaaactattccacttaatatagtaattgaacgtcagaagcaggggcttggatctgttccatcggaaaatgagcagggagataaactattgttttatctctcacccaatgacctggtatatgtgccatcggaggaggagaaaggagatgccgacaatgcagattttggcgatttaagcaccccgcagctatataatatttataaggtggtgagctttaccgggtaccagattttttttgttaaacatgatgtagctgcacctattgtaaataaaggcgaattttctccgttgaacaaaatggagcgggcttgggacggaaggatgatcaaagaacactgtataaaactaaaagtagatagattaggtgtcatttcgcgattcaatgcctatattgacattacggtatgattaaacgtactctctatttcgggaatcccgtccggcttcgcctgcagcagaaccaattggtggtcgaatactcagatgaagagcaggagaataaatcagtcccagtggaagatatcgggatggttctaatagaccaccaacaagtatctgtaacccatggtatcataaatacgctaattgagcataatgccgccgtgctttggtgtgataaccggcatatgcctaatgggcttgtgttgccgatgagcgccggacatatttttaccaaaaagctacggtcgcagcttgatgccagcgaaccattgaaaaagcaattatggaaacaaacgatacaagcaaagatccgtaatcaagccggggtggtggaatggattgggaaggatgctcaggcattgcgaaaaatggcttcacgcgtgtggagtggcgatccggaaaatatcgaaggccaggcttcgtttgtgtattggaaattattgtttaccggagattcagcgtttaggcgacatcgatatggttcaccccctaaccacatgctgaattatgcctatgccattttaagagcgattgtcgccaggagcctggtagcgagtggatgcttaccggcggtgggtatctttcacaggaaccaatacaacgctttttgtctggccgacgatattatggagccttataggccggtcgtagacagattagttttacaagtgctgatggatcaccagggggacatttcggaagaattgacccctgagttgaaacaggaactgttaaaggtgcccgtattggatgttgttattgaaaaacaaaacagtcccttgatggtgggcatgcagcgtaccacttccagccttatgaaatgctttgagggtgactcacgcaagatcaattatccggagatgtgagcaaatcttactataaccggttcaatcaataccgtattttgtgggtttttgtatcattcgatttgccaaccgaaacgaagactgatcggaaaaactatgccgtcttccgaaagaacctaaagcaggatgggtttagcatgctgcaattttctatttatgccagacactgcaatagccgtgaaaatgctgaggtacatataaagcgagtcaagagtttcctaccgaagaaaggagaagtaattctctttacgctaacagacaaacaattcggaatgatggagtttttcagaggtaaatctcccggagaaaaaccggaaacacctcagcaacttgagctattttaaagcaaaaacagcgcggctagttagatatcatcagtttattcttcccgtttttgaatcctaaaggatgagataaaccacagtatatcagtacgataaatggtgatatactgtggtaaatctcgtgattctgataattgaaagcaaatcacaacgccggaagggcgcgaactcttttggtgcagactgtggtaaatctcgtgattctgataattgaaagcaaatcacaacgaaaaggtatcctaatcaggaccttgataaactgtggtaaatctcgtgattctgataattgaaagcaaatcacaacagataccgacctatgggaaaaagagtggttactgtggtaaatctcgtgattctgataattgaaagcaaatcacaacaaaaacaggcggggatggacatagttaaagactgtggtaaatctcgtgattctgataattgaaagcaaatcacaacgataggataatatagaccgcagcccgtcaaactgtggtaaatctcgtgattctgataattgaaagcaaatcacaacaaggggctgccagcaatggtagtcgccgaaactgtggtaaatctcgtgattctgataattgaaagcaaatcacaactcctcggtcaaggtagcccagctcaaaggactgtggtaaatctcgtgattctgataattgaaagcaaatcacaacgcaaagagttttgcgacccttccgatggcgactgtggtaaatctcgtgattctgataattgaaagcaaatcacaaccaaaatatgaaaaccgtaaccggcagtacgactgtggtaaatctcgtgattctgataattgaaagcaaatcacaactttaggacgtctgcgtggccgcttatctctactgtggtaaatctcgtgattctgataattgaaagcaaatcacaactccttttgcagaagaagtcacgaaaatcgtactgtggtaaatctcgtgattctgataattgaaagcaaatcacaaccgcccaagaggcgaagattgtaaaagagtaactgtggtaaatctcgtgattctgataattgaaagcaaatcacaaccggatcaaatccgaagacccggacgaggaaactgtggtaaatctcgtgattctgataattgaaagcaaatcacaactaattcatgcgcggtagtagcatgcattgtactgtggtaaatctcgtgattctgataattgaaagcaaatcacaacactacgcttgaactcgcaaatgggtcgtggactgtggtaaatctcgtgattctgataattgaaagcaaatcacaacttgaaaaccgaacataaaaacagcgatatgactgtggtaaatctcgtgattctgataattgaaagcaaatcacaacgatcgacaactcggatctacctatggttccactgtggtaaatctcgtgattctgataattgaaagcaaatcacaactaggagaaaataaaacatgggcggaatagcactgtggtaaatctcgtgattctgataattgaaagcaaatcacaacccccgctggaaggtattccgcagggcaaagactgtggtaaatctcgtgattctgataattgaaagcaaatcacaacaagtataacgcagttccgatctcactaggtactgtggtaaatctcgtgattctgataattgaaagcaaatcacaacggtatcgctctgttcatcgtgtttattttgactgtggtaaatctcgtgattctgataattgaaagcaaatcacaacttcgcagcctgcgttgaatgctgactttatactgtggtaaatctcgtgattctgataattgaaagcaaatcacaactggcggtagcttgtctgctagttatgttatactgtggtaaatctcgtgattctgataattgaaagcaaatcacaacccggaagacagttttttcggaagcagcggcactgtggtaaatctcgtgattctgataattgaaagcaaatcacaacagtttttgattaaaggcccatcattgtttcactgtggtaaatctcgtgattctgataattgaaagcaaatcacaactccgctgcaccggggtcgatccggcatataactgtggtaaatctcgtgattctgataattgaaagcaaatcacaacccggggtctgcccgaacgcgtgacgaatctactgtggtaaatctcgtgattctgataattgaaagcaaatcacaactacccattgtttgcgaaatccataggttggactgtggtaaatctcgtgattctgataattgaaagcaaatcacaacggaagaagcagccgaaatatacgcaagcgaactgtggtaaatctcgtgattctgataattgaaagcaaatcacaactgtgtacggcgagatgtatgcatgaaggcgactgtggtaaatctcgtgattctgataattgaaagcaaatcacaacaattgagaacaacgaaaacgtgcagaaatgactgtggtaaatctcgtgattctgataattgaaagcaaatcacaactggtttttaaattccattgccgggttgcccactgtggtaaatctcgtgattctgataattgaaagcaaatcacaactacccattgtttgcgaaatccataggttggactgtggtaaatctcgtgattctgataattgaaagcaaatcacaacggaagaagcagccgaaatatacgcaagcgaactgtggtaaatctcgtgattctgataattgaaagcaaatcacaactgtgtacggcgagatgtatgcatgaaggcgactgtggtaaatctcgtgattctgataattgaaagcaaatcacaacaattgagaacaacgaaaacgtgcagaaatgactgtggtaaatctcgtgattctgataattgaaagcaaatcacaaccaaaaatgccgttcgatgataatattttccactgtggtaaatctcgtgattctgataattgaaagcaaatcacaacaatacttgtacgatggcaagtccttgatagactgtggtaaatctcgtgattctgataattgaaagcaaatcacaacggcaaaaggatattgagatcaacgatataaactgtggtaaatctcgtgattctgataattgaaagcaaatcacaacggcaaaaggatattgagatcaacgatataaactgtggtaaatctcgtgattctgataattgaaagcaaatcacaaccgagtatggcttcagctgtttttggtgtttactgtggtaaatctcgtgattctgataattgaaagcaaatcacaacgcagcacttgcggaaattctccgtcatcatactgtggtaaatctcgtgattctgataattgaaagcaaatcacaactggggattcaatcgtttttaaaatgtttgcactgtggtaaatctcgtgattctgataattgaaagcaaatcacaacaccgtcacgccaatattatccccgacaaagactgtggtaaatctcgtgattctgataattgaaagcaaatcacaaccatagtggatattcagtttgccggagataaactgtggtaaatctcgtgattctgataattgaaagcaaatcacaactacgttgccggatgaaaacatgaataagatactgtgataaatttcgtgattctgataattgaaagcaaattggataatccggaccatgctgaccccttcagaagggccggaatttcggatgtgcgagagcgattgcagctcgtattcacatgccaatccggcagatgctgacccctctggggaggtaatccggcccatgctgacccctgtttaagacggaaggcggcagaatccggagcatactgaccccttattgaatgggttttggtttcttgagtgatcatttttcaataaagaagatcactactgatggcaggaaaaccacgacccatgagtcaagtaaaacagcttatacgtttgcacctgcaaggcaatggcaagaaaaccattgccagggagttaggcatcagcaaaaacacggttaagcaatatttggaaaaggcagcagccgacccgctttctatcaaggaattgcttgaattggatgatccggtgctggagggccggtttcatgcgggcaatccggcgtataaagatctccgttttgaagatctgaaacgccgcttaccctacctggaaaaggaattggaaaaggtgggggtgaataaaatgctgctctgggaggaatataaacaggcataccctgcaggctacgggcgtacccagttcttcttccatttcgcccagctctcccgggcccgcaaacccagtgcagtgctcactcataaaccgggtgataagctctatattgatttttcaggtaaaaaggtgcattacaccgaccgggaaaccggggagatgatcgtctgcgagctatttgtggcctgtttgcctttttctgattatgctttttgtatcgccgtccccagccagcgcctcaatgatttcatttatgcacttatccgctgcctggaagcactcggcggggcggcacaggcacttgtgccggacaatatgaaaacggccgtcacccgtgccgatcgctacgaaccgaccatcaatcagacgctcgaggacctggccaaccattaccagatgacggtcgtgcctgcccgcccccgaaaaccaaaagacaagagtttggcggagaatcaggtgaagctgatctatacccgggtactggccaaactgcgcaaccggcagttcttcgatcttgattcgctcaacaccgccattaccgaaaaaatccgggagcataaccagacccgccgccagcagaagccctacacgcgggaagaagagttcctggcggcggaaaaagatcagttaacgccgctgcccgataagcgtttcgagctgaaatattatgccgagctcaaggtagcccaaaacggacacgtataccttgggagggacaaacattattacagtgttccctacacctatatcggcagcaaggtaaaagtgatttatacccgcatgctggtacgcatctatgcccagggcaaacagattgccttgcatcagcgaaattatgcgccggggaaatacacctcggtaaaagagcacctgtgctcccagcatcagcattaccataaccggagtccggcgtattatctggaccgggccagacatacctgccgggaattatacgatctcctggaagctctgtttggacagaaccgttatcccgaacaattatacaacacctgtgacgggctcttctcgctggcccgccggagcgaccccggccggtttgcccgggcctgtcagatcgcggccgagcatcgggtatactcctataaattcgtgcagagcatcctggaaaacaacatgactgagcttgaacaggatcgtccaatggatcaccccctgcccggagggagcaatgtccgcggtaaagattattaccagcagctcaccttgacacttaaaacaccatcataacatgcaagaactactttcacaactgaaaacgctgcgcctgagtggcatgagccgtagcctggaggccatgacagccacccggcagcatcaggagcttacgctcatagaaggactggcactactgctgcaagccgaagaggaagatcgtgaccacaaacggtttgaccggctgatcaaaaatgcccgattccgctaccaggcttccatggaagaactgcatatcgatgccgcgcgcggtattgataagaccctggttaccgaactggcaagtaataactacgtttccaagggaatgccggtattggtcgaaggcgcgaccggaaccggaaaaagctttcttatctctgccctgggtcatcaggcatgcgcaggagggtacaaggtggcttattacaacctgcaaaagctattactcaggatcaagctcacgcggctggacggcagtatttacaagttcctggagaaactctccagaaccgatctgctcatcctggacgacttcggtctggcgcacctggatcagcagcaacggctggacctgatggaaatcattgaagatcgtcatggaaaaacagccaccgtcattgccagtcaactacccattgccagttggtatgacgtaattggcgatgacgtgatcgcggacggaattctcgataggttagttcacagcgcctacaaaatccagcttaagggagacagtctaagaaaaaaacggtaatattgtcacaccatcagctctgatggaaaccaatcccctcaagaggggtcagtatgcccgacaccggggtcagcattgacggaatatccacaaatcacaaccccctgcctcttggggtatgtgagggggatactgtggtaaatctcgtgattctgataattgaaagcaaatcacaacctggacaaattggcggacgaagacaaagaaactgtggtaaatctcgtgattctgataattgaaagcaaatcacaacggaaggcgagtaagctttccaggccattcaactgtggtaaatctcgtgattctgataattgaaagcaaatcacaacagcaggaaataggcgccgggattaacttctactgtggtaaatctcgtgattctgataattgaaagcaaatcacaacggcggtttttaagtgcttccgccgccttgtactgtggtaaatctcgtgattctgataattgaaagcaaatcacaacaaaactacgtttaccggggcgtatgcttatactgtggtaaatctcgtgattctgataattgaaagcaaatcacaacggataatagtttggaagatgaagggcaaaaactgtggtaaatctcgtgattctgataattgaaagcaaatcacaacggtaattagcgtcgacatgttcttcgctggactgtggtaaatctcgtgattctgataattgaaagcaaatcacaacgtggatatgcgacgttggaagagttaggggactgtggtaaatctcgtgattctgataattgaaagcaaatcacaacaaaaagtgtgggaatcccttcaaaagacggaactgtggtaaatctcgtgattctgataattgaaagcaaatcacaacataccccgacaaatcgggaggaactacatcactgtggtaaatctcgtgattctgataattgaaagcaaatcacaacagcttccggcagtagtaactacatgcccacactgtggtaaatctcgtgattctgataattgaaagcaaatcacaactttcggctttgcctccggggcggttgtgctactgtggtaaatctcgtgattctgataattgaaagcaaatcacaacgatgcgccggcaacgacccggctttgtgagactgtggtaaatctcgtgattctgataattgaaagcaaatcacaacattgataattatcttaaagagtatgagtaaactgtggtaaatctcgtgattctgataattgaaagcaaatcacaacacgtgagtaaatatcgggaagctgatgactactgtggtaaatctcgtgattctgataattgaaagcaaatcacaacccaatcctacccgatctcctttgttgaaagactgtggtaaatctcgtgattctgataattgaaagcaaatcacaacaggatgtaccatatatacagatttccttgcactgtggtaaatctcgtgattctgataattgaaagcaaatcacaacgggatcccgctccaaggcagagtagtatttactgtggtaaatctcgtgattctgataattgaaagcaaatcacaacagagataagatcaagcagggagatattgcaactgtggtaaatctcgtgattctgataattgaaagcaaatcacaacgtgtgatcgcctataagcactacttcctaaactgtggtaaatctcgtgattctgataattgaaagcaaatcacaacccggtatcgcctgcccttgtttaattctagactgtggtaaatctcgtgattctgataattgaaagcaaatcacaacatcacatcagaactaccagtgattaacattgagatactccccattttcaggaccaatttctctaaatcttaattgaatttatagtcatttgttgttgtagcggtgtggggttgtggtaaactcggagagttttccacaaatccacgccttttttctcttttggttcttttctcttttttgcccatgatctcccatttgtggataactctcatgctgctttgcccgtcaggtacaaactggctggttttcttcgtccgatcccttgatgggatttataaaagttataacggtggaaaaaggcacgaagtccttgttccagttcccatccgtccagcgccgggttcaggtacacgtattcgtactttaccgtacgccacagccgctcaatgaacacgttgtcaatcgctcttcctttgccgtccatgctgatcttgatgcccagctgcggaagaagcgatatccattcccggcaggtaaactggctgccttgatcggaattaacgatctccggttttccgtgccgcttcaccgcttcttttaccagtgaacagacccactcggaggtcatgctgttggaaaggctccaggccaccacaaagcggctatgcaggtcaataatggcggccaggtacatgaacccctttttcattgggatgtacgttatatccacagcccacacctgattagggcgttcgatcttcaggttccgaagcaggtagggccggatgtattcggccttgcccaatttggtcagtatacgccggggatattgcgcccggatgcccatcttgcgcattaaccgcc

SEQ ID NO: 1108 - DNA, 24551 bp, synthetic construct
  misc_feature 1..24551: note = Synthetic
  source 1..24551: mol_type = other DNA
tgacatattcataaaaaatgtcgaaatttgtgaatatggtgaagaagaatttaactgttccggataagggttgggcaggcgcttccccggtcgatttgggtcgtgaagcgcctgccgaaaatcatgaggtggctttcgtcgaagggggagtgcacgccggttttccgtcacctgcgcaagattacatgaatgccagcatcgatctcaatagggagctggtgaagcatccggctgcaacattctttgcgaaggtcgtcggtgattctatgattgatgccggagtcgaggaaggcgacatattggtggttgacaagtcgttggaaccatctgaaggcgacatggcggtctgcttcattgacggagaatttgcccttaaatatatttcctttaaaaatcatgtcgtggacggctatggcgagcgccatgcaaaaaaggcttcaaagcccggagtctcttacgacatattggagcatcagagaatgtggctgttgcccgccaacccgaaatatcctccgatagaggtcactgatgccaatgatttcactatttggggagtggtgacctacgtcataaagaaggtgacgcatcatgcctaggtgattcggcttggcatgccgacttggctggagattagtgtagggaactatgtacgctttagtggattgcaataattttttcgtttcgtgcgagagggcgttccagccggaattggaaggcaggcctgtcgtcgtgctttccaataacgatggctgcgtggtggctcgcagcaatgaaagcaaggctatgggcataaagatgggcacgccgtttttcaaggtgaaatatttagcagatgagggcaagctgacggtgcgttcttcgaactatgccctctatggggatctttccgccagggtcatgtctatattggcagaaacagctccaaagctggaaatatattcaatagacgaggcttttatgaatatggacggagtctctgttgaaaagcttccggtgatatgccgcagccttatcaagaaaatcaggcagtggacaggaatccctgtcagcatcggcgccgccagcaccaagaccctgggaaaggttgcgaaccactttgcaaaacgatacaaaggttacaaaggcttctgcatgatagacacgactgaaaagatgaggaaagcgctgaagctcactccaataagcgatgtatggggaataggccggagattggctccgaagctggaagccgttggggtgaggactgctttggacttcatcgaaaggccggtcgaatgggtgcaggctagaatgggaatcacaggcgagcgaacctggcacgaattgcaaggcattcggatggtggaggaagaaaagaacgaggcgcgcaagacgatatgcacgtcgaggtcttttgcgaatatgataacagatttcgacgaaatcagccagagggtttccgatttcgccggcaaatgcgcagaaaaacttcgcctggaaggcactgcagcatattccgtcggagtcttccttctaaccaaccgattcagggaggatctggcgcagtacaatcctcaggcttgcattcgtctggcggttcctgccagcagcacgctggaaatagtcggagctgcgaaaaaggctctccgcatgatattcaaagccggttatgaatataagaaagccggagtcatcgtcatggatatcgtcaattctaacgaaatccagcagtccatcttcgatttcgacatcaaagaaagagagcgtgacgataagatttcccgggtgatggacatggtcaataaaagcgggaaaaatgtcctgaggctggcagcccagcgtccaggacattttgcggacggcatccgccgcgattattgctcgaagctatattctacggactggaatcagcttctcgaagtaaaatagccagtcgtcttttatttaatcgtcttctctttcttgccgagcaacttgcggacgaggagaggctcattggtagtgatgcagtctacgccgatgttgatcatcttctggatgtcctcttccttgttcacggtccagctgttcacgctcatgccatgattgcgagcctgcttgatccagtccggatgtttctcgaacaccttgaactgatagtctaccccattgattccgagagggtagagctcgtcgggactcatgtcttgctccagatactgcacggtgaagcctgggcagaggccagccagtctcttgcagatgttaaggctgaaagaaatgaatatcactctgtccggcgagtaaaggttgtgcctcttgagcgcttccacggcttggtccgtcatgtaatcctcgtgagccttgtcgccttgtttctttaactccatgaccagcaccgttttatcgctcttttctccctgcgtgagatattcatcaagagttggaaccctctctccgttcttaagcctgctgctcgcaaagtcagaataattggcatcccagatcctaaccccgtcgatgtctggatcgtgatggaccagcagcacgcagtcgtttgtcatatgaacatcgaattccgatccccataatccttgctcctgagcagtcctcagagaagcaattgaattctcggcatgttttgcttcttcgcatttccagtatcccctgtgagcggtcactgcgattttctgcgtggagcatgatgcagccattaccaatacagtggctgcagttaaaatagaagtaaatttagacatattcgatatggatttattgtcaacacttacaaagataatcattatctttgcttaattaaagcagaaattattataatttcaaaataaaatggttagagttgatttgaaaggttgcagctccttcgtaaacgctgcggattataaggaatatgttggcaaggcacttgcggcctacgatgtgcttgacaaagagaacggacttggtaatgacttcctcgggtggaaacacctgccaagccagactccggaatcgttgattaaggattgcgaggctgtccgcgacgagtggaaagcaaaaggcgtgaatctggtggtagtgataggaatcggaggctcttaccttggcgcacgctgcgcaattgaggcgctgtcgcacaatttcgcgaaacaactgagcggcgctaaggaatatcctgaagtcgttttcgcagggaacaacctttccgaggaatatctggccgatctcatggacctggttgcccagaggaatgtcgctaccgtggtcatctccaagtctggcaccactaccgaacctgccgtcgctttcagagtcgtcaaggaatatattgaaaagaattacgaggattccgcaagcaggatagttgccataaccgatgctcacaagggcgctctaaagaccctcgccactcaggaaggctacaagacattcgtcgttcctgacaatgtaggtggccgttactccgtgctcacccctgtaggaatcctgccaatagtgctggctggtttcgacatccgcgccatgcttgctggcgcagctgatatggaaaaggctctcgcagtgaagagtgagacaaaccctgcggttgaatatgccgcgatgcggaatctgttatattcaaaattaggaaagaagattgaaatcctcgtttcgtacaaccctaagttccaatatcttggagaatggtggaaacagctttacggagagtccgaaggcaaggacaagaaaggaatattccctgcgtcggtcaatttcactaccgacctccattcaatgggccagttcattcaggatggcgacagggtcatgttcgagacagtcgtgaacatcgagaaatctaacagaagcgtcatcatcggttctgatcctcagaaccttgaccagctgaattacctcgccggacagcacgtggagcattgcaatgccatggctcagctgggaacgaagctggctcacatcgacggcggagtgcctcaggttgaggtttcaatagaagagatcaatgaatataaccttggcgggctgttctacttcttcgaattcgcttgcggcgtgagcggctacttgctaggcgtgaatccgttcaaccagcctggtgttgaggcttacaagaagaatatgttcgctcttcttgagaagcctggctacgaagagcagaccaaggccatcagagaaaggctttaatgaagtgcgaagatcgctttagggagacgtacaggcaggagcctgagggtctctctttttgtccttacagggtgtgtcccatcggggcgcactcggatcaccaactgggaaagattaccggtttcgccatagacaggggcattcacatcgcctattcgcccaagcagaacggagtcatagaattggcctcgctccagtttcccaagcgcgctcaatggcatgtacaagccgtgcctgagtccaagcaaggcgactgggcagattatctgcgcggcgctacgctggaactcagctatcgttatccgctcagcgttggcctgcgtggggtaattgagggtactctgcctatcggaggcctgtcttcttctgccgcagtgataatatccttcatgcaggctctctgcaaggtgaataatattcatttggatgatcatgacctgataatgatggcaaagtcggcagagaacaagtacgtgggggtgtcttgtggcaaactggatcagagctgcgaggtgctatcgcgaaaagggcatctgctgtatctggacaccaaggatgattcatatgagctgattcccgtttcgccaacgatgaagccatataagattgcgatattcttcagcggcgtggagcgcagcctagctggtagcaaattcaacatgagggtggacgagtgcaggagcgctgcctatgcattgaaggcctattcgggaatggaatatggaaaattcgaggacacattcctcagggacgtgccagtcgatgtattctatgaatttggcgaccgcctgccaaggaattggtggaagcgcgctgagcattggtacactgaatatgacagggttcagcggggggctgaggcttggaggaggggagacatcgaggaatatggcagattgtcgttcgagagcggatgttcttctatcgagaactgggagactggctctccggaacttaaaaagatatatgagataatgacgcgcacggatggcatttatggcgggcgtttcagcggcgccggcttcaaaggctgctgcatggctctgattgatccggcatatgaagagagcatattcaggaaggtagaagatgaatatctcgatgctttccctgccctccgtggccgctacggcgcctacctatgccactccgccgacggcgtaagagtgtaaaacatgaagtgcttgattttggctgcggggtatgcgacaaggctgtacccgctcacggagaatttcccgaaaccgctgctcgatgtcggcggcaagacaattttggactggctgatagatgatgtggcggcatcaggaaaggttgatgaatatgctgttgtcaccaaccataaatttgccgggcattttgaaacgtgggcgtcagggcgtagcgagaaaatcactgtcgtggacgatggcaccacggcaaacgagacccgcctaggcgcagtgcgagatattcagtatgccttggagaagacgggcttcgacgacgacaccattatcatggcaggggataacttgctggatttcagtctcatcaaattcattgaatatgccattgcggcagggacttcttgcatcatgcgctactacgagccatccgaggccaagctgcataaatgcggagtcgtagaggttgacgagcacgatttgatattgtcgatggaagaaaagccagcagtgccgcgctcccactggtgctgtcctccgttctatttctatcgcaggcaggatgtcgcacgtattcccgaaggcatggccgcaggctgcggaatcgatgccccaggcagtttcgtcgcctggctcgccaccaaagtcccaatccgtgccatggaaatgccaggacaccgttacgacatcggcaccctcgattcctacaaagccgcccaagctacctatcaaggtattcactagccctgttcgtcaggcaaccccgctgttgttccaactagcagcccacggcgccttgctgtgcgcgaccaggcgtgggcggaggtcgctctgcgagtccaccaggcagcccacggcgccttgctgtgcgcgaccaagcgtgggcggaggccatctgcgagtccaccaggcagcccacggcgccttgctgtgtgcgaccaggcgtgtgcggaggccctctgcgagtccaccaggctcactcgccggttcaccaggcagccccgcctgctaacccacgcccgttcaccaggctgccccgccggttcaccaggctgccacgcaggttcaccaggcagccgcacccgcctacctaacgccgtaagagaccgccccgtcagccctaccactcaccacgtaagcaagtcgtctttgtaagtgtttgatattcaaggcttccaaatggactttgcttacgcctcccaaaaattgaggccgtgagcaaacgcccttgtaagttattgaatattaatgcctgtcttgcctaccttgctcacgctcaacattgatgctggcaaagccaccgtaccggtagacaacatttcggtcaagcagggtcaaacgacagatttgtttggcactagatccgaatctattccgcagcataggcacggatctacacttatcattaaatctcatgtcttcaaatcccgaaacgccaaggccggcaaaatattcatgtaaagaatcgagtatctcgttgtcgctgtatgtcaccttttcaggctctccttccattgcagctgcattttgctcagtcttccaatcctttaacagccaatataattcagtagccttgccgaaagcattctcaactgacggtatgtccacgtacgattcgggtaaaattattccgtcacatatcttgtaatgcgaaggtagagccttcctggttagaagtgtctgcctgatctgcgaggaattgagctgacctactgtcattgcaggtcttgtgagtatgcgacgattgaaataaagatatgtggtattccaataataggtgtacggatcacaaattcttgctgcctgtgggtttcgcaagatataggcaacttcagtcttgaacatttccgggccggttaccttcacgagtgtcggtttcagttcctgaaatggggaagaacggcgtaaggtgttaactaaatgcttaccaacccgtgatttccatccattgtaaaaccttatgacctgattcctggtgccgaataggagaaaatgcgcatggttactcatcaaagtgaagcagtatatgacaactcctgtgctcaattgtgctatcggaatgctattcattccgaatttgtaatcgtcaaaagtcttgaaaatcaagttgttcgtcagctctcccgaacaaaggtgccagcatgatttctgaatgtcatccatatagtttgaagtttagacctatggattgccccatagacgattgcaaatctatctaaatttctgattatatgcaatgcgctaaggatgtaagcaagccctattcgtaaatatatgatactgaggagctaccaaaaacctcttgcttacgcctcccaaaaattgaggccgtgagcaaacgcccttgtaagttattgaatattaatgcctgtcttgcctaccttgctcacgccatcgggagagggcactctccgttgtgtctttgaagtctttggccaggccgccggcgctggtctccttgtacagagaaggaaggtctttgcctgtctgcttcatcacttccacgacgtggtcgaacgacacgcggtgacggccgtcggaaaaagcagcgtaaaggttagcatccagcgccctggtcgcagcaaaggcatttcgctcgatgcaaggaatctgtaccagcccgcaaatcgggtcgcaggtcatgcctaaatggtgctccagagccatctcggcagcatattcaatctgagcaggagttccgccgaaaagctggcaggcagctgctgcagtcatcgcgcaggctaccccgacttctccctgacaacccacttcagcacctgaaatagaagcgttctgcttcaccacgttgccgactattccgcccgtcgctatggcatgcagaacctttatgtcactgaaattatgtcctttagccaggtggtaaagcacccctggcatcactccgctggatccgcaggtcggcgcagtgactatcgtcccgccagaagcgttttcctcgcttactgctagggcataggcatataccagtcctctggtctgaagcgtctgcttgtagcctgtggctttaatgtaatatgtcgctgccttacgagccaagttcaaaggtcctgggagccgcccctcgtggtttatcccattctccacggacagcttcatcgcaatccaaatctcctccagatagtcccaaatctccgaaccctcgcacaagtcgacatattcccaataattcctgccattgtcgtcgcaccagttcattatctgggagaggctgttcatatcgtaaacttctttcgtagagaaacggtcaggctcttttccttccgagagcgcgccaccgcctatgctgtagacggtccagtcatcgagcgtgtgtccctcccggttgaaagctttgaattccatgccgttagggtgatatggcaggaatatgccagccttccagactatttctactggagccgttggttccagcacctctttaattgcaatgtcggtcatgtggcccttaccggtcgccgccaagctgccatagagggtcacctcgaacttcgctgcatccctgtgcctttcgagaaaatctttcgccgccctctgtggccccatggtatggctgctcgacggccccttgccaatccgaaaaagttccttgagagatttcatgcgacaactgtcattttcttgcccaaactcgttcgatctggccgatgtacatcgtgtggagtttcatcctgctctcatcgccatacatgctgcggacagattccggcagcttctctttctcaaatgtatgggaatatattttcttgcattcaatcgtcatcactgcctccttgaatgatgggttgccttcattggtaaactctggcgtgggccccgcatccttcagcttgtcgccactgcgaccagaatggcttccaatgtagagcagggctttccgtttgtcatttggaaaaagtgagaccgtgaaatgttcgtatttctccatgaatccgtgagtataacggcttcctgacacgtagacggtcacgacaggcatctcccacagctgacccaggccgccccatgagatggtcatggcattcatcttttcctcattgcctgcagcaaggacaatccagtccttggcaaataattccaccgcattcccagggatgtttccggcctttatctcctgccattgaccgtccgccttgagagagcctgcatcgcagttgcctgcgctagccctgtactgtccggcacaagcggataatagaatactcataaatattgtaactatttgctttaatcgatgttcgttcattagccattattctcggtaacaaatgacaaatatagtgaaacttatccgaaatgactttaccaagcgtgaagaaacagacggggatatttattcaagatcaggaatcactagttcagagaagttaatattcgaagacatttcattattcaagtttacggcttcgtgatactggaaaatggtgcccggcatgttctacatctatcataataaaaaatcccgctgctaagggcaacgggaaagaacctaatgttttcacaacggaataatccttattgtgatttgcttgaaattctgttgctaatataagaaaaaaatatattactattcattattacaatattttttttaactttaggatgagaaaaacaagagttattgcgcttggcaatgatttctcgagcatgagtttactaataatcaataaataaaaatgaaaaatattctaggattagaccttggtactaatagcattggctgggctgttgttggaagcgtaactgatgcggctgaaaaagaaatacttgcgggcattaaaggctgcggaagcagaattattccaatggatgcctcgcagttgagcgatttcgctaaaggaaatactgtttcacagacagctgacagacgaagcaagaggacggcccgtcgaatgaatgagaggttcattcttagaagggagcggcttcatagggtgctgaatttgatgggtttcctgcctgaacattatgccgcttttcttgaccgatatgggaaattcatcgatgccgatgaccacaagatagcatggaggacaaattctgacggttggcaggagttcgtttaccgacaggcattcaatgagatgtatgaagagttcaaatcgaaaaaccctgaatttctcaaaaacgggggcaagattccttacgactggacaatatactatcttcggaagaaagccctctatagcccgattaccaaagaagagctttcatggatacttctgaacgcaaaccaaaagagaggatataaccagctcatggggatggatgagcagcaggagcaggaagataggtcaaaatcagttgaatatttgtcgtccacaatcgtagaagtaaccgacagcggcgataagaaggggaaagccacttggtggaattgtaagcttgacaacgggatggtatacaaacgtccttctgaagtcaagccggattgggaggggaagacaaaggaattcatcattaccaccgacctcgacaaagacggaaagccaaaactgaacaaatacggagaaatccagcgaagtttccgcatgccgggagaaaacgactggactctcatcaaaacaaggactgaagatcaggttaacaagtcaggagagttcgttggagagtacattttcaatgcgcttctgaaagaaccaacgcaaaaaatccgaggcaaactggtcaggactatagacagagagttccacagagctgaattgaaagcaatcctcggcaagcaggttggttttatcaaggaactgacagacagagacttgtatcgccaatgcatcgaagaactgtatcctagcaatgacggctatcgtaattccattgcgtcaagagatttcatatatcttttagcagatgatatcattctataccagaggccattgaaaacaaagaagagcctgatagacaactgcccatacgagagccacatctatacagacaaagaaacaggcgaggtgaaaacagctcccgtaaaatgcatcgccaaatctcagcctctttaccaggagttcaggctatggcagtttgtccagaacctgagaatctacgacaatttcagtggggaagacgagacttctttcgtcatcccgaccgaagcgaaacgggtcgaggtattcaaatatctcaacgatatctcatctaccaatcaagagtctttcttcaaagaattcttaggtgtaaaaaagccgaaaggcaaagattcgaaactcccatacgtttggaactatgtagaaggtaaagattatccttgcaacgagacacgcggcccgattctttcaaggttgaagaaatcgggaatcccttcttctttccttaccagagacatagagaatgatttatggctaattctctactcatccgagagcaggaaagaacttgaagaagcccttaggaaatttgcgggcaaacatgatcttgccgagacttttgtagaaaacttcaagaaattcccggcatttgagaaagactacggagcctactcggcaaaggcaattaaaaagttgctgccgcttatgagaatgggagaattctggagcgagacggcaatatctaatgatgtcaaggccaatattgaaaacataattaacggaaatgtctccgcctccattccccagaaagtgagagatcagctgtcgtcatataaaagtatttccgatttcaagggactgcctctttatcttgcttgttacgttgtctatggcaggcatagtgaagcgtctgattcccagctttggacaagtcctgaagacattgatgcctatcttaacaatttcaaacaacattctctccacaaccctatcgtagagcaggttgtgaccgagactttgagaactgtcagagatatctggcggtgttttggcaagattgatgaaattcacatcgagatgggacgagatcttaagagtccggccgacaaacgcagacaatatcagatgagagcccttgagaacgagaatacgaatatgaggatccgcgctctattgatggagtttaccaatcctgattttaaaatcgattatgtcagaccctattctccttctcaacaggaccttctcaggatttatgaagaaaccgtcctaaatagtggagaagaattgcctgattatgttgttgacgttcttcgtaatcttggcaacggcaaaactgaacagccgacccatgctgagattctaaaatacaaactatggctggatcagaaataccgttcaccatacacggggcagccgattcctctggcaaaattgtttactccggcatatgaaatcgagcatgtgattccacaggcgagatacttcgatgattcatacaacaacaaagtaatatgcgaatcagaggtgaacaagctgaaatcaaacatgttgggccatgagttcattgataaacatggtggagaagctgtatcgctcaacatgggtggcactgtgagaatattgactaaggacaagtatgaagacttagtcaagaaaatctacggaaacgaacgaatgaaaatcaagtttaagaatctcatgcttgacgacattccggaggactttatcaacaggcagctcaatgacagcagatatatcagcaggctcatgctagggcttctatccaatatcgtaagaaaagaaggcgagactgaggcgacctctcgcaatgtcattgccactaacggctcaataacagacaggctcaaggtagattggggtataaaagatacatggaataagatccttctgcctcgctttagaaggatgaatgaaatcacaggcacaaacgaatacactacaattaacagaaacggacatgaaattcctaacgtgccagacgacatgagcaaaggattcatcatcaagcgaatcgaccatagacatcatgctatggatgcaattgttattgcctgtgccagccgaaacatcgtgaactatctcaacaattcttccgcctgcaagggagcaaaaatttcgagatatgaccttcagcatttattgtgcaacaaagtgctccagggagacggaagctacagatgggtaatcaaaacgccttggactggatttcaaaatgatgtatacaatgcactgaacaacattattgtaagctttaagcagaatctgagggtcataaacaaaactacgaattattaccagcattatgaggacggaaagaaaattattgcgaagcagatgaaaggcgacaactgggcagtgcgcaagtccatgcacaaggacaccgtctttagagaggtgaatttgagaatgattcgtcaggagaatctgaaatccgccatcgagcaccttgacgatattgtgaacagagaccttaaggagaaactcaaagagtttctcagggaaggaataagcctcgctaaaatcaagggctattttgagcaggagaaggatacctggtcagatgtgaatcttaaaaagattgacgtgtactactttactcaggaagataagaacccaaagacaggtctcccgaaacatcggttcttctccacgaggaagccaatcgacatgtcttacactgaggaaaaaataaagacacagattacagatactgcaatccaaaaaataatgctggcccatcttgccgaaaacggcaacgacccgaaggtggcatttagtcctgacgggatagatcgtatgaacgacaacatagtgcgtttgaatagtggtcgtatgcatcagcctatatttaaagtcccattttttgaagaggggcaaaagttcagcgtaggaaatgtcggcgcaaaggccaagaaattcgtagaatctgacaaggggacccatctattctttgccatctatgaaaacgaagccgaagacaaggagacaggggagattaagaaagtacgttcgttcgctgacatacctttaaatgtcgccatcgatagggagaagcaaggtttggctcctgcgccggagaacgaaaacggcatgaagcctgttatggtgctgtccccaggtgatctggtttacgtgcctacggaagaagaaatcaaagatggaaaacttggaccttcaatagacagggatagaatctataaaatggtgagcgcagaaccggggaaatgctatttcatccctcagtcagtagcctctgtcattaaagacaaggtcgaatttgaatctcataataagtccatgaaaagcgcagatgggaaggtgtttattcagaaagtctgcgtccccgtcaaagtcgataggctcggacatatcatctcaatcaatctcaatatgatatgattaagaagactcttgccattattaatccagcatatctctcgctaaaaaacggtcagctcgttgctagggctacttttgaggaagactcagaaactaaagaaaagattataaccgctccaatagaagatattggcgttcttgttcttgataataggcagattacgataacgcagggacttacggcggctcttgtcgctaacaattgtgctgtcattacctgtgataataaaggtatgcctgtcgccatgtgtctacctttggaaagtaatactgtgcagagtgaaagatttagagaccagattgaagccagccttccattgcggaagcaactatggcagcagactgtagtagcaaaaatcacgaaccagtcagcggttctgtatagaaactctggcatggacaagaaaatgatgcagaattgggcgaaaaaggtaaggagtggagatccggataacattgaggcaagggctgcggcatattactggaagaatctgttttctggcattaaagggcttgacaactttgtgagaggacgtgacggcgctcctcctaacaatttgctgaactacggatatgcaattctcagatcaatcactgctagagccttaacatctagcggaatgctgcctactctaggcattcatcatcataacagatacaatgcatattgtcttgcggatgacataatggaaccatataggccgtacgtcgatgaccttgtgttcgggattatctggaatagaggaacaggaaatataactattgacaaagaaataaaaaagaaactcctgactatccctgtgttagatgttgtaattgacgggcaaaggagtccgcttatggttgccatgacgcagacgacggcttccctatataaatgctttcgtggaacgatcagaaaaatagcatatccgtcaatagattgattttttatgctagacagactaagtgaatacagaattatgtggatacttgtgttcttcgacttgcctacggaatcgaggaaagacatcaaagcatatgctcttttccgaaagagtttgataaaagatggatttactatgtatcaggagtctgtttacgttcgtaattgcggaagcatggaaaactgtaatgttcatgttaaaagggtgacggcgatgttgccgcaaaaaggaagcgtatctataatgtgcatcactgacaaacaattcggtgatataaaagtgttttatggagcaaaagaacaacctcctcaagcgccgggacaacaacttgagctattctgaatattccgaatagaaacgaataaacccgccataagacgggtttattttagtaaagcacactcagaattttatttctgcgcaatacgcataagtacctcatctttagtagcttaccaaggttgtactgttgctttacctctcaaaggtaacgaatttcaagcaaatcacaaccgaattaataatgaggttctagcagctaaagactgttgctttacctctcaaaggtaacgaatttcaagcaaatcacaactttgcagcaatggtctggttattgctaccgactgttgctttacctctcaaaggtaacgaatttcaagcaaatcacaacagcaggttatgccaaccccgcccgccctgcactgttgctttacctctcaaaggtaacgaatttcaagcaaatcacaacaaaatccggtcattaagaaattatcaaaaaactgttgctttacctctcaaaggtaacgaatttcaagcaaatcacaacggtttccttctgatggtactggtctgcttgactgttgctttacctctcaaaggtaacgaatttcaagcaaatcacaacgcgctctgggtttggctttggttcctcttgactgttgctttacctctcaaaggtaacgaatttcaagcaaatcacaacgcttccatatctaatagcaaaagctaacaactgttgctttacctctcaaaggtaacgaatttcaagcaaatcacaacagtacaaagaggaaacaaagaataagaacgactgttgctttacctctcaaaggtaacgaatttcaagcaaatcacaactgaggacggacgtatacacggacttttacactgttgctttacctctcaaaggtaacgaatttcaagcaaatcacaactctacgtccagcataagcagtactacgcagactgttgctttacctctcaaaggtaacgaatttcaagcaaatcacaacgtgtcccggtcagacctataacgcgctcgactgttgctttacctctcaaaggtaacgaatttcaagcaaatcacaacgctatgagggtaaatttgcttacagccaccaactgttgctttacctctcaaaggtaacgaatttcaagcaaatcacaacacgaaaccaactaaattactacgcattatgactgttgctttacctctcaaaggtaacgaatttcaagcaaatcacaacgtggcccatagcttcgcttaccgtgtctttgactgttgctttacctctcaaaggtaacgaatttcaagcaaatcacaacgtggtcgagttcacaccgtgctgctgcgctactgttgctttacctctcaaaggtaacgaatttcaagcaaatcacaactggatgatgaaacgtatagggtatgggacgactgttgctttacctctcaaaggtaacgaatttcaagcaaatcacaacttagattgccattttctaaacgaataatcactgttgctttacctctcaaaggtaacgaatttcaagcaaatcacaacaggtcggtaatttccttaccggtctgctcactgttgctttacctctcaaaggtaacgaatttcaagcaaatcacaacgatgatgacgtaggtaaggtcgagctcattgactgttgctttacctctcaaaggtaacgaatttcaagcaaatcacaacctattcttgttgttctcaattttcgctgcgactgttgctttacctctcaaaggtaacgaatttcaagcaaatcacaacgcggtgaagggcgagtaccggtgcagtttcactgttgctttacctctcaaaggtaacgaatttcaagcaaatcacaactcctcgtcttcggccatgtcgtccaggggactgttgctttacctctcaaaggtaacgaatttcaagcaaatcacaactaaaaacggccgtatgtaattttattgactactgttgctttacctctcaaaggtaacgaatttcaagcaaatcacaacaagacgcttgtggtcgccccgaagaaggttactgttgctttacctctcaaaggtaacgaatttcaagcaaatcacaacaatcaggaaactgtcatgttaagcatcacgactgttgctttacctctcaaaggtaacgaatttcaagcaaatcacaactccttattctaagaggccgaccaaggtggactgttgctttacctctcaaaggtaacgaatttcaagcaaatcacaacgtaaactcgctgtaatatttcagctggtatactgttgctttacctctcaaaatatttcagctggtatactgttgctttacctctcaaaggtaacgaatttcaagcaaatcacaactgctctggtagttataaaccatctaaaaaactgttgctttacctctcaaaggtaacgaatttcaagcaaatcacaacgctccggcaagagtcttcaccgccctgtctactgttgctttacctctcaaaggtaacgaatttcaagcaaatcacaacggcaggtgcggcagggctgcaacaaagcgactgttgctttacctctcaaaggtaacgaatttcaagcaaatcacaacgtaaactcgctgtaatatttcagctggtatactgttgctttacctctcaaccatatttagcgagactgttgctttacctctcaaaggtaacgaatttcaagcaaatcacaacgtcatccagaatggcggcgcgaattccgttactgttgctttacctctcaaaggtaacgaatttcaagcaaatcacaacgtacccatcatggactgccttcaggcactcaactgttgctttacctctcaaaggtaacgaatttcaagcaaatcacaaccgttccggaacgatctcgcggagcctttccgcgattcttaaataaagtgattccattttatgaatttataatgcgtaaaacttctttctcgacataggcggatatccgtgcgtcaagctcggcgctctgccccatgaactgcctccggggaatgttgatggtcaatgtctctttctttgtcaatgccagtcttttccacttttcggcttcaccggagtccgtctgattgccaactgatttcgttgtcccgttcttttggccttttcgtggcttctgtgcgcctttttgcttgcctttaagctcgtaatacttcgcccatgcgaaacgccgcattttgggcgttatcttgggatggacagttcctccctcattgtggattgcggcataggccacatcattgaatatggtgaccttcgctattcccggggtgtagtttatcgagctgaacaggtggttccgggatgacatcagcgtcttatattgggagtccgcccccgcctctccggaggaaaggcgtttcgcctgtggccatggatgcagacccctattgacgaatccgccttgacggaagttgtcctgaaattgctgcttggcgtatttccccgcaacgaccgggagtttcctcgatatgagctgctcaatttcctttttcatccgccgtatgtctgattcaagtttgtctgccatttgaaaacattttgaaaatcatttgaattctattgcaaatcataaaaaagtgttatatttgcaatgacgcaagtcgggtgccggggtgttcctagagagacccggcttttttgtgcttaaacatcatactttagaatttcagtcattccacgcacaacacagaagacatgctttatatgtttattgagcatcttcccggattcgtcacgatagaacctgaaatagttcaaggatttcatcatcttcttctcatcgaatagagttgggtcgtggaagtataggcacaaggtgtccgctttctccgttatgtcagttcttgcattgtagcgccgtaattggtcgttcttcttcacaaagatgttggaataccatcctcggcctgtgacagaacgtatatccataagaattccatccaaggtcatgtcaagtgcaggcaattgatttcccttaaccctttttgactcatcttgtaggacaacgacatgtccggccctgaataactgctcttggcattccaattcaagttcggttgatgtcagcccctcactgaagaatcgttccgcatttggaccgtcatgattaatgtgccccttatgtgtggcaacaagcccaccgttgttcttgtcgaatctgacatcagtgtagtcgggatctcgtttaagctttcgatattcaacgcggtgttcttttatcctttctttctcccctgtcaagtcttgtatgcatgctctgatatgctgacagttgtagcagtcctttttcctgtcatagaatatggacgctatcctatttctaatttttgagttgtaaaagccgcaatgggcgcagtccggaggaaaatagggatggtcatccgagaacacctgcccggtctttgccggattgccaccgagtccgggggacggctctgcaatgccttccacgccaagtccggcgttgtcggtaacgggttcgtctgtggactgccagccgcattggcatccccattcgtctccaggctagtgctcatcccagaaagggtcgcctaccggccagatatggtgatagaacggcatatgggactcgcggggattgacagccgtacttggcagccattcgatattcgggaacacgtccgcctcatctatgaactgcctcatctccgctgcccgatacgctcgctttatggccgtgtcatattcagtccgtagccaagcattgacgtgatggctcacaattccttctgtgtcctgcttgaactgccggaatgatttgatgtttccgttctcatccagaagctttgatgccatgtcacgccccatgcggtgagccttgaacgcggcgaagacctcggtgtttgtcagcagctccttcttgaatccgctgccggctgttgctttacctctcaaaggtaacgaatttcaagcaaatcacaactcgtcaaagcaggtaccaattcctgttttggctgttattttacctctcgaaggtaacgaattacaaacaaatcataacattttgatgagctggccggacgatatccagttgaatctggcagatcgtgccatttctgacagaccgtgccatttcttgcacagtgtcgctttgactctatcatattggaatcgggcgatatcgatgaacgaacttattataccgagagaacttgtctcgtcttcaataacggcagaatctcagtctatgtcgcttcgtaatacatgcctgtcattggcgcgtgtgcagaagaaacagactgccattcccctagctttacgtgagtatccgtccgtcgagtggtggcatcggaacggtgtcgaattttaataattaacggcaacggcgaccagaatcctatgacccatgatgcatattcctgtgactcactccggttctggaaacggggttggcaacgcagttctccattccgagttgtccattggcatggcaccgttgccggtaaattagaatcacaatgactagggaggttcggtcaacgttattggattattgttgtcaatagatgtaaaagcttcgttctcgcatgcggatacaagcagttcttaaaagtggcagggcagaccaatgtgggaattatgttttctgttgcatatctgtctgcctgctaattgcaaataacgtgggaatagaaccgagttcgggatggctgtcaatgtcgttcaaaaaccgatggcgctgggtggaaacacggaagcggaggctgggagataaggaagcaaccgccttgccgtggataggccagcgtgtggaaacacggaagcggcggctgggagatggcggtcaatgttgcttaaaaaccagtgtgcggtctcaccttgtcagtaataatctgggggtgcgtgctgttgggggctgaaatagtgactgaaagactgaaaaatggggtgctgatggttttgaagtgttgggccaaagtgctaaattcggcttgcaatacaaaatattcttggaatatgaagaagttatattcattatcagtcgtcgttgtttcgtttttattcttgtttgcgccggcatcgtttgatctttcggctcatgaacccgttacgggggacacaagagaggagatgctgacgggagccgtagccaggaaggaaagcgcctccgtagcagggcggggaggcaccttgcggtggggtgtcatagccgggaaggaatgcgtagctgagcatggcgccgtaacatggacggtaagcgcctccgtagctgagcaaggtgtcgttgcagggcggggaagtgccttggagcaaggggcgttcgagaattttccgctgccgaagaaccctgacaccctgcggattctggcgataggaaacagtttctctgatgacgggactgagtatctccctgctctgctcaggactgcgggaatccacaacgtgacagtggcaaggctgtacatcggtgggtgctcgctggaaaggcattgcaatgaatatgcttccggcgcagagaattataaatattcgaaggctaaaaatggcgtatgggcggttgtcagcgagcattgctctttgagagatggcattaaggatgagccttgggatattatcactatgcaagagacttccggtttgtctggaatatatgataactacagggagtggctgccgaagttgatagagatcgttcgcaatgaggcaacgaaccctcatgcgtcgatcgtctggcatgagacatgggcatatgcggtgaattcgaatcacgagagattcccgctttacgacaggagccaggcaaagatgtggaatggcattcaaagctgcgtggaaaatctgaagaaagacttcaatatagatgtcgttattcctagcggaaaggcaatccagctggcgagggagactagccttaacaacaaaaataaggtcccggatgcatgcaaggtttatgatctcacccgtgatggatatcacctgaaccggcagtatggccgctatatcgctgcctgcacgtggttcgagaccctcatcaagccgacgctgggcatttccgtggaaggcaatgaatatgtcctggaggacacagaatatcacatctcgaagaaagaagctcgccaatgccagaaaatagccatggaggcggtcagatagacaggcttcccaacaacgaaaaacgcccgggattgctctcgggcgtttgcggtgcggatggggttcgaacccacgacctccggcgtgacaggccggcattctaaccaaactgaactaccgcaccaaaaaaatgcatctgcatttttcggattgtttcctcaaatgcggatgcaaatatagtcaaaaatagattggctgcaaatttttttatttaatttctatcattttctttgactgaggtacttccttgttctcaatcttagggagagctactttcagcacgccgtcttgaactgtggcgctaatcttttctctgtcaacgtcatcaggcagtaccatagtctgctggaacttggcgtatgagaattcgtgcctgaggaaacggcctttcttcttgccctcatcttttgtttcctctttcttctccatcttgatcacgaggtcgttgtcttcgtcaaggctaacctggaagtcatccttcgtcaggccaggagcggcaagctcgaggttgtagcctttttcgtcttctaatacattgatcgctggaacagatgcatttgatctttcaatccaatcgttatcaaataaatcattgaaaatgctcggtaaccaattctggttatatcttcttgaaggtaccataatataaatctcctatatttttaaattttctataatttagcctgaccctttcggatctgtctccagcccgtccttcgagtcttgacttccgtcgtcctctcgaacggacactaagcttataggcaagctgcataccaatgccaaaactggccaaaatggcgacaatttgtcataacttactgacaatgtggcgtttaaatgtgccaaattgtcttgtccaagacatcttgctcagctctcgggaactctccggcactgtggatactttcattctttgccggatttttagtatctttgacattcttaatggttagtcaatgtcagagaaaggcaacatcataatcagaggcgccaaggtaaacaaccttaagaatattaccgttgagattcctagaaacgagttcgtggtcatcacgggcatttccggctccgggaaatcatcgctggcgttcgacaccctgttcgcagagggtcagagacggttcgcggagagtttgagctcgtatgccaggcaattcctgggcaggatgagcaagcccgatgtggaatccatcgaggggattccaccagcgatagcaatagagcagaaagtgaacatcaagaatcctcgttccacggttgccacgacgacggaaatttacgattacctgaggatcatatttgcccgcatcggccgtacatactcgccaatcagcggaaaggaggttaagtgccatagcgtaaatgatgtgatggcaagcatcctgaaaggcgacgccggtgccatttacatcatggcggacttggactgggacaatcgagaagataaggttgagctgatgctgaagctgaaagaagagggctataccaggttctttggaacagggaaaggccagggaatggtctccatcgaggacataatgcgccttgcggatgctggaaattacccgaatgggctgtatctcctcgtagacaggcttaaattgccatctttcaagggcggttatccttataatgaggatggc

SEQ ID NO: 1109 - DNA, 24545 bp, synthetic construct
  source 1..24545: mol_type = other DNA
  misc_feature 1..24545: note = Synthetic
ttatcggttgttccattcccgctttggcggtatcgcgtgtaataatggtcccatcgtaattgatgccataggtgatttccggccacccgtagttggcacctttttttatgatgttcagttcatcaccccctttggggccatgctcggtttcccatagttcgccggtcacaggatgaaacgccaaaccctgcggattgcgatgaccatatgaccaaatggaggggatggcgccgggtgtgtctacaaagggattgtcttccggaattttcccgtcatcatgtatgcggtgtattttgccactatgatttgtgaggtcctgcgcattggagggattaccccgttcccctaccgaaaagtagagatagtgatctttgtcaaaagccattctgcaaccaaagtgaacaccgctacgcgtattgggcgtggctttaaaaattttttcccggtcaaccagttggtcatctttaaggcgtgccctcattattgccgtgttaccaccattgccttcaggttctgaatatgccagatatatccacccgttgttttcataatcgggatggagttcaatgtcgaggagtccaccctgaccgttggcatatacctgaggcacttcttctattctggcggcaaaggtcttgccacggaaacgaaagagttctccacttctttccgttaccagcatgtcaccgtttggaagccatgccatggcccacggtatcccgagtccggttgctatcgtatcgatacggaacgacagctcttctgttttcaccacctccggaaatcccggccggtagtcgtgagacccggctttcttttttatatccgttagaatgtaacgtgctacgccttctatttctgtttgagagaaaacattgccaaaagcgggcatgcccgtttcatagtccccgtccctgatgatcctttccatttcgctttgagacctcgcaaacagagcgttacggtcttcacccgcaaatcgttccatataaggcccgtgacaacttgcgcaataattggtgtataactgcccgggtgaacgtggtgcctgagcatcgccacccgacgtctggcccgaacaacctatcgaggaggtggaggtcaataaggcccacagcaaaattattaaaaccgaaaacaagccggttattgttatatgctttttgttaaacatagctcttgaggattgtggtgttttttgatgaagcttttcaattgcaatggttttattaaatttcttcctggtttataaagcttaatattaaacatttatctcgaaaaaatgtttagtgcctttactttagtgaattgaacaattgatatgttaataacgttcttttatgtgtcagtgttacacctgaagattgagggattgacggggtaatgtgctaatgtgctaatgtgctaatgagttgatttgctaatgttctgatattgagttgtatgtttctgtagaatatttatcttaaatcttaaatctaaaaatctaaaaatctattttttaatgtgctgatgtgctaatgagttgatgtgctgatgagttgatttgctaatgtgctgatattgagttgtatgttcctgtaaaatatttatcttaaatcttaaatctaaaaatctaaaaatctaataatctaataatctaaaaattactcattatggaaaatagagaaaaacttgtggttttatggaccagcgctgataaagaggttgccgaaaaagttgtattgatgtattgccagggtgcaaaaatgaaaaactggtttcaggaagtggtattggtggtttggggaccctcaactaaattgttggcgtcagacagtaccctgcaggataaaattaaggggttgaaggaaattggtatcagggtgcaggcttgcagcgtttgtgccggcgattatggagttgtggatgaacttgagaaactggggttagaagttattccaatgggagaacctttgaccaattatttgaaagatgactggaaagtgttgagcttttaaaatttgttggtttaaatcgaaaaaacgggtatggcgtaaaggacatggttaaaaagtaaatttcagaggtaaaagtgcactgtcagaagtggaatttttcttcaatgtcagtttcccattaagggtaagatttttttttgatattctaatctaatggttgtaaattacacttcgcaatatttcaattggttaggttagggtatgagggtaatgtctgtgttgtttttaatgttgaattaagaggcctggaaacgtctggtaataatgacaaacttcttccaaaagtcttttagcgttcaaaaatgagcagttttatcttatccatatttgacaaaagaatatttcaaacactcaataataaatccgggtataatttaaatttctgtttatgaaaaagaaacgttattcttttattgtcatgctgtttgttatggcaatcactttaatcggtagtggttgtcagcaaaaaacaacagttgaaagagcacccctcatcccgatggaagattttttccgcaatccggaaaaaacagcttatcagatttcgcccgacggaaaatatttttccttcatggcaccctatgaaagccgccttaatatctttgttcaggccgttgacggcagcgattctgccgtgcgcgtaacttccgaaacagaacgcgatatcgcaggatatttctggggcaataataaccgattgcttttccttaaagacagcggaggcgacgaaaactactcactctatggtgtcgacaaggatggggccaacatgaaggaccttactgaatttcctgatgtcagaaccctcattattgatgacttgcgggatattgatgacgaagttatcgtgggccttaataagagagacccgcgtgtttttgacccataccggcttaacattgaaaccggtgaattgaccatgcttgcacaaaatccgggaaacatacaatactggcttaccgaccatgaaggaaaactgagagtcgctgtcgccattgatggcggagtaaatactactctgttataccggaagaccgaagatgaggagtttaaacccattcttcagaccaactttaaagatgagcttaatccctatttctttaccttcgataatgaaaaattatatgccgtatcgaatcttggaagggataaaaaagcaccggtcattttcaaccccgaaaccgccgaggtggaagacgtgttgtacgaaaatgaccaatttgatgtggagggtctgagctattccagaaaaagaaacgtcttgactacagcttcttatgtttcctggaagcgggaacggcacttctttgatgaagaggcacgaatgcttttcgaacgcctggaacgtgacctgggagattatgaagtggcaattaccgatatgaataaagaggagacccgattcatagtacgtacctatagcgaccgttcgcgcggttcttattatttctatgataaggaatcggacgaattaaagaaaattgctgatgtgagtccctggattgatgaagacaatatggccaaaatgttacccattcaatatcaatcgcgagatagtttaaccattcatgggtatcttaccttacctaaaggatatgatttagagacagcccaaaatctgccggtcgtggttaatccgcacggaggaccatgggcccgcgactcatgggggtttaaccccgaagttcagttccttgctaaccgcggatacgccgtccttcaaatgaatttccggggttctacgggatatggcaaaaagttttgggaaatgtccttcggacaatgggggctctctatgcaagacgatattacggatggtgtgaaatggcttattaataaaggtattgccgaccccgaccgggttgccatttatggtggtagttacggtggttatgccaccctggccggtatgacctttacgcccgatttgtatgccgcaggtgttgactacgtcggagtctccaatctctttacatttatgaataccataccgccttactggaaacccatgctcgatatgttttacgaaatggtggggaatccccaaaccgacagccttaggttaagacaaacctcaccggtatttcatgccgataaaattaaagcacctctgtttattgctcagggtgcaaatgacccacgggtgaataaagatgaatccgaccaaatggtggaagccctcagaaacagaggtgtcgaagttcaatacatggtgaaggataacgaaggccacggcttcagaaacgaagaaaaccgtttcgatttttatggagcaatggaacaattcctcgccgagcatattggcgataaggaggaataattgtgctaaggttctctttgtccacgggttaccctttataattccgaaataggatggaatattctgtccgttatcaggtctgtctctgaagttttgttgttgaatcctttttcggggatgtttccgttaacatggaagctcagcagaaagctttggaggcagatttttttaatacaggattttgtgttgatgccagggattttagatactttgaaaagaaagaagcaaaaggattaaaaaaaaaccgcatttacggtaatgcggccaaccaggtcctttactcatctgagtaatgacaattacaaaaatattcccttttgtgcaatttgtaaattatttgtagttaaataatgttaataagattggtggggttaatatggtttatttcacaagcattggcagtaaaatgaagacctacaaaaaatagcacatcaatcccttcaatctcatcaatcccctcaatctcttcaatcccctcaatctcttcaatcccctcaacctcacacctgacagcctgccggcctaatacccatcctgctaaaattcctgctaatcctaaaaaaaatagtattttagcactgtcataaacttaaaagtcttcagtaagcatgaccttacctgcaatagaaacagaatcttctcttcttcagcaattaccggaattaaagttaggagttctcacttctgatgtggaagttgctgaagccgatgaaaccttaaggcaggagatggataaacttttgaatgagttgtcgcctcgcctcgacgccgggattatccgtaacatgccggcggtgaaagccgctaaagatgcctaccgacggttagggaaagaccccaaccggtaccgcccttcggccgaggctttgttacgccgggttagtaaagggaaggggttgtattatgtcaacaatgtggtagactgcctgaatatggtctcggtcaaaaccggttattccatttgcggatacgatgtcgataaaattgttggcaccataaaactcggaattggaaaacccggcgaaccctatcagggaattggacgaggagaacttaacattgaaaatctgcccgtttttcgtgacgacacaggtccttttggtacccccaccagcgattcggtgcgtacctcgatagatgagaatacctcttcagtactaatgattataccggccttcgacggtaaccaaacggaattgaataatgccctggagacgctggctgagctgcttaacaaatttgtgaataaatcttcttctcaattcaagatattataaataaagatgatagaaatatgtgccctggcatcagggagtaacggaaattgttattatgttggtaatcaaaatgacgccattctggtggatgcaggaatcagccggcgtcagataatgaaaagaattaaagagcggcagttggatgcctcaaaaatcagggccgtttttatttctcatgagcatgccgaccattttcgcggtgttagggttttaagcaaatgcctcaatattccggtatatatcaccgagtctacatataaaaaaagttggccgcagcatcgacccgaaaaaatcagaaatttttcacccggcgatgtggtacggataggggagatgtgcgttcatacctttcttaagaatcacgatgcagcgcaaccctgcagttttcgtatcgaacataacggtattagcgtgggggttatgaccgatattggtgagccttgccaaaatgtgattcgtcatttttcgctttgcaatgccgtattcctcgaatccaattacgatgaggatatgctctggagtggtccttatccctattatttgaaaaaaagggtggcctcggcttatggccatttgtccaatcgtcaggcttttgagttgttaaagcagtatggttccgatgaactggaggttgtatttctttcgcatttgtcggccgaaaataaccgccccgatatcgccatggaggcttttaaagaattagcggataaatattcggtgcgactcaccaaccgttatgctccggccgaaatttacagaattaaggagaaaaagcttgtttcctgaggattttgctactgcagcctttcatcgcccggaaatgttttccaaccggcagcatggcatctgcaggcttattgggatttttaagccatgcctgaaatattcttataaatgatgcagaaaaaatagttgaggatgcctgattttaaaccactttaccctgtgcctgcgaaatgttgcaagagcgttggcacttattcagggtatcataatttgtcaggcatcctcaacctttttgccgaactgttaccaccgctttaattcaccttattgctgacatcctctttcccaaggttattcactgcgcaccagcaatcctaatttttcgagcaattggggtttatccattaaggccagtttggccacgttcttgtaaatgttgacccagtcctgcaactcatcaatctttttgtctcggtcaaccgtggcctgttgcgcttcgccggcttccctcacctgttcacgcatcgcctcttctattgcatccaattcggccagtcgcgaatccagatattcggtcgtaaagcccaatggcgacatccggttgagcaattcctcatgctcttttatgttgctgtaaaagtcgcgggctttcctcaaccattcgctttttctggttttacgacggccggccaaatgcaacatttcccaataacctgcttcatcctgaaacatggcacgtgccaaatcccggtgcaaggcataggtctcgtcaaaattttctatcatttcgttagctttctgggtggcttcatattgttcggcatactgtacgttctggtccttattcaaggtttcggcttcttccaataacgtcaggccttcattaagcttttccgcatcataaccataagccgaaacccgtcccgaaatttccccatcgctgatgctgttgcgaatgaggatatcgctgttatgcaagaggtctgttatttgtttgttgttcatagttattcgggtttacggtttcagcatttgttttatttagcaacatcaagtatcattttttcagcctacagttctttgcggataaccttcatggcgaataaacaattcgtttgccgtttaatgggctcattatcaatgctgataatcgccccccggagcatcacctacggaaacgggccggaaagtaatgggtacgggaaattgcagccacttattgacctttccggcccgtaactattgtttttttgcgaataacatcttgatatttccggtgaaaacgaaaattttccggtgaaagtcaaaatttgccggtgaaaatgaaaatttcgcggtgaacatgaaaatttgaaggggaatgtcaaaaattcgtggtgaaaatgaaaattttgcggtgaaaacgaaaattttccggtgaaagtcaaaatttgccggtgaaaatgaaaatttcgcggtgaacatgaaaatttgaaggggaatgtcaaaaattcgtggtgaaattgaaaattttccggtgaaaacgaaaatttctcggtgaaagtcaaaatttgacggtgaaaatgaaaatttcgtggtgaatatgaaaatttgaaggggaatgtcaaaaattcacggtgaaaatgaaaattcttaggtgaattcaatatattaaagagaaattcaaattttttccggtaatcgcgaaaatattgcggtaatgacaataaaaacctcaccgcccgtttgagggcctgctttattcgtcgtttcacctgattatggataagatagctcttcatggtttggtttataactatgattcagttttacattgtttataaaccacagaacattcgcaactcatccaaccggttatctaatctgatttttcccggatgaaacgagcatgacaatgagagattttcacaaaagagaatgtataaaactctttgtcatgcgagttccatcaggccaatgaattagataaattttatactgatgaacatacccttcttctcacacataaacagatgaacgttttcgggacttgctttaatcaaataatggatgtgctctttggctcatccccttcggcgcccctgaccgtaagaaaatgttattggtgttttattatgaaaagtttaatatgaccttaatctttatcaaccattcgatagaatgtataatccaaataattttttttaaacctcatttatttgaatatcagcatttgcagtcgtgaaattaataatgattttaaaatttgtcaagagtcaatattatattttttttggccttatttcaacttttgggtttggttgcattatttgatgatatttttggccggaagtcagaagccagaggtcagaagccagaagccagaggccagaagccagaaatataaaaaggatataatttgaaataaatagaaataaagtagatataaatagattggtttttaattagttagagatgtgttaattctagcaacctattggcctatcggcctaatgacctagtggcctaaaagtgttagccgcggagcggcgacagaccggtaacaaggatgtaactactatccatcagagccccggaggggcggcagaatgctcaccggagttaattaccacgaacaactctagtcttatatctaataatcttacatctaacaatctaacatattacactgtgaaactctgtgtatccactgtgtaacactgtgaaaaaaagaacacagagagccacagaggccggaagccggaaatcagaagccagaggccagaagccagacgctagaagctagaaatgattaaaggatataatttgaaataaatagaaataaagtagatataaatagtcacgcctctaattgttaaatgctttaaaattgtggtcgccggagcgttaggcattgatactctgtgatacactgtgcatccactgtgaaacactgtgtaaaaaatgaacacagaggccggatgtcagaagctagaagctggaagctagaagccggaagccagaagccagaggtcagaagcttgaaatataaaaagatataatttgaaataaatagaaataaagtagatataaatagataccggtagccataagatggatataaattgcgtgcaaaaaaattagcctaacattctattgcctaatagcctaacagcctaaccccctattggcctaatggcccaatgacctaatagcctaaccgcctaatagcctaataacctaaccgcctagcggcctattggcctatccgcctaatagcctattagcctgacaaccaccaacaacttttgacttatatctaataatcttatatctaaccatcctacatcttcacatttatcttgctctgtgcctaaaatgggaataaggaaacccacaacgacggggttactgagaactaagcagaaaatctattgaggatgctagtggggtaacccttttatttacattgcattaggatgttttgtctttttttgtaaatttatgtgtctttttggtctgtttttgaacaaacaaggcttgtattagtaaaaaaaagcgaggccatgtagaccccgctttaaatgttttcacaacggaataatccttattgtgaattgcttcaaaatgtaaagcaattatataaagaaaaattcggaaaaacaaatcaagttgataactctataatatatggatttatgaaacgaattttaggacttgacctgggaactaactcaattgggtgggctctggttgaaaacgatgaaaatgatagaaaaggaaagataataggaatggggagtagaataattcccatggatatgagtgaattagataactttaataagggagccagcatttccaaaacagcagagcgaacacgattacggatgacacgcagactaagggagcggcatcttttaaggcgtgcccgattgcatcgaatactaaacattatgggttttctgcccgagcattatagaaattcgattgattttattgataaaaaaggttgcttttttgagggacaagaacccaagattgcctataaaccggataaaaatagtgagcaattttgctttttatttactagttcctttcatgaaatgctagaagattttcggaagtttcaacctgaattgatacaaaaccgaaaaaaagttccctatgactggactatttactatttgcggaaaaaagctcttactcaaaagatatctaaagaagaactggcttggataattttaaactttaataccaaaagaggttattatcacctgaggggagaggatgaggacaatcaagacaataagaagattaaggaattccgagctttgaaggttgttaatgttacagagcgtgaaggtgccaattcttcagggaaaaaatggtatgatatggagttggaaaatggatgggtgtattccagacaaagcaatttaccgcctaaccttgaaggaaagaccattgagttaattgtttcttatactctggacaataatgggaatattaaaaaagacaagaatggtaaagaaaagtattctttaagtatgccgggggaagaggactggaatcttgtgaaaataaaaactgaaaatgatttaaaaactagcaaaaagagcgtgggagaatatatttatgaccatttattaaagaatcccgatcagaagattcgtggaaaacttattagtaccatcgagcgtaaattttacaaagaggagcttagccggattttaaaaacacaaatgaatttttatgaagaattgaaaaacagggagctttaccaaaaatgtgtggaggaactctatcctaataataaatctcatcaacaaacccttttacaaaaagattttatccatctcattgttgaggatatcattttttatcagcggccattgaaaagtaaacgtgcttttgttaacaattgtcctctggaatatagggtatatgtggataaaaaaagtggtgagctgataaaatcgggtgtaaaatgtattcctaaatcgcatcctctttttcaggaatttcgtttgtggcaatatgtccggaatttaagaatatacgagagagagcggatggttaatggacgattaatggtgaatgttgatgtcaccaatgagttactccctgatgaagagcatattgttagattgtttgatttattaaatgatcgcaagagctttaaacaagatgatgttttaagatttgttggaattaagtcacctaaggaccgaaaaagatatagctggaattatcctgaagataaagaacttcctggcaatgagactcgtcacttgattcttgcttggttgaaaaaagtggatggagtccctgaagactggttagaccccgaaaaattgaaagcattgtggcatttgctatattcggttactgacagggaagagataataaaaggacttcattcttttgcaaaaaaatatgaacttccggacacctttgtcgagcattttaaaaaaattccccgactggaacgcgaatatggttccttttcggagaaagccataaaaaaattattacccttgatgagaatgggtaagtattggaaagctgaagaaattccggccgacctgttggaaaaagctcaaaaaattatagatgcagaagctgatgatcggattagtgacgaggttagagaaaaactactgcatttaaaggatatttctcagctgaaaggacttcccttgtggcaagcatcctatttggtttatggacgacattctgagacaggagaagtggtgaaatggagaacttctgaagaccttgaaaaatatattttacaatttaagcaacactctttgcgaaaccccgttgttgaacaggtcattttagaggccttacgggttgttaaggatatttgggagcattacggggaaggaaaggaaggattctttaatgaaattcatgtggaaataggccgggaattaaaaaatccggctgataagagaaagaaaataaccagtcaaattcaggagaatgaaaataccaatttaagaataaaggctctgttggaggaattgtttaatgatccttccgttaaaaatgtcaggccatattctcctgcccaacaagaaattttaagaatatacgaagatggagtccttaatgggcaaaaggagatcccagatgatattcttaaaatttcaaaaatggccaggccaagtaaaagtcagctggttaaatataagttatggcttgaacaaaaataccgttcgccatataccggcgaaataattcctctaagccaattatttacttctgcatatgaaattgagcatattattccacaggctagatattttgatgattcttttagtaataaagtgatttgtgaggctgaggttaatcgtgaaaaaggacatcagctcgcttttgaatttatcactaaaaggggaggtgatgaaatagaacttaatttcgggaaaaaggtcacaatactcaatgttgaagagtatcagaaattcgtgaaagatcattatggacgtagtcttcgatctctttcaaaaatgagaaaattgttgatggaggatattcccgatgattttattgaccgacagctaaatgatagccggtatattagcaaggtggtacgtaatcttctttcaaatatagtaagagcggaagatgaaaatagtcttgtttctaaacatttaattacctgtacggggggagtaacaaccagacttaagcatgaatggggcctaaatgatgtgtggaatgagttaattacacctcgttttgtaagattaaataagatgggcaaggaaaaatttggagagtggattaataaaaagggtaagcaggtctttcaaattcaaatgccgcttgagcttcagaaaggttttaacaaaaagcgaattgaccatcgacatcatgccctggatgctttagtggttgcttgtgcttcccgaagccatgttaattatttgaataatgattcggccagggcaaatgcttcagaaacacgctatgatttgaggaataaattgtgctataaagacaaaacagattcgaacggaaattataggtggaagttttataaaccctgggaatcttttactgaagaggctaaaaataggctggccggtacagtggttagctttaaatccaatcgccgaataatgaccaggtcatcaaacagatattttaaatgggtagatacctctgaaggtaagaaaaagaaattggttcgccagattaaaggagacaatcaggctataaggaaacctttgcataaggatacggtgcttggaaaagtttctttgagaaaagaaaaaaaagtatcgctttccaaggccattgatttatgggaaagcatcgttgacaaacctttaaagaaacggattcaatcgttaagagagcagggctatgataaaaagctattgttaaagtatttcaaagaccgtaataatcaatttaacggtcaggatatttccagggttaatatctatttttttgataataatctggctgcgcgccgcgtcaccctggatgcttcttttaatagcgaaaaacgaattgatggaattactgattcgggtatcaaaaaaattctttatgctcatcttcaaaatgaaaagtatcacggcaaaaaggatgaaaaggggaatgaaatatccccctatgagttggctttttcgcccgagggactggaagagatgaatgcaaatattaagaaactaaatggaggtaaaccgcattgtccgatttataaagtaaggttggcggagacaattggcgaaaaatttaagttgggtgaaaaaggtaataagaataaaaaatatgtggaagcggccaaaggaactaatttattttttgccgtttacgtcgatgaaaagggagtaaggagctttgaaaccattcctttttcagtggcattggaacgcaggaaacaaaaattggcagtagtccctgaagaaaatgaaaataaggaaaaattgttgttttatctttcgcccaatgatttggtttatgtccccgacgaagatgaaaaactgatagattatcgtcaattatcgattaatccgactagaatttataaaatggtatcttcttctggaacacaatgcttttttattcctcattttgtggcaagtcccattgttcaaactatggagcttgggcccaacaacaagtccgaacgtgcctgggatgggcaaatgataaaaaatgtttgttataaactctctgtggatcgattaggtaatgtcaaaatagaaaagtaataattataaaaagagtgggtttaaagtgaaaaggcttggatgggtctggggttttaattcagaatcattatgattaaaaaaacactatactttggcaatcctgcctatttgagtatgcggaacagtcagttggttttaaattttccggatgcgaaaggccttgacgaccagtcaggccgcaacaccatccccatagaagatattggggtggtgattcttgaccataaacagataaccataactcatgctttggttgaaaaattgttggcaaataattgcgccatagtgacgtgtgatgagtcacacatgccgcagggacttatgatgccattgtccggcaactcggtacaaaaggaacggtttacgaaccaaatatcggcatcggtgcctttgcgcaaacagctctggcaacaaaccattcgggctaaaataaaaaatcaggctgcgttattggaaatgatacccagagatatcaacactgaaaatatgcacttctgggcgtctaaagtaacgtcgggtgatagcgagaaccatgaggcccgagcagcggcttattactgggccaatatatttgatatccctggatttaaacggggcagggaagaggcaccgcccaacaatctgctgaattacggatatgccatactgcgtgctgttgtggcccgttcgctggtatcttcgggtttgttgccgacattgggcatacatcatcacaaccggtacaatgcctactgtttggccgacgatattatggaaccataccgtccctttgtggataaggtggtgttggatataatgaatgccggaatagactacactcgccttggaaaagaggccaagtggcatttgttgagtattccccaggtggacgtgttgataaacggaaaacgaagtccgttgatggtggctgtttcgcagacaacggcttcattgtatagttgttttgaaggaaccagacgtaaaatttcatatccccaattaattggcgcttatggagcgactaaatgaatacaggattatgtgggtcatggtattttttgatttgccaacggaaactaaaaaagatcgcaaaatctacagcacttttcgaaagaagatgctgaatgatggttttgtgatgtttcagttttccatttatatacgccattgtcccagtcgcgaaaatgcagatgtgcatatcaaaagagttaagagctttttgccacccaaaggtcatgtgggtatcatgcgagtaaccgataaacagttcggggatatggaacttttctacggtaaagaaaccgaaaagaaagaaaccccatacatgcaattggagttattctgaaaaaaaagcccgggaaaccgggctttttaatgtttttaatagccattttttaattctaaatttcaagataaataattgaaattcaagttttaatggcgtggtatgctgtcagcaatactacaaaaatacattttgaaagcaattcacaacacaagtattatgattctaattataaagcatgctgtcagcaatactacaaaaatacattttgaaagcaattcacaacacaaacaataacattaggtttatatctttggctgtcagcaatactacaaaaatacattttgaaagcaattcacaacttcttttgcggcgggcatatggtccaaaacgctgtcagcaatactacaaaaatacattttgaaagcaattcacaaccctttttagtactgtgagacgctaaaatccgctgtcagcaatactacaaaaatacattttgaaagcaattcacaactatgcaatgtctaaattttaataccatgaagctgtcagcaatactacaaaaatacattttgaaagcaattcacaactaaacacaggtaaaataaaatattatgaatgctgtcagcaatactacaaaaatacattttgaaagcaattcacaacctaaaaaaactgatgattatgtgtggaaaggctgtcagcaatactacaaaaatacattttgaaagcaattcacaacagtggcactcattgttccaatacctacattgctgtcagcaatactacaaaaatacattttgaaagcaattcacaactacctaaaacctttttcctaattttttctgctgtcagcaatactacaaaaatacattttgaaagcaattcacaacacctcctttgctactactgatttctttgttgctgtcagcaatactacaaaaatacattttgaaagcaattcacaacccaactcgaaccaccatttgtagtcttttggctgtcagcaatactacaaaaatacattttgaaagcaattcacaacattatggaaaataaaagaaaatgcgtttagctgtcagcaatactacaaaaatacattttgaaagcaattcacaaccttcagctgttacatcctcatacaaaaggccgctgtcagcaatactacaaaaatacattttgaaagcaattcacaactcagttcccaaccaagtgccttcgtaatatgctgtcagcaatactacaaaaatacattttgaaagcaattcacaacggtggaatgaagttgagcgtgtaaaaatagctgtcagcaatactacaaaaatacattttgaaagcaattcacaacatttctgggtcttttaaatctggtggctctgctgtcagcaatactacaaaaatacattttgaaagcaattcacaactataattaaatcagttaatctttttgagtagctgtcagcaatactacaaaaatacattttgaaagcaattcacaactattggtaatgccataatcaattgccctccgctgtcagcaatactacaaaaatacattttgaaagcaattcacaacctgccttatgcgctgattgcggttggtggggctgtcagcaatactacaaaaatacattttgaaagcaattcacaacaggttctccggatagtcacctgtatattcagctgtcagcaatactacaaaaatacattttgaaagcaattcacaactagtagccgtaactccgctttcagttattagctgtcagcaatactacaaaaatacattttgaaagcaattcacaaccaagtctcgccagctctgtttgaagttctagctgtcagcaatactacaaaaatacattttgaaagcaattcacaacttatttcttgcacatctccatgaactacctgctgtcagcaatactacaaaaatacattttgaaagcaattcacaacttttaacccgcagcgtatgctcccaactttgctgtcagcaatactacaaaaatacattttgaaagcaattcacaacttttaacccgcagcgtatgctcccaactttgctgtcagcaatactacaaaaatacattttgaaagcaattcacaacacgagcagataaacggaaatataaggacaggctgtcagcaatactacaaaaatacattttgaaagcaattatctaaaaatcttacatctaaaaatctaaaatctatatctctaacatttctctgtgaaactctgtgtgcccactgtgtaacactgtgaaaaaatgaacacagagagccacagagataaaaatcataattttcgaaatgagataaaatgtgtcacacctacggcgtttcgattccatctgcaatcaaagtctaccataatcaggcacctaatggcgccaaataaggatataggttgaaataaattgaaataatgtagatacaggtagccataagatggatgttaatttcgtgcaaaaaaattagcctaacattttattgcctaatagcctaactgcccaatggcctaatagtctattggcctgtcatcaggcacctgacggcgccaaatattgggcataaagtaagcttgattgtgaattttttttaatgccgttaggcatgaaattttggtagaaagcggttaacaatattcaggaaatgccgtaggcatgacatttagggtaggatggtgagatggttgaatggtcggaaggtagccgcagagcggcggaagaatttaggccattaggtcattaggaaaataggccaataggagattgattagaagggtgagggcagttgtaagtcccttacgctcaccccccaaccccctgaagggggtgcgccggcgcgcggaagccggaagccagaggtcagaggccagaggctggaaatcagaagtcagaagccagaggctagacgccagaagctggaaatgattaaaggatataagttgaaataaatagaaataaagtagatataaatagatataggtagatatatgatggatataagattgtgttgccaaattagcctaacattctactgcctaatggcctaatggtcttattgcctagcagcctaatagcctaaccgcctaatggcctattggccttgaattttagccccggaggggcggcagagtggtcacccggaacaaattgccacgaacaactctagtcttatatctaataatcttacatctagctttctctatgaagcaatttatcaaaaatattctgccggttattatttgtctgtcatttatgattttttatgtatcttcgttatgttaaaatatttacaatattgtttttattgacttgtaaaggaattaaacgttaaaaggaagtatataccttagcaagcaataagaataaacatagtaagtaaaataatggaaacaaagattaaagaaagtattgataatccggagcaacttgaaaaattgtatcgagctgacaagaagaatttcgaaaaatcattcttttgcatttatccggaaattgcagattctaaaatagctgatttttggaaagtaagattagaatttgatgctcggagtgaagccaaatcgggaaccagaaagacggatgtttattttctgataattacttgtttcgtcaccggttttttaatcaaaatacctcaaatatttaatgtagaactgaacgactatttcttctatgaaaaaaatgccgggttaatattgtttttgggattgtcggcgtatacatttcttacaaaaatgcagattaattataagcaccaaataacatcaattatagtctttggtttatctgctatatacatcaatttattgccctccaatcgagacagtgattcaataaatttagcctatttacatttacctttgtttttatggtgtttttatggtttgatttttattgactttgatataaaggacaaaacaaaaaggattgattacattaagtacaatggcgatatagctattctgacagccataatcttggtggccggcggcatattaaccgtcataactattggcttattttcggccatcgatttaaatattgaggaattttatttcgagaatatcgtgattattggggctgtttcatctcctattgttgcaacgtatatcgttaaaaatttcccttcagtaaccaataagcttgctccaataattgcgactatttttagtcctttggttcttattactctaattatctacctgattactgtcgtcaatacagggaaagacccctataatgacagagactttcttgttgttttcaatataatgcttttaggtgttatgggaatcattgtattctcggtatctgaggcatcggaaaataggagacggagttttaatgagttgacactatttatcttgtcaatagtcacgctgataatagatttaatagcgctgtcagccatactttacagattgggagaatttggttttacgccaaatagaactgcggttttaggttccaatctattgatatttggacatctggttttaataatgcttgatttgtataaggttggatttaaggagaatgacattaaaacagtagaattgacaatttccaaatatttacctgtatatgccgtttggaccatctttgtgacttttgttttgccgtttatatttgaattaaaatagtaattacgcgtactaaccgtatgcgagagcgataggtagataggctatttgtatattagaagccggaagtcagaagccagaggccagaggccggaaattagaagccagatgccagaagccagaagctagaaatataagttgaaataaatagaaataaagtagatataaatagatatatgatagatgtaaattaagtgttaccaaattagcctaacattctattgcctagcggcctaatggcccaatggcctattggcctattatctggcacctgacggtgccgaacattgttctatgaaaatgctttcacaggaattttaaatgccgttaggcatgatacttttgtagaaaaaaattgtgagtagcatttcaacagtttattcttaaattaaaggtttaaaattccactaaggtcgttgttaaggattcggaaattcctaacacgggggttggttatgtattttacaacgtaaaaggggtaaaacaatgattaatttaaatttgtatggttggaatgaaaagttaaagcaacttaaaaaagaatccatgcaccgtgagcttcctcatggtcgaatatccattgtgcaccggacctgctacgatgttgtttccgaaaacggtcttttccagtgcgaactgacgggaaatatgatgtatgggaaatcggattttgaattaccctgtacaggtgattgggttatttttcaaccatttgatgaaaataaagggattatagttgatatactaccacgtgaacgaactttgtatcgtaagaaaagtgggagcgtttccggaaaacaagccattgcttcatatgttgataaggcatttattgtacaaagccttgataataatttcaatgttcggagagctgagcgcttcatggttcaaatactggaagccaacatcaatcccattttggtactcaataaagtcgatttgggggctgatagagaaaaaataaatgaatccataaaaaatttagctcgtcaaatgcctgtgatttacacgagtattcatcaaccccaaaccattttgcaactgcgggaatatataacaatgggtgaaacggttgtttttgttggttcttcaggggtcgggaaaagttcattgataaatgcactttgcgaaaaatcgttattggtcacatccgccatcagccaatcaacgggaaaagggaggcacacctcgacgcgtagggaaatgattttgatggacggttcaggcgttttaatcgacacaccgggtgttcgtgaatttggtttggctgtagacaatcctgattcggttggagaggctctggaaatatccttctatgctaaagggtgtcgtttcaatgattgtgaacatatcaatgaacccggatgtgcagtattagaagcagtaaacaagggcaagttagacaagaaagtttatgacagctatctaaagcttcgccgtgaagcatggcatttttctacatcggaacatgaaaaacgtaaaaaagggaaatcgctggcaaaaatggttaaagaagtaaagaaacgtaaaacgaatttctaattttaatcgtatagcctgtcccggcaaccctaacacctaaaaaacagataaattataatggcccaccgcaaaaacgccttccgatttcggccaaaacaaaaaatagaaaaacccaaattaactttttttgtgcgtcccctttcgggggttcatgatggaacaaacttttttctaaagatatttgaccttttcgaggtcagcgtgttatggttgcagtttaaaggctttacggattaaagtccatgggtgcaaccggtattgataagaatttctgcaaagtaatccaatccaaaaataacactgtgaaactctgtgtacccactgtgtaacactgtgaaataatgaacagagagagacaaagagataaaaatcataattttcgaaatgagataaaatgtgtcacacctacggcgtttcgataccatctgcaatcaaaatctaccataatctggcacctgacggagccaaataaagatataggttgaaataaatagaaataatgtagatataggtagccataagatggatgttaattgcgtgcaaaaaaaattagcctaacagcctaaccccctattggcctaatggcccaatggcccaatggcctagcagcctaatagcctaaccgcccaatggcctaatagtctattggcctatcatcaggcacctgacggcgccaaatattgggcataaagtaagcttgattgtgaattttttttaatgccgttaggcatgatattttggtagaaaggggttaacaatattcaggaaatgccgtaggcatgacatttagagtaggatggtgagatggttggatggtcggaaggtagccgcagagcggcggaagaatataggtcattaggccaataggcgattgattagaagtgtgagggcagttgtaagtctcttacgctcaccccccaaccccctgaagggagagcgccggcgcgcggaagccggaagacagaagccagaggctagatgccagaagctggaaatgattaaaggatataatttgaaataaatagaaataaagtagatataaatagccacggctctaattgtctaatgctttaaaaatgtggtcgcgaagcgataggcatttatacactgtgaaacactgtgtatccactgtgtaacactgtgaaataatgaacagagagtggcacagaagccagaaatcagaagccggaaattagaagccagatgccagaagctagaattataaaaaagatataagttgaaatatatagatatatgatggatataaattgcgtgcaaaaaaattagcctaacattctactgcctaatggcctaatggcccaatggcctaacagcctaaccgccttatttggtttttataccaaacattcatgctttcaatttgtcctgcaatttgtgtgttgttgaccagagttccggcataggaataatttaggttcatgaaggttttgttcatggatggtgaatttagtcgggcgatggtatagaaagtcagatatcccttttcaatcaggaattgttccattgcgcgcagcaggtgtgatgcaatttttttccctcgttgtgatgtgaggacggcgaaatcggtcatttcggcatttttatatttggggttgcattcagccgagctgatggccaccaactcagaattatgaaagacaccaaaataaacggtgtttgcagtcatttcatgtcttaaaaaggatgggtcaaaaacagggaaggggtaactctcaaagacttgagaaaagagttcggccatttggtgtgcatcatcctttgtcagaagttttagttgatacgaagcatctaaaggatgaatatccgtgtttccctttgataacagcagcttttgaaagcgtttcagctcgtttgaggttagcctgcggcgtaacgggtcaaaatatttggccataaaaagtgcgtcctcttgtccgctgtaaaatttgggtaccaccgcttcggtttcataacctgcctgcagaaaaaggggcgaataatgggccggtatcttaacaaaagatttgccgtagccgttatcttctgctaaaacatccatttcatgaatgatatcgggaaaatcggcgggcgagaaatccatcagatagatacggttactaccctttccgtgttgaatgattgactgcccgattttttcacttttgtccatgctcatctcttcgttgaatgcgttcattatctgacgggatgagagatatggcatcgtcataatcggaaaggagcttttcaatgccaatggcattgtcttcgcatccctcatccaggtcgaggtccagattacattggctgcaattgagatgacaggttgcggtatggtaatgttccggctcttgataggatgttatcaccccttcgtaatttcgaagaatcactttgttggttgaccatgaaataatataattgggcatgacgggaattttaccgccgccacccggagcatcgatgacgtaggtagggatggcaaagccgctggtgtgaccaattaaactttcaataatttcaataccttttcctaccgg

SEQ ID NO: 1110 - DNA, 24542 bp, synthetic construct
  misc_feature 1..24542: note = Synthetic
  source 1..24542: mol_type = other DNA
tcccaatgaacgggtagagatctggaacaaagtaaagtcgggcgatatcaaagtagtattgggcgctcgctcggctctttttcttcctttcagggaactgggtatgatcattgccgatgaagagcacgatgcttcctataaacaacaggaacctgcgccccgctatcatgcaagagacgccgctatttattacgcctctttgtttggcgccagggtgttgctggggagtgctacgccttcggtggaaagttatttcaattgcatgcaggataaatacggactggtaacccttgctgaaagatttggcgatgcaggtctgcccgctatcgaactcatcgacataaaaaaataccctgctaaaccaaaacctgtatttacaccgccgctcatcgatgccatccaggcatcattagacgcaaagaaacaggtcattatttttcagaacagacggggctatgctccgtaccaggtatgcgatacctgcggatggataccgcaatgccgcgattgcgatgtaacgcttacctatcacaaaacaagaaatcaactggtttgtcattattgcggcaccatttacccggtgatacagacctgcctggcctgcggcaaccatcatttcacacagaaaaattttggtacggaacaggtagaagaattgctgggcgaaacatttcccgaagccaggaccgcccggatggattacgacagcgtcaaaggcaaacacgatcacgatgcgctgatcaaattatttgaacagcagcgtattgatctgctggtgggtacacagatggtggtaaagggactggattttgaacacgtgaacctggtgtgcattgttgatgccgatggcattctcaacttcaccgatttcagggtcaatgaaagggcatttcagttgatggaacaggtgagcggaagagccggccgtaaagacgatgaagggaaagtgctgatacaggtaagcaatctgcagcacccggttttgcaattcgtgaaagaccatcgttataccgggttgtttgaatttgaattgcataacaggaaagcattcgactatccaccctttaccaggctgatccgcctggttttcaaacacagggaaaaacatattgccgaagaagccgcccatatcatggcgcagggattgaaaacccattttggcaaatatctttccggtcctgcacaacccgtggtagatcgtatacgcaatcaatacctttgggaaatactgctcaagctgccgaaagacagtcgcttcatccatcagtgcaaaaaagaaattcaccagcaaacagtcatcatacaatccaataaaagatacagggcggttgtgatacagcccgatgcagaccctgtttaatcattatactaacttcatctcatgcaaatcagccagcacttatcactcaaaccatacaatagttttgccatcgatgtgaaagcaaaatattttgctgcttttgaatcggtgatggtgttggaggaactgcttggtgttgccggtcatgaacaaatgctggtgctcggcggcggaagtaatattcttttcaccggcgactttaatggatgggtattgaaaaacgaatgcaaaggcatccgtctcatagatgaagatgacaattatttttacgtgaaagccgctgccggtgagaactggcaccagtttgtgatgcattgcatagcgcaaggttatgccggcgttgaaaacctcagtttgattcccggtaatgtgggtgcctctccgatgcagaacatcggcgcctatggtgtggagatcaaagacgtatttcatgagctggaagcttttcatcgcgaagagcgaaagctggtaacctttacgcttgccgactgctcattcgcctatcgcgaaagtgttttcaaaaacaaattcaaagaccagttcatcattttgaacgtcactttccgcttacgcaaaaagccggtgttcaacacgagctatggggcaatagaacaggaactggaaaaaatgggtgtgcaggaactttccataaaagccatttcagaggcagtgatacgcatcaggcgcagcaagttaccagaccctgccgagatcggtaatgccggcagttttttcaaaaaccccgccatttccaaccttcagtttgaacaattgcaacaatcattccccgcgattgttggctatcctgcaggtacaggccaaacgaaagttgccgccggttggctgatagaacaatgcggctggaaaggttaccggaaaggtgatgccggctgtcacgcacgccaggcgctggtattggtgaattatggcagtgccacaggcgctgaaatagtgcaactctcaaccgatattatcaacagtgtacatgaaaaattcggtattcatcttgaacgggaagtcaacctggcttaatgatttaccggcggctgcgctgctgttgaatcccttacaggcgctatggaactgatgtaaatatccatcacctgcccctgcctgatcttattgggtactttttgtccggttggccccagcacatcagacaaaaccgtgggcgactgcttcactataaaagctgcagctgaatctttgatggcatccgtagcaacaatagaaccaatgttcacattcaccgtagcgaggtaagtgcgcgcttccagcaacgtcatgcctaccaggtcgggcacagggatatcactgccgcctacaccgcttcccagtacaaaactaatggtactacccaacggtatcttggttccggctgttacctgggcgccgttgtaatactgttccaacacagagttacgtgctatatcaggcttgtatgttacttcacccagcttcaatcccaggctgcgcaggtacatttccgcacttctgatggaaaaacctgccatattgggcatttctacctgcgggggaatactgcggttgacggtaagataaatggcgcggccggatttcacagtagcgtctgcctcgggagactggcggatcacggcttgtttgggaatgctgtcgatatacaatgaatcctgtatcaccacatcaaatcctttggcttgcagtatctgttgggcagcaagcacgttttgtcctgttaccgatggcactttctccacttttccgtagcccgtgagccatcccaatgaactgaaaaaaaggatcagtaatacaacgaggataccgatcgctgcgagtatgtttacccaaatggattttccagtaattcttttaaccaggttactcatgcttacttattaattaaggacttcatctatcaatgcagaataaaaatctttcaggttccatcccatggtcttcacttgttgcggaatgatgctggcttcactttgtcccggaaccgtattcacttccagcatataaggttgtccctgtgcttcattgtaaataaaatcgatgcgtaccacaccacggcaattcagcacttcatacacttttttagcggccgcttccagttttattttcatcgcatcatcaatcaacgcgggtgttgtttcaacgcttttgccctggtacttcgcttcgaaatcgaagaactcgttttgcgtgctcacttccgtaatgggcagcaccatgatctttcctttcgacttgaatacgccgatcgtgaattcgcgtccgctgatatattcttctaccagcacctggtcgtcttcccggaaagccttttgcagcgcgccttccagctcagtcgccacattcactttactcatgccgatgctgctgccgccgttattgggtttcacgaacacaggcagtttcaatgcagtcagtatggtttcgggcgataccggtgtatgcctgaaaatatgtttggagtgtgcaacatgtatgccaccgaatgcagcaacagccactgtatatcttttgttgaaagtaagcgctgaagtagccgcatcgcaactggtatagggcaacccaagcatatcgaaatatccctgcaacttgccatcttctcccggcgtaccatgaatacaaagtagtatcgcatcgaagttgatcttgttgccgttatcaatgacagagaaatcgtcgcggttgactttcgatttttctccctgcacaggttcataccaccagccggttgcattgatatcgatccgatacacatcgaaccgctccctgtctacattgttgccaacggtaatagcgcttttataactgatctgtgcttcgttgctcaagcctcctgttaccagggctatcttttttttcatttccttgtttttaacgtcatcccgaatgcaaccgagggatctcactgaagattcggcagatccttcgactcgcttcgcacgctcaggatgacgaacatgtaggcaaatatagggaggaggatgataaaaaaaggtgaagaaactccccgtctcttcacctcacgttggcaggaaatatcacccgccgttacaagttgttgtctctttgaatggcaacaattaattaggactaagctaagcaaatccacgctcttttgcaagtatttccccctcaaagtttagcacaggtgcctgtgcattagatgtgcattttttccttcttggccagcagttcgtctactgtttcgcggtacatctcatcaggtacacagcagtcaaccggacatacggctgcacactggggttcttcatggaaaccctggcattcggtgcatttattgggggttatatagtaagtatctacgctgatgggttcaaaacgcttatcagcttctacaaccgagccgtccatcagggtaaattcgcctttaacagtggttccatcggcaatggcccattccaccccaccctcgtagattgcgttattcggacattcgggctcacaggcgccgcagttgatacattcttctgttattttgattgccatacaaaaaaggagtttgttggattagtgattttacatttgcagttccaaaaatacggttgacaaatgactttacaagaacgaattcagttgatggtccgattaggtgtctacatgcagggaacggatgccggatgggagaacgtcaaagcaagggcttaccgcgaaaatgcctggttcatcccggaattcatcaaccggtcggtcgatagtatctgtacccggttcttacaggcgcccctgctggaggcttgggtgggatcatataacctgccggatacgcctgcaaaagtgcaaacagtaggattggtcatggcaggtaatattcccctggtaggctttcatgattttctctgcgttttcctgagcggccattctgtattgatcaaagcttcttctaaagacgaagtcctgatcaggcacctggtggaacagctcagtcaatgggagccgtctgtagccgaacgggttgcttttgccgggcagttaaagggttgcggcgcttatatcgctaccggcagcaacaattcagggcgttattttgaatattatttcggcaaatacccgcatatcatccgtcgaaaccggacttccgtaggcgtattggacggttctgaaaccaggaccgaactggaagcgctggcagaagatatacagttgtatttcggactcggatgccggaacatcacgcaattgtatgtaccggaaaaatatgattttattcccctgctgaccactttaaaaaaatatgaatatttccttgacttccataagtacaagcacaattacgattaccacctggcgctgctcatcatgggcaataagtactatatgaacaatgattccgtcattttgactgaaaacacctctcctttctcgccggtaagccaggtgcattaccagtattacaaggatacagcagccgtatgggatcggttaaaaaataacaacgatatccaatgtgtggtaggtcatggcgcccttgcttttggtgaagcgcaacgtccttcccttggcgactatgccgatggcgtagataccctccggttcttaacagcactgtaaaatttgctaactttaatccccggatctacgaggatcgccgtaaaacatttgttaaatgcgttgaccggtgtactgacaattaaacagctttgtttatttgctatccaataggcatatcatttgacgtacctgaattaatttaaagaccatgaacatgaattttaaaaacattttagccgttgtagccatcagtgcgggcactgctgttgcgagtgtttggggatatggtaaatacatggaacaccagcatgcaggcgtacaggatgccggcaaattacctgtgaactatgcaggctttttcggaaatggcagtaataacggtgccattgtagactttacgcctgcggctaccacaggcactcccgccgttgtgcatatcaaaacaaaaacaaaggcacgacaggtaaacaataataaccgcaaacagcgtaatcctttctccgatctgtttggtgatgatttgggtgatttctttggaggtcccagggtgatacccgagcagcaggccagcggtagcggtgtgctgatcacggatgatggttatatcgtaaccaacaaccacgtgatcgacggagccgatgagatcaatgtaacccttgccaataaaaaatcttataaagcttcagtgatcggcgccgaccccagcagcgatctggccgttattaaaatcgaaggaaaaggattcccttacctggtatatggtaatagcgacgaattgaaactgggtcagtgggtactggctatcggttatccgcttacactcgatgttacggtaacagccggtatcgtaagtgccaaatcaaggtccatcggcatcaatggccgtcaaagccaaacaccggtagaatcgtttatccagaccgatgcggccgttaatcccggcaacagtggtggcgcactcatcaatacctctggtgaattggtaggcatcaactcggccatcgcttctcctacgggttcttatgcgggatactcttatgccattccggtaaatattgtgaagaaaatcgtgactgatattgtgaagttcggcaccgtacaacgcgcttatattggcatccagtatgcgccgctcgaaaacatgagtgatgatgataagcggcagttggaaaaagagctgggggtttcactgagagaaggtgaaggcgtgtatgctactgcaattccggcaggaggcgcggcagcggcagcgggactgaaaaaaggagatatcgttaccaggatcaatggcgttcctgttaccaatggtccggaactgcaggagcaggtagcgcgttacaaacctggtgacaagatcaacctcacttacaaacgtgccggtaaagaaagcaccgccagtgttgtgctgaaaaacaaagccggtaataccgatatggtgaagaacagcagcctcatagaaaaactgggtggcactttggaaaatctcgacaaaaaagtagcccaggccaatgagattgcaggtggtgtactcgttaaaaaagtaggtgatggtatgctgaaaaaaaccaggatgcaggacggattcgtgatcacaggtgtgaatggaaaagaagtgaagaatatagatgaattgaaagaattgttgtctgtatacaaaggcagcaatatccgtctcgacgggttctatcccggcttcgaaggatcttatacttatcctttgaatctcggcgacgataattaagcagattgcattttcctttcattataaagcggttgttcttcggaatagccgcttttcttttggtgcgaacggcgatatccgttaagtaagcgatagctgcttaccgccaatagtaactgaaaaatagatctctgcctgcagcgccttgaatatcttaaggatggtctctatggaagcgttgttagcattgttttccagcttggatatttgtgctttttgtacgcctaccagttctcccagttgtgcctgggtaaggttgcgttcctgtcttgcttttttgatcatgttgctcaataaggccatgttgagtttgtactcgaaatcttccctggctttggtaccacgtttgcctacatgcttatctatcatttcagatagactataagatttcatttttgttttttccatgctgaataatgtttaggtgttttttttcttcaaaatatttttccctgatacgcagtgccctggcaatctcattggcaggcactttatctactttctttataaaaccatgggtagccaacactaacgtgttattggcatctgttttatcccaaaaagccagcagcctaacttgttgcaatgcatatctcacgcgtatttcccatatatcattgtgaagctttttaaacaaacgtggatcagtggattgctcagctattgcaatattgtacaatagcttgtttacgatcttcggattcaattcattgataaaaatggaagcctcttctaaaaacctcgtttcaaaatacctcacagtttagattttacaaagttaaacaatagtttccaaatatggaaacttatttttgtctcaaccttgtgtttggtatggctgtaaataacagaaaaaattaattgcttacgcagattcctgcaaaaaacaggtataaaccgcaaatctgtatatttagacctcaatcattttttatgcgaacagtgcatcttgttttatttttctttgtatggttgagtacatctttcaatgccggagctgcagttattaagacaggagctgaacaaaccgaaaaatacgttccttacctgaaaggtaagcgagtaggtatattggcgaaccccaccgccgttattggtaaaaagaacgtacatattgtagatagcttattaaagctgggtgttcatattgtaaaagcttttggccccgagcacggctttcgtggcaacgcaagcgcgggcgccaaagtagcagatgaaatagattcggctacaggtatcccgctgatctcattgtatggatcaggaaaaagcaaacccagccaggccgacctagctgatatcgatattctggtatacgacctgcaggatgtaggttgccgtttttataccaacatcaatgcgctggccaggctgatggaagcatgtgcagaaaacaacaaggaattgctcatactcgacaggcccaatcccaatggctacctgatagacggccccatactcgatatgaaactgaaatcgggcatcggcatgtttcccattcccatcgcacacggacttaccattggcgagtttgctcagatggtgaatggcgaaggatggctgcccaatggtctaaagtgcaatatccgcatcatacctgtggccaattataaccacaacatggagtatactttgcctgtaaaaccatctcccaatctcaatacacagcaatcgatactgctctaccctactttgtgcctgtttgaaggaacggtgcttagccagggaagaggtacctattttccatttactgttttgggcaaccctgatctaaaaggttattctttttctttcacacctaccagtatcaagggaatggcagaaacgccgctgcacatgaacaaggcctgttttgggcttgatctgcgcaagtattctgttacgagcctgcgaaagagcaaacaactgcacatagaatggatgatcgaattgtacaaagcatatcctcataaagaaaaattcttcgattacaagcagagtaaagagatgggcaatatcgacaagctcgcaggcaccaccagctttaaagaacagatcgtagcaggtctttcagcaaacgacattcgcaaaagctgggagccaggattaaaggcctataaggaaatgcgaaaaaagtacctattgtacccctaatgccagtttaggaaacaaaagttaaaaaggaatgacacttaacatcgttcctttttttattacgatatttttatttatttgaaaaagatttaaattagctgaccggttacccccctccccctaatgtaaccaaccgtaaaacgacttccagatatcctaaaaaagaaagcgacttgcgccgcttttaatgttttcacaacggaataatccttattgtgatttgcttcaaaatgtaatcgaaaatacaaaccatctgtcatatgaacaaaaaaattttaggccttgacctaggaacaaattctattggatgggcattaattctacaggatttcgagaataaacaaggggagattcttggaataggaagcagaatcattccaatggatcaaggaactttaggaaagtttgccgaaggcagctccatctctcaaaccgcagagcgaacaagttttagaaacgcaagaagattaagagaaaggtatttattgcgtagagaaaggcttcacagagtattaaatatattgaactttttaccagaacattatgtatcacagatagattttgaaaagcatttggggaaattcaaagaagaaacagaactaaaactaacttataaaaacaaagaattcattttcaaaacatcctttgatgaaatgctggctgatttccgtcagcaccagccgcatgtattagtaaatgaaaaaggaaaacccaaactggttccttatgattgggcaatttattacctgcgaaaaaaagccttatcaaaaaaaattgaaaaagaagagctggcttggattttattgaattttaatcaaaagcgtggctactatcaattacgcggcgaagaagaaggagacaatcctaataagaagatcgaatttcattcgctgaaaattattgatgtcattgctgatgaaatccagaaagacaaaacagatatttggtattctttgatacttgaacatggctggatttatcgacgccaaagcaaaacacctttgttcgattggaaagataaaatccgtgattttattgtaactactgacttaaataatgatggttcaataaaaacagataaagaaggaaaagaaaaaagaagttttcgggcacccggagaagatgactggaccttactaaagaaaaaaacagagcaagaaatcgatcaatcgggaaaaaccgttggcgccttcatttatgacacacttcttcaaaatccaaaccaaaaaataaaaggcaagctggttcgtaccattgaacgtaagttctataaagaagaattaagaaggatacttgaaaagcaaatcgaattacagcccgagctttttacttctgatctatatagtgattgcatcagagagctataccgaaataatgaatcccagcaatcatccttaagtaaaagagatttcgtgcatctctttataaacgatatcatcttttaccaacgacctttgcgtagccaaaaatcttcaattagtaattgctcattagaatttagaaattttaaagatgaaaacggtaataaacaaaagcaatacctaaaagctatccctaagtccaatccttattatcaggaattcagaatatggcaatggatgtacaatttatctgtttacaagaaagatgacgacaccaatgttagtaaggaatttctaagcagtatcggggatatggaaaatttgtttgactttctgaacaacagaaaagaaatcgaacaaaagccactaataaaataccttctcgaacaaaaaggattaaaaggcaagctgctaaacgctgaagttgaaaaattccgctggaactatgtagaagacaaacaatatccctgcaacgaaaccgccacactcattcgagaaaagctgacaaaaataaagggtatttccgaaaatttcctgacaaggggaatcgagcaatcattctggcatctagtctattctgtaacagataaacatgattacgaaaaggcattaaagtcttttgcagcaaagcacagtttagatgaagatagttttgtagatatattcagaaaattcccgccttttaaaagcgaatatggctcattttcggaaaaagctatcaaaaaactcctaccactattaagagttggaaaatactggaactgggataccattgacaaagaagttcaaatcaggatagatcatattattgatgctgaagccaatgatgagatcaggcaaatcgtcaaagagaaagcagacaagcaccagcttcgtgcaagaagcgatttccagggattacccttatggctggctcagtatatagtttacaacagacattccgaagctgatatttcggaaaagtggaattctgcgaaggacttagaggactatttaaaatccttcagacagcattcgctccgtaaccccatcgtagaacaggttattacagagaccctgcgggttgtaaaagacatttgggtcaaatatggaaatggaacgaaagacttttttaacgagatacatatcgagctaggacgtgaaatgaaaaacactgcggcagatagaaagggtatcactaatcagattacagaaaatgaaaacaccaaccttcgaattaagtccttattagcagagttaaagaatgatcctcaagtagaaaatgtacgtccatattctccgatgcaacaggaaattctgaaaatctttgaagaaggcgttctcaatgctgacattgaaattgaggaggatattctaaaaataagcaaaacagcccagccatcatcctccgatttgaaacgttataagctttggcttgagcaaaaataccgctcaccctatacaggtgaaatgataccattaaataaactgtttaccccagaatatgaaatagagcatattattccacaaagccggtattttgacgatagttttagcaataaagtgatttgcgaagcggcagtcaacaagttaaaggataaccaaattggtctggagtttatcaagaatcatcacggcgaaaaagtgttaatcggaatggacaaagttgttcaggtgcttgaagtggaagactatgaagactttgtaaaacagcattatgcaaaaaacagaagcaaacgtaataagctcttaatggaagacattcctgaaaagatgatagaacggcaaatgaatgacacacgatatatcagtaaattcatttctaacttgttatccaatattgtgcgatcagaaagcaacgatgatggtgtaaactcaaaaaatatcatccccggtaacgggaaaattaccactgaactgaaacaggactggggtttgaatgatgtatggaatgaattaatcttacctcgatttgaacgaatgaaccaattgatgaacaccacgcattttactacatggaatgaaaatcatcagaaactattaccagctgttccgctagatctgtcaaaaggattttcgaagaaaaggattgaccatcgtcaccatgcaatggatgctctggtcattgcatgcgctacgagagagcacgttaattatatgaataatgaacatgcattacgcaaagggaaaacgaaagaagaaaaacaaacaattcgttatgatttgagaactaagttatgtgacaaaaaacacaataaagattcagatcagaattatgaatggatttttaaaaaaccatgggcaagctttactgcagacgcaaaaagtgcattagaacatattgtcgtaagctttaagcagaatcttcgtgtaatcaataaggccactaattattatgaaaaatgggtagataaaaatggaataaaagtaaaagaattacaggagcaaaagggcacgaactgggcaatacggaagtctatgcataaagatactatttcgggtctagtcaaattaaaaaagaagaaaacagtctcattgaatgtctcgttagatgctattgcagacatcgttgatgagggtcttaaaaaggagatacaaaaactgcagaaagtcggctgggataaaaagaaactaagtaagcactttaaagatttaaattataaatggaacgagaaagatatttcaaaagttgaaatatattattgggagaaggacaacgttgcttcaagagtccccttaaatgacacatttgatgaagatcggatcaaggatacaatcactgatacaggtattcaaaaaatccttcttaatcacttgaaaaactataaaggacaatcagacaagaagggaaaagaaataccggcacagctactggcattttctcccgaaggaattgaggaaatgaacaagaatatcatgatgcttaatggaggaaaatttcatcagcctattttaaaagttcgtacctatgaaccgaaaggcaacaaatttaatgtaggccaaactggcaataaaaaggtaaaatttgttgaagctgccaaggggactaacttattcttcgccatctacacagatgaaaatgggaatagaacatatgaaactattcctttgaacattattatcgaacggcaaaaacaaggattaagttcagttccattgcaaaatgaaacaggagaaaaattattatttcagttttccccgaatgatttagtatatgtctcgtctgagaatgataagcaaagtaatatccaaccgaccttcgattctcgatgtatttataaagttgtgagttttacgaataatagattatatgcaattccacatatagttgcaaaatctatagtcgacaaaaatgaatttacccaattgaataaattggagacatctttggatggattatccattaaagaacattgttacaaattaaagacagaccgtttagggaatatttcaaaattatgatcaaacgcaccttatacttcggcaatcccgcttatctcaaaaccaggaacgaacaattagtatttgagagccctgagactggggaagtcaaacaagtgccgattgaagatatcggagtactgattaccgatcatcaacagatcactatttcgtcagcattgctgtcgaaattattatccggcaatgttgctttcatcagttgcgatgccactcaccatcctaccggtttgttgttaaatttagatggtcataccttacaaagtgcccgctttactgcacaaatagaagcatctgtgcctttgaaaaaacagctttggcaacagaccataagcgccaaaatcagtaaccaggctggggtattaaactggcaaaggttgcactgccagaaccttgtgaactgggccagggaagtaaaaagtggagatcccgataatcacgaagctcttgccgcggcatattactggaaacatttatttacacatacaggagttggaatgggatttaaacgggaacgcgaaggcttaccgcccaataatctgttaaactatggttatgccatcttgcgtgccttagtggctcgtagcctggtggctagcggacttctacccaccctgggtatttttcatcgcaaccagtacaatgcttattgcctggcagatgatatcatggagccatatcgaccattcgttgataaactggtatgggatattatcaggatgaatggagcgtctgcggaattaagtccttccgttaagaagagtttgcttggtattccggcaatggatgtaaggatacgtgatgaaaaaagtcccttaatggtagctgtacaacgtactactgctagcctcgcacgatgttttgagggtaagactcggaaaatagactatccagaatttgcgagcctaccatgagtagtcattaccatactcgtttaaatgcttaccggattatgtgggttttagtattatttgacctgccgactgacacaaaaaaagaccggaaagcctatgccaatttccggaaaaaactacttgttgatggtttccagatgttccagtttagcatttatatgcgacactgtcctagccgcgagaacgcagacgcacatatcaaacgcgtaaaaagctttttaccggctaaagggcatgtgggaattttccaacttactgataaacagttcggtatgatcgaattattctattgcagagagtccaaaagtacccaagcacccgtccagcagcttgcaatgttctgaaaatagaaataggatgagaaaaaaacacttgaaagctctttttctcatcctattactcggctcaaacacagtacagataaggattttatcaaatcgtgctgtgtaagaactaagatacaatacattttgaaagcaaatcacaacgcccgtggtgaaactgaaaagaaccggggcgctgtgtaagaactaagatacaatacattttgaaagcaaatcacaactgtccatgtgttgttaccggatgcgtctatgctgtgtaagaactaagatacaatacattttgaaagcaaatcacaacaaattgtcaggtgtagcgataatcgggaacgctgtgtaagaactaagatacaatacattttgaaagcaaatcacaacagaccgtatgcaaggtttacagcagcgcgcgctgtgtaagaactaagatacaatacattttgaaagcaaatcacaaccacattaccacctgccacatcattaatcagctgtgtaagaactaagatacaatacattttgaaagcaaatcacaacatatgtttcaaccaatgtttataactactagctgtgtaagaactaagatacaatacattttgaaagcaaatcacaactgctgtgataaaaaactgcttatatcaccagctgtgtaagaactaagatacaatacattttgaaagcaaatcacaacagcaataccaatttccaaattttcattcagctgtgtaagaactaagatacaatacattttgaaagcaaatcacaacaaatagtgccatccccccggtcttctccatgctgtgtaagaactaagatacaatacattttgaaagcaaatcacaacccgtgttgaatgcgttaccgtttacgttgtgctgtgtaagaactaagatacaatacattttgaaagcaaatcacaaccatacaggccggaagtatttcagttcgatcgctgtgtaagaactaagatacaatacattttgaaagcaaatcacaacgatatgacgaggaaaggcgtgtgttaacgagctgtgtaagaactaagatacaatacattttgaaagcaaatcacaaccgggtcgcgttctgcgttgccgccgtcacggctgtgtaagaactaagatacaatacattttgaaagcaaatcacaactacttgcagatagttgccatttggttccgtgctgtgtaagaactaagatacaatacattttgaaagcaaatcacaactacttgcagatagttgccatttggttccgtgctgtgtaagaactaagatacaatacattttgaaagcaaatcacaacaagagaaataacattagtgaaaacaaggctgctgtgtaagaactaagatacaatacattttgaaagcaaatcacaacagtttggcaagttccatcgatataccacctgctgtgtaagaactaagatacaatacattttgaaagcaaatcacaaccagtcattggtcatattattatccaacggagctgtgtaagaactaagatacaatacattttgaaagcaaatcacaacagtagtgcggttccctaccgatactatttgctgtgtaagaactaagatacaatacattttgaaagcaaatcacaacagactggtaagaaagtgttgtctaaggcgggctgtgtaagaactaagatacaatacattttgaaagcaaatcacaacacatctagttcgggtaatcaggcaagtgaagctgtgtaagaactaagatacaatacattttgaaagcaaatcacaactggatggcagaaatatgctgttgctaaatagctgtgtaagaactaagatacaatacattttgaaagcaaatcacaacgtggaaggccatgtaactaaaggcggccttgctgtgtaagaactaagatacaatacattttgaaagcaaatcacaacccagtcaggcgcctagtccagcaaatcgcgctgtgtaagaactaagatacaatacattttgaaagcaaatcacaaccggcgcaagcttttttctgcttcagcaaatgctgtgtaagaactaagatacaatacattttgaaagcaaatcacaactgctcacagagagctgccatttcgatccgtgctgtgtaagaactaagatacaatacattttgaaagcaaatcacaactcctcttctatctggaccattaagggttatgctgtgtaagaactaagatacaatacattttgaaagcaaatcacaaccctcttcccaaaggaccttgaagcaggaatgctgtgtaagaactaagatacaatacattttgaaagcaaatcacaacaagatgttgagataaaccgtatagacctttgctgtgtaagaactaagatacaatacattttgaaagcaaatcacaacggaattggtactaataacactgtaaggtacgctgtgtaagaactaagatacaatacattttgaaagcaaatcacaacggtataatgtatgtgaatgagaaccaaatagctgtgtaagaactaagatacaatacattttgaaagcaaatcacaactattacaagtgaaggtgttgctgttatccagctgtgtaagaactaagatacaatacattttgaaagcaaatcacaacaaggagaaagatggtaaggaagaagtatttgctgtgtaagaactaagatacaatacattttgaaagcaaatcacaactgcgttgggctttggccgcgtgggatgcttgctgtgtaagaactaagatacaatacattttgaaagcaaatcacaacgctttgcatcagtgataatcgctttgcgctgctgtgtaagaactaagatacaatacattttgaaagcaaatcacaactatcggccatcttgccaatgcaaaggatttgctgtgtaagaactaagatacaatacattttgaaagcaaatcacaactgaaactcactttttgtatcttttccctcagctgtgtaagaactaagatacaatacattttgaaagcaaatcacaacaccattgcgttttcaactgatccaacgtgggctgtgtaagaactaagatacaatacattttgaaagcaaatcacaacactcgcttgttgttgttgcttttgatcaatgctgtgtaagaactaagatacaatacattttgaaagcaaatcacaacgcccctgcgtttctctttgttgtccttccggctgtgtaagaactaagatacaatatccctcaactcattcatcatacccaacaagggaattgcaataatttccttcgtcaccggaaaacgctctttacccgggtaaacaataaaccgttttgtagctgcaatatcttcacaacccaggtgaaatccttttgaaactgatggggcttgggaacgtttgatttcaatcgcatatctctccgtactattcctttcaatcaccaggtcaatttcagcgccggcggccgtgcgataaaaccatgctgttatacctgcgggcaagcatgacaagaggttttcaacaataaatccctcccaactggctccaacaacgggatgtcctaacaggtcgtcaaatgttgttaggttaagcagggcatgcgtcaacccactgtcgcggatatatacttttggcgctttaaccagtcgcttacctacattgccagaccagggttgaagggtgcggatcaatagtaaatcttccagcaattcaatgtaccgtttggcagttggggcagttacatcaaggttgtttccgagctgcgcaatatttagctgcccaccctggctgtgggccaacatggtccaaagcttgcgcaacataacagccggtatcctggggccgaactggggcacatcccgctccaggtaagtactgataaaatttaaccgccatcgtaagctggcttcgtcattctttgaaaggaaactatcaggaaatccgccacgcaaccataaacggtcaatatcttttgattttttgtgatcaatttcggcgactgtaaaaccagacaactctttgtatgcaatccggccagccaggctttctgatgattgtttcaaaagctccaatgaagatgaccctaaaataaggaattgggccttcctgagaccttcccgcctgcggcggtctatcacacctcgtaggatttgaaaaagttcaggaacacgctgcacttcatcaagaatgatcagctttcctttgtgcagttcaaaatattcttccggctcattcagccgcgctgcttcggagggcctttccagatcgagataaatgggctccgggctcattgaagctgcaatctcctcagcaagggttgttttcccaacctggcggggcccaagaatagctaccactggaaattcttccagcaattcagcaatttctgattgtgctaatcgttttatcatccttgcaaaaataacattaaatattcgatttacaaggtaaaagtattacagatgtaatgctgttaagttcctggagccttccgatcaaagaccgtatagaagctttccatacgcaatacgcccgcacatgaacgtccatagaaaagaaagggccgcaccagttttggtacgcccctcggctgataggagaattttgtcgagcgtgtgctggtttttgcggggcgtgcgctgttttttgtggcgcgcacactgttttttgccgagcgtgcgctgttttttgtggagcgcacactattttttgccgagcgtgcactgttttttgtggagcgcacactattttttgccgagcgtgcgctgttttttgtggagcgcacactattttttgccgagcgtgcactattttttgtggcgcgcacactattttttgccgagcgtgcgctattttttgtggagcgcacactattttttgccgagcgtgtgctattttttgtggagcgcgcactattttttgtcgagtgtgcgctggtttttgccgagcgtgcgctggtttctgtcgatagtgcggaaatgatccggctactaatgaaaacgatctgatcgtagtccagagcgtcccttctgctggtggaggccgccggacagttggaagatattcaaacagagtctaataacctacctcgcgtagaggcccgttcaaccagcatggaaggtatcgtaatagtctgtgcagacaacgcaaagtgtttttcctccaaccctttaaaaagaacggtagcggcagtcttccctatttcaaaagccggctgcgtaactgtggtcagagaaggttcgaggatagatgcggaatgcaggttggtaaaaccaatgattttcaggtcatcaggtatagctacaccaagctgtttactcaccaggtaaacaggagtgaccagtttttcaacagatgcaatgatgccatccggtttatccctttgctccagcaattgcctgatcaatgcgcagttctgctccatatcgttactgcaaagcaatacatctgcatctgtcgcgcctatgtgagcatcctgcaatgcttttcgaaaaccctgcacccttttcgaagtgatggacaggttggcggcgatggataaaaaactgatctttttacaaccccgttccagcaaacaacgcgtggcttcataagcgccttcaaaatcgttggtagagattttagcagcttcaatatcatcgaagacccggtcgaaaaaaaccacgggaatacctgctgcaagcacttcctttatatgatctacccgcgaagtttcttccgaaacagaaatcagaataccatctacgcggccacttctgaaggcagaaaggatttgttcttctcttttgaaatcttcatgggaaagatagatcagtacatgataccctttggcttgcgcaacggattcaataccgttaatggcctgcgaaaaaaaactatccgccacttcgggcagcactactgcaatggttttgctttttcgtttacggagactactggcataagggttgggcgtataatgatatttggcagccagggccaatactttttgtttggtctcgctgctgatctcgtggctgtctttcaaggctttggaaacggaacccacagacaagttcaattcttttgccagttgcttaatggtagtactgttcaacgcaattatattaagaatgttgaataatccttgatatggaaaaggaagtatctatgatgaaatgtaaccaatttttcgttgcctcaccatctcaacacaccgttttacgaaaccggtttcgtaaataaatacgcgtataaatgtcattttttcacccaaaaaacaacaatttagtactggctccataacgaaaaccgcaccctatgagcactacgaatgccagcccattaaccagcctcgatcagtgggaagacgacgtactgcgccgataccctgatccggaatccatcgccacctctaaaagcaccgaggcctatcgcaattacgaagcccccgaaagagatacggtacgggaattttacaaattgaatcatacctatcagacctatgattttgtagtacagaagcgggaagattttttaaaattcaaccgcaaggaaatgtcggtatgggatgcattccagtttttaaatcaattggtagacgactcagatcccgataccgatcttgaccaattccagcacctgctgcaaacatcagaagccatcaggcgtgacgggcatcccgattggatggtattggttggtttaatgcacgatatgggtaaagtattatgcctgtttggtgaaccgcaatgggcggttgtaggagatactttccctgttggctgtgcttactcggataaagtggtatatcctgaatttttcaaatacaaccccgattacaacaacagtcagtacaatacgcaatacggcgtttacgaaccccattgcggattaaggaatgtaaagatgagctgggggcacgatgaatacgtgtaccagatgatgaaagaccacctgccggaagaaggactgtacatgctgcgttatcactcgttttatgcatggcatcgtgaaaatgaatacagccacctgctcgatgaacatgatcaaaaaatgctgccttgggtacaattgttcaatccgtatgacctttattcgaaaaaccccgagccgccggattgagaaaaactacgtccttattacgaagcccttattgccaaatacctcccttcaacattgaagttctaaacaggtaacaggtagcaaactggttcaaaaccctgcaattgaacaaccgctgtcagtgagcagccttatctttgtcccggtgcgtccggggcaaagtttttttacaacagcccgtacgcatttcttctaaaaccaacaatatgccaaacgttttacccaatcactcatcaacaaataaaaatccacttagcggaagattactttcactggatgccctgcgcggttttgatatgttctggatcgttagcggcgaaggtatctttcatggcattgcatcggccattatgaaacaacacggcctggtacagaacgcagaaaccgaacagatccaagtgaatgacacactcaacggcattgaaaaaatctttgtagggattagtaaccagttggttcacacggtatggaatggcttcactttctatgaccttatttttcccctgttcatttttattgccggggttagtatgcattactcattcagcaatcaactgcagaaagcggggatcaaccaagctgctgcgcggaaaaacatttatcgttcgcttatcaaacgtacccttattctgatcttactgggcatggtagtgaacagagcactcgaatggaatggatatgccaatacccgattcgccagtgtgttgggccgtattgcattgagttgcttttttgcggcgctgatctacctgaacaattccctgcgcaggcaaatctattggctgtgcggactcctattgggttactgggcaatgatgagctggatacccgttcctggttatggcgctggtgtactcacgccggaagggagtcttgcatcctatatcgacaggctgttgctgccaggcaggttgtatcgcgtggttactgatccggaaggcttgctttctaccatacctgccattggcactgccatgctggggatgttcacgggcggtttcctgcgcagtgaaaaatggactgcgcaaaacaaagcgctgcgtttattggtagcaggcatcttattaatattgaccgcactgctttggaacctggcattccccatcaacaaaaaactatggaccagttcttttgtatgctatacaggtggatggagcctgttattattatccctgttttattttatcatagatgtgtgtggatatcaaaaatggtgcatgcccttcgtatggatgggcaccaattccatcctgatatacatggccgtgcatggcctggtgaatttcgaatacagctcccgttttctgttcggaggattgatcaagatggcacctgcaccttatagccaggccctggtatggacaggcgtggctttgatccaattcactgtcttatattttttatacagaaaaaaatggttcctcaaattatagtgcagacagatccacttttttcccggttcgagtagcctggtaaatggcatcgatgatcttcaggtctttcaccgcttctcccccatcaatgggtacgatgggttgtttgcctgttaacaggatatcagacatctcttccatttgccttgtctggtgcgctatatgcggatagttcaattctcctttgtgtgtgcgtcctttgatcggtccgtaattggtagccggttgcagttcggcaaaaccattttct

SEQ ID NO: 1111 - DNA, 24539 bp, synthetic construct
  misc_feature 1..24539: note = Synthetic
  source 1..24539: mol_type = other DNA
ttttccacatgccacagaactggatatacagatgcttacctccctgccttcgctgctgataattccttttgtgctgttggcgggcaagctggccgagaaacgtgactttgtgcgtctgctgaaagcggggctttggatgtttgccgccagtggggtactttatcttttttcggacaaaatgtggcagttgatggtggtcagtgctttgctcggcattggctcgggactgataatcccgttgtctaccggtttggtttcacgttatttcacgggggagtatagggtaaagcagtttggttacagttctgccatcaccaatgtgacgctggttgtggcaacggcggtgactgggtatctggcagaggtaaactggcacttgcctttcgtggtatatctgcttccgttggtttctctgctgcttgtcgggtatttgaagggagataccggtcagccgcagaaaacagaagatacggctaccgttgttccggaggaatccaagcgtgcgattcccggtaaatacggcatccatgtccgccatctgctacagttgatgctgttttatggcgtcactacgtatgtagtgctggcggttacttttgacttgccttttttgatggaggcccatcacttctccagcggaaattccggattgatgatctccttattcttccttgccattatggctccgggtttcttcctggggcatatcgtgaagtggatggggaaacacacaaagttttacagccttttgtccattgcagcgggtttgcttttgatatggatttcgcctaaagaatggctgataataccgggatgtatgttggttggtttgggatatggtgtcattcaaccgctgatttatgacgagacagtagatacggctataccagaaaaaacaactttggcactggcctttgtaatggtaatgaattatctggcgattctattgtccccgttcattacagacttctttcagaccttgttccacactaattccaaggaatttccgtttattttcaacctctgcatcacactgctcgctatgtggtgggagtatgcgaggaagaaggattctttgttgggggggagttatgagtgatgagtgatttgttggtaattgtgctgcgctaccatgctgaaaggaaaataccaacaaatcactcatcacttataacttataacttataacttataacttataactcaatcgcctcatatttcagcccgaagacgtcggctacagctttgtatgttactttgccttccactacgttcaatccttgcgccagagccgagtcgtccttgcaggcttgtctccagcctttacatgccagggaaacagtgtagggcagggtggcatttgtcagtgccatggtggaggtgaagggtacggcgccggggatattggcaacggcgtagtgtacaattccgtccacaatgtaggtagggtcgctgtgcgtggtggggtgggaggtttcgaaacaaccgccctggtcgatggctacgtctacgagtaccgtaccgggtttcatcatcttcagcatttcgctggtgatgaggtgtggggccttgtcaccggggatgaggacggaaccgattaccaagtcgatgttcggcaattccatcttgatgttatgggtggaagaatagagtgtctttacgtttttcggcatcacttcactcaggtagcgcaggcggggaaggttgatgtcggcaatcagtacctcggcacccattccggcagctatctgtgcggcattggtgcccacgataccacctccaaggataagtacgcgtgcgggacgtacgcccgttactccgcccatcagttttcccttgccgccttgtggcttttcaaggaagcgggctcctacttgggtagccatacgtcctgccacctcgctcatgggggtaagcagcggaagtgaacggtcttctttttccacggtttcgtaggcgatgcagacggcaccactttcaatcatggcttcggtcagcaatttatcggctgcaaagtggaaataggtaaataccacttgttcctttttaatcagtttgtactccggtgcaataggttcctttaccttgacaatcatgtcggctgcggcatacgtgtcttcaatggtcggtaaagtctttgcacctacggcgatgtagtcatcgtcggagaaaccgctgtttacgcctgctgtggcctgcacatacaccgtatgaccttttttcaccaattcggctactccggcaggggtcatgcccacgcggttctcgttgttcttgatttctttaggtactccgataatcataaccttaaagttttaattggggggttaaacatggcgcaatatagcgatttcccggcttgggtgttatcggtgcatctatgttcttcaacagaatttttatgcatgttttaatcaatgataattgcacctttctgtaggtagagagaactattctttttatatttgcatgcatttaaaataatattgactgtacaaaatatgaaatatcctatatttttctctcttttgttctttattggtagtgtgcaaagcggctatgcccaagaaaccgatacagacaagacctccttcaccccgccttttgatttccccatcaccttctccggtaacttcggcgagatacgtgccaaccattttcatggcggactggatttcaagaccggtggaaccataggcaagccggtacgcgctctggccgacggatatatttcgcgtatccgcgttacccacggttcgggctatgttctcgatgtggcttatgacaatggttattcgacgataaaccgccatttgagtgcctttgtgggcgatgtggcccgccgggttgaagacttgcagtacgagaaagaaagttgggaggtggaaattactcccgaccccgacgaatatcccgtgaaggccggtcagataatagctttgagcggaaacaccggatactctttcggtccgcacctgcatctggatatgatagagacggctacggacgaatatatagacccgctgcctttcttcatggacaaggtgaaggacaagactgccccgcgtgccgaaggtatcatgctgtttcctcagccgggaaaaggagtggtggaaggcaagcagacgcgacgggcttttccggcacatcctacgaaacccattatcgcctggggactgattggtgctggcatccgtgcctacgattatatggacggagtgcagaataaatatggcgtgaaggcggtgattctcgaagtggacggcgaggaagtcttccgcagtacggtagaccgctttgcctatgaggagaaccgctatatcaattcgtggacacacggtcagtacatgaagtctttcatagagccgggcaaccgccttcgcatgctgcaggcatccaacggcaatcgcggactggtggacatcaacgaagaacgcccttaccggtttgtctatacgctgagagatgcgctgggaaatatctccaaggtccgcttcacagtgcagggacagaagacgataattgctccggtggaacatcgtgagaaatacgccctcaaatgggacaaggtgaactatctgcaggagccggggctggagttggttatcccgaaaggaatgctctacgatgacgtcttgctgaactactccgtgcgggctgatagtggcgacatcgctttcacctatcaattgaacgatacccgtattcctatgcacggtgcctgcgatttgcgtatcggcttgcgccggcgtccggtagaggatgtgaccaaatattatgtggcgggcgtaacggcgcgcggtggaaaataccgtatcggcggtaagtatgaggatggtgtcatgaaagtgcgtatacgggatttggggacttataccgtggcggtggatacggttccgccggtgataactcccgtgaaccaagcccaatggggacgtacgggaaaaatcatcttcaaggccaaggacaaggaaaccggcatcaatacctatcggggtacgattgacgggaagtatgccttgtttggaaagcccaattccatcagcggtaacctggtgtgcgagcttgacccgaaacatgtggagaaaggcggcaagcatgtggtggagatgacggtgacggatggctgtggcaaccgtaccaccgaacagtttgaatttgtatggtaaagactgaaatatttagtaacattataatttagaagtatgaaaagtaaaagactgactctttccgtcttgtttgttgtggcagccatggcgaatgcgctggcctgcaccaatcttatcgtgggcaagaacgcttctgcggacggttctaccattgtttcctattctgccgattcttatggtttgttcggcgagttgtatcattatcctgccggtatgcacaagaaaggcacgctgattgacatacacgagtgggacaccggcaaatacctcgggcagatagagcaggctcgccagacgtacaatgtcatcggcaatatgaacgagttccagctcactatcggtgagacgacattcggtggacgtcccgagctggtggataccaccggcatcatcgactacggcagtttgatttacctcggtctgcaacgctcacgcaccgcccgcgaggccatcaaggtgatgacggaactggtgcaggaatatggctattacagcagtggcgagtccttcaccatcgccgaccccaacgaaatatggattatggagatgattggcaagggacccggtgtgcgcggtgccgtatgggtagctgtccgcgtgcccgatgattgtatctccgctcatgccaaccagagccgcattcatcagttcaacatgaacgacaaggagaactgtatgtactcccccgacgtcatctcttttgcacgcgagaagggctattttgacggtgtgaacaaggatttcagctttgccgatgcctacgctccgctcgatttcggtgcccgtcgctattgcgaggcacgcgtatggagctatttcaatatgtttaccgaccgcggcaacgagttcctgccttatatattgggtgagacggacactccgatgcctctgtttgtgaagcccaaccgcaaggtttccgtgcaggatgtgaagaacgccatgcgcgaccattatgaaggtactcctctcgacatcagcaaagatttcggcgcaggcccgtatcataccccgtaccgcctttctccactctctttcaaggtggatgaccaggaatacttcaatgagcgtcccatctccacccagcagagcggtttcgtattcgtggcacagatgcgctccgagttgcccgatcctatcggtggagtattgtggttcggcacagatgatgccaacatgacggtatttacgcccgtatactgctgtacggacaaggttcccgtatgctacacccgtgtggacggcgccgattacattactttctcctggaactccgctttctggattttcaactgggtggccaatatggtttatccccgttatgacttgatgatgggcgacgtgcgtgccactcagacagagttggagacaaccttcaacgaagcgcaggaaggcgttgaggctgctgctgccaaactgctggaaaaagaccctgccaaagcaaaggcattccttaccaactatacgaacatgactgcccaaagcactttcgatacttggaaacgtcttggcgagtttcttgtcgtaaagtataatgacggcgttgtcaaacgtatgaaaaacggtcaattcgaacgtaattccatcggccagccggcaggcgtaatccgcccgggatacccgaaggagttccttgaagagtatgttaagcagacgggagacagatataaaatgcctgaataaaattaggatatttgaacttattcttctacatttgtgtcttacaaaaaagtttatattaacccttaaaacaataacagtcttatggaaaatcaggaactgattaagcaggtgactgagaaagccgaaaaatggcttaccccggcatatgatgccgaaactcaggcagaagtgaaacgcatgttggaaaatccagataaaaccgaattgatagacagtttttacaaagacctggagtttggaacgggtggtctgcgtggcatcatgggtgccggtacaaaccgcatgaacatctacaccgtaggtgccgcaacacagggcttgtccaactatctgaacaaatgttttgccggaaagaaggatatttccgttgttgtggggcacgactgccgcaacaatagcgacaagttcgcaaagatttctgccgacatcttctctgcaaacggcatcaaggtatatctttttgatgaccttcgtcctacgcccgaagtttcatttgccattcgccacttcggctgccagagcggtatcaacattacagccagccacaaccccagagaatacaacggctacaaggcttattgggatgacggtgcgcaggtgctcgctccgcacgatactgccattatcgaagaggtgaacaaggtgactgtggacgacatcaagttcaacggcaacaaggacttgattcagattattggcaaggaagtggataaggtttatctggacatggttcattccatctccatcgaccccgaagtcatccgtcgccagaaagacctcagcattgtgtatactccgcttcatggcgcaggccgcgtgctcattccggattcattgaaggagtggggatttgagaatatcaactgcgtgcccgaacagatggtgaaggacggcaatttcccgacggtggtttctccgaatcccgaaaatgccgaagccctttccatggccattgcgctcgccaagaagattgacgctgacatcgtgatggcaagtgacccggatgccgaccgtgtcggtatggcctgcaaggacgataagggcgagtgggtgcttatcaatggtaaccagacttgtctcattttcttgtactacatcatcaagaaccgtattgcaatgggcaagatgcagccgaacgacttcatcgtgaagaccatcgtgaccactgaactcatcaaggctgtggcagacaagaacaagattgaaatgcgcgactgctataccggcttcaagtggattgcccgcgaaatccgtctgagcgaaggcaagcagcagtatatcggtggtggtgaagaaagctatggcttcctggccgaagactttgtccgtgataaagatgctgtttctgcctgctccttgctggccgaaatctgtgcttgggccaaagaccagggtaagacgctctatgacgtattgatggaaatctatgtagaatatggattctcaaaggaaaccaccgtgaatgtggtgaaaccgggtaagagcggtgccgaggaaatcaaggcgatgatggataacttccgtgccaatcctccgaaggaaatcggcggttcggctgtcagcttgattaaggattacaagacattggaggctaccgatgtccggggtaatgtaagcaagctggatatgcccgagacttccaatgtacttcaatatttcactgtagacggcacgaagatttctgtccgtccttccggtacggaaccgaagattaagttctatatcgaggtgaagggcgagatgggttgtccgaaatgctatgccggcgctgatgccgaagctgaaaagaaagtggaggcagtgcgcaagtcactcggcatttgataggaaagaggaaaaaatgtgtatatagtgtttggagaggcgtaacccgtgagggctgcgccttttctttttgcttctgtgttgaaagaaaacttaaataaagacttaaacccgatggttgatgaacaaaacgtttgcagggaagtttagtatatgcagattgcggttacacaccgattggttgatgtgaatgagagtcgtttcattcgtagttgttcgtttgtgagtgtgtgttttccgcaatttgcttttttaaatttcttccccccctcttttttattctttaatttttaattgttctccatccaccagtctatcagccttcttgctatactcagctttcgtggtatttcgggcaggttgtctttggaatagaaggcggcagcggtcagctcatcttcctgcagttttatctctccgctttcgtagtcggcaatgaaacccaccatcaatccgctggggtagggccagggctggttgctgaagtaggtgatgttctttaccttcagccccgtttcctcaaaaacttcccgttccacacattcttccagtgtctcgccggcttcgaggaagcctgccaccagtccgtagaaggttcctcggaagttccgggcatgcaccagcaggatttcgtctcctttgcgtatcagtacgatgatggcggtggaaacgggagggtacatctcattgccgcagttgggacacttcttcatgatgggggtctggtgctccatggcggtgccacacacggggcagaagcggctgtgctcgtcccaatagagtatctggaaggcctttcctgcagaacggtactcgtccgacgagatgtaatcgtacgatgcgcgcaggcctatcatgacccattcgtcggtttcggccacgggctgttccaaggcaaatgcgcgtacttgcttgccgttgggggggaacacttcgtgtatattacttccggcttccggtgtcagaggaggctctatactgacgggtacgctgtattttatttctcctttgtctgtatatccttttttcagcagcagttggtctttgaagaagacgaaccactgcgtggagggttggggttctgttgatttttccattgtttgttgttttattatttgggggggatgaacacgaaaatacaaaggcatagagattcttttcaaagagataaagcattaatttctatgtctttgtatctctgtgttcgcctcccccctaaatttcgtttgctgtgtctttttcttgtcgtacatagaccgttgaccttcccattccgcggcggcgcaggaacccttgccggatgaagttgttcagttcgtctatggcggcatgtctggttagtccgcttagctggatgtattcgttcttgttgatacatacattctgcttgaggaacagttccagttcggcttttcttgtttcttcggtggtctctactacttttttcgatttcttggtagtggagtgtacacgttccaacgtcattttcttcttgatgttgttgcggaacgtgctgctgatgcgcaggtgtacgttttggaattggacggattcggaacggattttctttttctcatcgtcggtctcgcgcaagcatttcagtgaagtgctgaagaagccgagttctcccagttccacgatgtttccgttggcaaggaggtcgcacaactcgtcaatgcaggcatccaatgctgctcctatcacattcttgggcagatgttggaaagttgcgatatgttccacaaactccttttgggtataagtccttttcgggcagatacgtgcatggagtgatttcttgtcttctttcccgtcgggcgaaggcgtttcgtaaaggtcgtaatacgcgctcataagatatttatttttgtttatagcgataaacagttctcgtcgcttcggggaattatttttgtcgctaagcggattaattttcttcttcctaaaaactaatcgtccgacaactgttgcattatcgtccaacagttgtttaattatcgtccgacagctgtcggacgaaacagaaatgggtatgggacgattatttcttagtgaacaaaggtataaaatattgtgatacgaagagtagtgtttggggaggaaagttttagttttcggcaaaagagggatattgggaatgataattagtttttggaaataaaaaatcccccgttaaggacgagggaacctaatgttttcacaacggaataatccttattgtgacttgcttcattttagtatgacaaatgtataaaataaatatggaaatacaatgcttatattgaaaaaaaaaatacctttgaagaaaatattcaaaatataatactatgagaacgatacttggattggatttgggaaccaatagtataggatgggctgtaataaactctgtaattaaagaacagaccgagagaatttggatagaaatggctggcagtagaataattccgatggatgctgctatcttgggagactttgacaaagggaattctatatcacagacagctgaaagaacccgttttagaggggtgcgtcgattgagagagcgacaattactacgccgtgaacggttgcataaagttttgaagattcttggcttcctgccggaacactatttaaaaggaatagattttgaaaagcatacgggtaaattcttgtcaggcagcgaaccgaaattgccatgggtaaaggatagatggggaaaatactcttttttatttcagacagcgtttaatgaaatgttggcggattttgcaaaacaccaaccttcattggtttttgatggtaaaaaaatcccttatgactggacagtttattatctccgtaagaaagctttgacagaaatgataagtaaagaagaactggcatggattcttttgaactttaatcagaaacgtggttattatcagcttagaggagaagaggaggaagacaatgcaggaaaatctgttgaattttatgcattgaaagtcttgtcggtggaagcgactgatgaaaagaaaggccgggatatatggtataatgtacatctggagaatggatgggtatatcgtagaagcagtaatgtcccattggactgggaaggacgggtaaaagagtttattgtcactactgacttaaatccggacggtactccaaagcttgataagtatggtgaggtgaagcgttctttcagagcgcctaaagaggatgattggatgttaataaagaaaaggaccgaagcggacattaccggtactcataaaacgattgggagttatatatatgatgctttgttgcaggagccacaacaaaagataataggaaaattggtgaaaacagtagaacgaaagttttacaaggaggaactgaactttattttgcagaagcaatgtgcttttcatgcagaattgcaggatagagatttatacatgaggtgtattgaagcgttgtatccgggtaatgaagtgcaacggagaaatatagctaaccgggactttatctatttgttaatagatgatgtcttgttttatcaaaggccgttgaaaaccaaaaagtcattgatagctaattgcccttatgaggaaaatgaatatgtaaaccgcaaaacaggtgaaatcaaaacagctccgttaaagtgtatagccaagtcacatcctctttttcaggaattccgtttatggtatttcctttccaatattcgggtatatcaaaaggaaagggaagtaaatggaactttacatttggatgtggatgtgacaacggagtttttgaaaacagaagatgattatgtggctctatttgattggctgaactctcgaaaggaaatagatcagaaagcttttctgagatatcctgcgtttggactgaaaaaggaaataaataattatcgttggaattatgtcgaggataagttctacccatgtaatgagacgagacatgcgattctttcccgtttggaaaaggccggtattggtattgactttttatctgatgaaaaagaaacagccttgtggcatatcttatattctgtaagtgacaagcaggaaatagagaaagcattggcgacttttgcggttaagaacggattgaatgaatcctttgtggaagtgttcaagaagtttcctcctttcaagtctgaatatggcgcttattctgccaaggcgataaagaagttgttgcctttgatgaggtgcggaaagtattgggatatgtcgttgattgatggtacaaccaaggaaagaatagaaaggataatagcaggtgagtgtgatgagagtataggtgccaaggttagagaaaaggcgatgaacttgtcggatatatcttgttttaagaggcttccgttgtggttggcttgttatgtagtgtataatcgtcattccgaagataaagaaataaccaaatgggaaacccctgctgatattgatgcttatctggctgcttttaagcaacattcactacgaaatcctatcgtagaacaagtgataaccgagacattgagagttgtcagggatatttggaaacaggttgggaaaattgatgaaatccgtattgagttagggcgcgagatgaaaaatcctgcggacaagcgaaaaagaatgactactcagattctggagaatgaaaatgccaatttacgtataaaggcattgcttgctgaatttgtgaatccggaatatggggtagagaatgtccgtccctattcaccaagtcaacaagaaatattgcggatttatgaggatgcagttttaaagggggaagaacagattccggaagatatagatgtgatattgaaaaaattcaataccagtaaattaccgacgaaatcagaattcttgcgttataaattatggctggaacagaaatatcgttcaccttataccggtgagctgatacctttggctaaattatttactgctgcgtatgagatagaacatgttatacctcaatcccgctattttgatgattcattctctaacaaagtctctaacaaagtgatatgtgaatctgctgtgaacaagttgaaagataatcaactgggatatgagtttatcaagaatcatcatggacagaaagtggaagtgggttttggaaagacagtagaaatcttttctgtggatagttacgaacgttttgtaaaagaacaatatgcaaaatcgggcataaaaatgaagaaattgttgatggatgatattcccgagcaatttattgaacgccaattaaacgatagccggtatatcagtaaggttgtcaaaggacttttgtcgaatatcgttcgtgaaaagaatgatagcggtgaatatgaaccggaggctgtttcaaaaaacatattagtttgtacaggaagcgtgacggacaggctgaaaaaggattggggcatgaatgacgtctggaatagtattgtaagtcctcgttttgaacgtttaaatgctttgaccgaaacccagtgttttggacattgggagaataaagacggaaaaaaagtttttcaaacagcagtgccccttgaatatcagaaaggattcagtaagaagcgtatagaccatcggcatcatgctatggatgcaatagtaatagcttgtgctacacggaatcatgtaaactatctgaataatgagtctgcaagccggaatgcgaaaatttcccgttatgatttgcagagactgttgtgtgataagagtaggggggatggtaatggtaattatagatggattataaagaaaccatggactacttttacgcaagatgcaagggaagcgttgagtgggataatagttagcttgaaacagaatttgcgtataataaataaaacaaccaatatctatcaacattttgatgcaaatgggactcgtgtttatgagaaacagaaaatcggtgatagttgggctatccgtaaaccgatgcacaaagatacggtttttggagcggtaaatttaagaaaggtaaaggtggtacgcctatctgtcgctttggatactccttctatgattgttaacaaaagagtaaaaaataaggttcttgaattgttatcatataagtatgataagaagaaaattgaaaaatatttcaaagagaatgctttcttgtggaaagagctggatatagccaaagtcgctgtttattattttacggaaaatactactgaacctttagttgcagtacgtaaatcattggactcaactttcaatgagaagaagatagcatcggtgacggatactggcatacagaaaatactcctgaatcatctgaaatcaaaagaaggaaaggcggagttggctttttctgcagaaggtatagaagaaatgaaccgtaatcttttacaactgaatgatggtaaaggacatcagcctatatataaggtgagggtgtatgaaccgcgtggaaataaatttaaagtcggtgtacttggcaataaaggtgccaaatgggtggaagctgctaaaggtactaacttgttctttgctatttacataacagaagatggaaacagaacgtatgagactattcctttaaattgggttatagagcgtgagaaacaagggcttgttcctgtaccggacagaaatgaaaagggagataaattattgttttggctgtctcctaatgatttggtatatctgccaaccgaagaagagcgggattttggtaggataaatgaaccgatagatagggggaggatttataagatggtttcatcttctggtaatcaatgcttttttatacctcaaagtatatcaaatgctattatttccactaaagaattaggttctaataataaagcagaaaaatcatgggatggtgaaatgataaagaatatttgtattccagtaaaagttgataggttaggccgtattatagaagttaagtatagagtaaatgaataatataaagttgtttcaagagaaaaagatccgttccgtatggaacgaggaagaacagcaatggtatttctctgttgtagatgtagttggtgtattgactgatagtgtgaatcctacggattatctgaagaagatgcgaaaacgggatgaagaactggctacttacctggggacaacttgtccccaggtagaaatggtgacagatacaggaaaaaaacgaaaaacgttggcggcaaatgtgcaggctttattccgtatcattcaatctattccttctcctaaagctgaacctttcaagctttggttagcacaagtaggttatgagcgtgtacaggaaatagaaaatccggaattggctcaagagcgcatgaaagaactatatgagcaaaaaggttatccaaaagattggattgacaaacgtttgagaggaatcgccattcgtcagaatttgacggatgaatggaaagaaaggggaatcacggaaaaaagtgattatgccattcttacggcagaaatatctagagcaacgtttggattgactccttcggattataaaatatataaggggctgacgaagaaaaatcagaatcttcgtgaccacatgtctgatttggagttgatatttacaatgcttggagaacgtgtcacaacggaaatttctcagaaagaaaaaccagatacatttactaaaagtaagcaagtagcacaacgtggaggaaatgtagccggagtagcacgtgaacaagctgaaaaagagttgggtagaagtgttgtttctcctgaaaattttctgttggattctgataaacagaatgatactttagagcttccttttcttgaaaatgatgaatgaataacttgtaaagtctatatgctatgattaagaaaacactttattttgggaatccggtctatttgtctttaaaaaatgcccagttggtgattaaattgccggaggtggtgaagaacagtgctttacccgaagggttcaaaagaatgtccgaagtgactaagccaatagaagatattggagtagtggtgttggacaataagcagataaccattacttcgggagtattggaagcattgcttgagaataattgtgcagtcataacctgcgattctaaaagtatgccggttggtttaatgcttcctttgtatgggaatactacacaaaatgaaaggtttcgtcatcaacttggtgcgtctctaccattgatgaaacaactttggcagcaaacaataaaagccaaaatagagaatcagacggtagtattgcatgaatgtgctggagaagaaataaagtgtatgaaggtgtgggctgcagatgtaaagagtggagattctgataatttggaggctcgtgcagctgcttattattggaagaatttgtttaaaatagaaggctttacaagggatagagaaggtattcctcctaataatttgttaaattatgggtatgctattttgagggcagttgttgctcgtgctttggtgacaagtgggcttctacctactttgggaatacatcatcataatcgttataatgcttattgtctggcagatgatataatggaaccttatcgcccttatgtggataggttggtatatgatatattcaaggaagcagaaccgaattgtgttgaattgacgagagaattgaaagcgaggttactgacaattcctacattagagactgttatttcgggaaaacgtagtccgttgatggtagctgttgggcagactacggcttctctgtataaatgtttcagtggtgagttgcgtaaaatatcctatccagagatgtgatggaccggtttagtgaatatcgcattatgtgggtattagtgttgtttgatttgcctaccgaaaccaagaaggataaaaaggcgtatgcggaatttagaaaaaatctgcaaaaggatggatttacgatgttccagttctctatatatgttcgtcattgtgcgagttgtgagaatgcggaggtacatataaaaagagttaaatctttcttaccggactatggaagtgtcggaattatgtgcattacggacaagcaatttggaaatatagcacttttttatgggaaaaagactgtggatgtgaatacgcctggacaacaattagaattattctaaaaaaatcccgcgcaatggcgggatttttttagaagcagcattctttttttatattctaatactatgtgtaatcgtttgaatattagattgttacttgtaatcagctgtttccaatggttcaaagatactaaaatgaaagcaaatcacaacagccgcaaattgtattgttgattactgatagctgtttccaatggttcaaagatactaaaatgaaagcaaatcacaacatagctttagacgttttaaagtctgtgaaagctgtttccaatggttcaaagatactaaaatgaaagcaaatcacaacgcgcttgggattacatttttttggatttcgctgtttccaatggttcaaagatactaaaatgaaagcaaatcacaaccaaccttctccgttatccactcgaaagcctgctgtttccaatggttcaaagatactaaaatgaaagcaaatcacaacacctaacaatgtatgtacccgagtgtttcgctgtttccaatggttcaaagatactaaaatgaaagcaaatcacaaccaaaaggggtgcaaattcgatagtatgttagctgtttccaatggttcaaagatactaaaactcgctcacatacggatggatttcagaggaataatgcaaagtgcttggacgagaaagggataagtcgttttgttccacattcttccatttgaggtttttgacctgtttttggggagttaggcaaacaaatcgctacttatccgttgccttttcgggattgaaaataggtatgaaatttacttccaaaactgtttttctacccctgttcaccaccgcaagaacgctgttctgtctgttttttgctaatgcaaagttagtcaaaattttccgtatcaggaaaaaatacagtctcagattggaagtcaagggggctttttctatattccgctatatttttcatgccattcatttgctcgctatataataattttgcaaacaaaggaataggttatgaatcaggcaaatgtaaaggtgtcgttctacctgaaaaagagcgaggcggatgccaatggcgaatgtccggtaatggctaagttgaacatcggaaaatactctgaagcggcattcagcgtgaagatgaaagtgccgcaatcccgatggacttcggggcgtgcgtctggcaagagtgtgacggcaaaggaaatcaacaaccggctggatgagatccgtgcggtggcgttgagtatctataacgagcagtctgccgtccgtgacggtgtgaccgctgaggaagtgaaaagcattttgcttggaatggcaagcgggcaggaaacactgttgagctatttcaggcaattcatcaacaactttgaaaagcgagttggagtcaaccgcacagccaaaagtttgcaggcataccgcaatgcctataggcacattgagaagtttctgcaagaaaaatacaggctaacggatattcctttctcggcattggaccgctccttcatcgacaaatacgacctgtaccttcgtaccgaacgcaatctcgctcccggaaccgtcatcaacctgaccgtccaactgaaaaccatcgtgggtgaggctatcgctgacggtatcattaccgtttatccgttcatgggttacgagccggttcgtccgaaagcggtgcagaagtatcttaccgatgaagagctgcaacggcttatgaccactccgctccataggcagacactttaccttgtccgtgacatgttcctgttttcctgcttcaccggcatttcatacagggatatgcgctcgctgacaaaagaaaacctgtcgcttgcggaagacggcacatggtggattaaaagtgcccgccagaagaccaagatagaatttgaaatccccttgttggacttgccgttacagattctgaaaaagtacagtgatgccgtttctgataacaggctgctaccgatgtattgtaattccaacatgaatctctacctgaaagagattgcccggatttgcaacatcaaccgtccgctggtatttcacgtggccaggcacacctacgccacggaaatcaccctttcgcatggggttcctcttgaaaccgtcagcaaaatgctcggacatagccggattgaaaccacacgtatttacgcgaaagtgaccgatgacaagattgattccgacacaaggactttgaaccggaaaatatcggaacgtttttccgtcgtgatttgattacctcttaaaaaaacaagaacatggaaaagaatatagaaaaccagaatatcaagcggcgtagtacatttgccgtattgttctatataaaccgcacgaaagtccgcaaggacggaatgtgccagttattgtgcaaggtaagcatcgatgccgaatgggcacagataggaaccaaagtatccgtcaatccctctatttggaatcccgacaaaggacgcgccgacggacggagtgaaaatgcagttacggtgaaccgcgccatagatgacctgacagacgagataaccggacattacgacaggataaagaacagtctggggttcattacagcggaacttgtcaagaatgcagtcaaaggcatcgggcagaaaccacttaccctgcttgccttgttcagggagcataacgaggagttcaagaagcgtatcgggatagaccgcatacaggaaacatacgactcctacaagcgttcctacaagcacctttccgcttttgttcaggagaagaaaggcgtggaggacgtgacattgagaagccttgaccgtgcgttttatgacgacttcgagttgttcctgcgcacgaaccgcaaccaaaaacccaagaccgtacatgaacacctgtaccgcctgaagaagctgacaatgcgggcggtcagccaggggacattgcgccgtgacccttactgccgcctgcatcccgaactgccaaaaagaaaaagccggcacatgaaattggaggacttgaagacactgatgaccaccccggtggagaagcctcaactgcaattcgtaagggatatgttcattttctcgacatttaccggattggcgtatgcggacttgaaaaaactgtcggtcaatgatgtcacgcaggctgaggacggcacatggtggattcacatccacaggcaaaagacggatatgctttcgtctgtccgcctgttggatattccccttcaaatcatcgagaaatatcgtagccaaagaaccggggacaaggtattcaatgtttacaatcgtggatattttataacattgacacgagagctgggacaggtatatggctttgatttgacctaccatcaggccaggcataatttcgggacccacatcaccctctcgctcggtgtgccgatagagacggtcagccgcatgatgggacacaactccatttccaccacccagctgtatgcccaagtaacggacaccaaagtggacgaggatatgaaacggctaaagtccacaggtttcgggaaacagatacagctttgcgaagaagatttcatcgtcaagaaaaaacggggaagaaagtctgaaatggcataaaataaaaacggagaaatgccctttgtaaaaaggaaatcatttctccgtctcttttagtgaacgatgctatacccatcgttgttcttcccggcaacgcttgtaggaatcctccagtatcttcagaatatccgattccttatacagagtcttgccctgcaccatgtaataaggaaccaccccgaatgtccggtactcctgcaatgtgcgcctgcttacccgcaggactttggagagttcctcgtcagtgaggaagcgctcaccgttaaagagggatttcggcatcttctcaatcacggagagcatcttctccattttttccagcccttgaaacatcacgtcgatccgagggtctttgtcgtccaagaaatgatagctcataatctgctttttattaaagggtgataattcaaatccaacaatctctgtacgtcttcaggcttgtagaacagcttgttcttgatacggctgaaaggcaatatccctttgttgcgatatacctgtagtgtcttcttgttgatgcgaagcacatcgcacacctcctgattatccagccagtttttcaagccgaggtcctcggccggacggcatacccgcgtcatccgttcctcaaaatcacagaaccggacacgcaattcttcaaaagtctgtttgtcaacacatattatttccataatccttgcttcattttaattaaacatttggctgatgtctgaacctcgccggcaatgacttgcccttttggttgaggaacgcctccacttcggatgccttgtagtaggttctcccgtcaatcatgtaataggtcacgagcttcttctggcggtaacgcgccagcgtgcgtttggtgatgccgagcagccggcacaggtcgtagttgtccaagagcgtgtcgccgtccaggcattccttcagcttgttcatacgctccaatgcccgctctatcctgtcgaaccgttccatgatttgggcgaacatctcgctgtttatctgtaacatgagtaatctgttttaagtgtaacttatcgtttgcttacaccttgttgcgcaacaggttatatcatattataaggccaacagcgtaccaatgacaccgatagacaccaagaggaactgatataacattgtatatcagtgaaataaaaatctgaggctgtaaaaatgaataaatggcgaatcttgcaaattgcaagatttccttgcaggatgcaatggactatcgcgaggatttgcgataaatgagacggacaatcccgtttttgaaagcaactgtcctgtaaagtttccaacgattgaccggaagtcgatgcaggcagtccgtaccgttgcctgttgtcagaggaagaatgtagatgatgatttcgtcaatgaggtggtagatggaaagcccgtgtagcaagtcaaggctctttgggtcggatatttctgaggtaaaggtaaaggagtccggtttctcgtccttttcacaaatcaagtccagcatgggatagccgggaaacagcgtgaaggtactcctctcgtgccagaacgggaaaccttggctgtccgtcttcacccattgcaacaactcttcattcgggtcgggaagataaccgtccaatgtcactgccgttatgatttgtattcttgccatacctgtccgtctaaaaaaagaagcgtggtagccacgcactcagacagaggctctggtaaagcctaaaggagaacacgcaacaccacgctatgacagagcatagcataagcattacgcaatcattctcctttaacgtcaatttaccagatttctgtccgagaagcttgcgctcttatgttatataatcagcagaggggttttccctccaccggttttcttctatgtttcagaccggcaaggctataccctgccaaatcttttgcaaatttacaaaatttcagtcggattgaaaaatcatttcaatatattctgtgtcaacactgttgccggaaatagatagaatatcggggattatcttatcccgtatttcttcatcttccggtacagtgttgaagagtttacattcaacaatcgtgcggtctgttcacgatgcccgttgcacgcttgaagggcatttgcaatggcttccctctcgctgttttcgtctttcaaaggcaatatgtccggagttttctccgtaatccgaatatcagtctgactgtctgcgttcaagtccggcaactccaatacaggggtttccgtaagcaacaccgcccgtttgatccggttctgcaattccctgacattgcccggccaacgataagaacgaagtcggtatatggcatcttttgaaaagccttttgtctctttcttaagttctttggaaaaccgttcacggaaaaattccgccaaaggcaaaatgtcatcagcacactcggccaaagatggcatcctgatttccatctctgccagacggtggtacaggtcttcccggaatcgtccttccttgatggcccgttccagattttcattcgttgccgccacaatccgcacgtctgccatccgctccctgtcgctgccgataggggtataggtattctcctgcaacactctaaggagcatggactgtatgtcaataggcatcgtgccgatttcatccaggaagagcgtaccgccttttgccatgtcgaaatatccgttctttgccgtatccgcaccggtgaaggcgcctttctcgtgtccgaacaggagggatgccgcaagttcgcgtggcaacgctccgcaattgaccgctacaaacttgccgtcacgtccgctgttcgcgtgaatgccctgtgccacggactccttgccggtaccgttggcaccgagtatcagcaccgacatatccgacggggctactatcctcgcgtatctctccacctcaagtattttagggcaggtacgtctgaacaggtctttcggtttcgtgcggacagtcgcgagcggacggaatatctcttccgccagttcaagcaggtgttcccggtgtaccggcttgggcagatagtcttttgcccccaacttgatggcgcgtaccgcatccggtatagacccgtattccgttgtcactatgaatggaatgtctttcttctcttttgtgagccactctaaaagcgatattccgtcaccttcaggcaagcgcacatcggacaatatgaagtcgaaccgatgcttgcgtatcaatgcacgtgcggccggttcatgcatggcggtcattacatcgtaccccgcctgttcaagccagtctttctggcgttgtgacaaacttatattgtcttcaactatcagtaccttctgtttcatcgctcattttctttatttccttttcagcttctgttataagtccggagatgtgtcctatcagcagcttcacctgttcattgacggtattcatatcgcatgcagaatcgtttaacgtggtgcggagttttaccagtggagcatcggcccgtaacaactccaacgagggctttatctcgtgggctatgtcatggagcttttcaatgtcccctgtctttattgccgattgcaagtctgccatattttgttcggactggataatgaaagttcttagcagttctcttttatcaagcacatctgccgtgaacgtggcaaaatccggtgtatgtgactcttccacatcgcgtgacaccacagaagagaccatatccaacagttctctcatggaaaacggcttgtggatggagtccgtgaatccgccctttatgaatgcctctttttctccttctcctcgtgcagtcatggctactatcggaattgtgtgtgaatttccgatgctggatttgcgaagcaatgccagaatttcaaaaccgttggtttccggcatctgtatgtcgcttagcagcaagtcgtaatcctgcctgcgcatctcattgaccagttctttggcattggaacaggtggtacacgatactccgttgcgttcaagcatttccttggctatttccagttgtaatgtgtcattgtctataacaagtacgcgctgtggcaatggcagacggtcttgcggaactgccgacgcttcactattgattttctcattggaaaccgctaacggcagggatacacgaaatgtgctgccatgcccgattttactttccacatcaatgctgcctcctaaaagtttgaccaatccttttgtgatgggcaagcccaacccgaaaccttcggcattcgcctcagacgacaggcgttcaaacggacggaagatacgcgaaacggtgtcttgatccataccgattcccgtatcctttatttctatataaagcattccattttcatatcggacattgaactgtatcataccggcgtttgtaa

SEQ ID NO: 1112 - DNA, 24539 bp, synthetic construct
  misc_feature 1..24539: note = Synthetic
  source 1..24539: mol_type = other DNA
aggcagaagaatacattcttaataaattgacagttgacaatggacaatggacagttgctatgcagcatgatagcgcagctaactgtcaattgtccactgtccactgtcaattaaacaagcaggtttatattctaagaccatgtatgatacatgggccggggaataaagggaacctgaatttactttataatgtggtgaagaaaggcattccatggcctttgggagcttttgagaatcgtcgttcgtttacttcgatagataatctttgctacgtagtagaagggttattgacgagggacgttccgggtggtatctatcatatgggagacgacgaagcgttgtctactaatgaattgattgctatcatgtgtgaaactatgggaaaacaaccacatatctggagggtgaatataagtttaatggaaggttgtgcaaggttgggtaccttgtttcacttacctttaaatacagaacgtcttcggaagttgacggagaattacgtagtaagtaacgtaaagataaaagcagctttggggatagataagctacctgttacagcaaaagaaggattagtaaaaacgattcgttcatttgaagaaatttaataactcatgtattatttttttatattagttctgcttttcttagcggaacttttttatttccgtattgccgataaatacaacatcatcgacaaacccaatgagcgcagttcacacacccggatcactttacggggtgggggaatcatcttctatttcggcgtattagtttattttcttacgaatcattttgaatatccctggttcatgcttgccctgactctgattacttttatcagctttatagatgatatccgctctacctctcagatattgcgattggtattccatttctctgctatggctttgatgttctatcagtggggattattctctcttccctggtggacgcttattattgctctgattgtctgtacaggtattatcaatgcttataacttcatggatggtattaatgggatcaccggaggttattcattagtcgttttaggagcattggcatatatcaatacaaaaatagtctctttcgtagaggcagattttatttatacatcgctttgtgctgtactggttttcaatttctttaatttccgaaaacgtgcgaagtgttttgccggtgatgtaggttcagtgagtgttgcatttattattttattccttattggtaagctgataatcaagacaggggattttagttggattattctgcttgtggtatatggtgtggatagtgttttgactatcattcatcgcctgatgcttcatgagaacattggtttaccacatcgaaaacacttgtatcagatcatggcaaatgaattgaagataccgcatgtagcagtttcctcaatttatatgatggtacaagcagctgttatagttggctatttggtgttcgcagagtggggatatttttatttgttgggaatagttgtgttgttgagtattatttatgtgttattcatgaaaaggtatttttgtttgtgttgaaacagattacatgtttagtctttgacacaagagatatgaaacattgaaaaacagagtctgtataggacttagtttttatatttataaatagccttcggagtaaccttgctctggaggttttcttttttatatctttccatcgcttgccgaacctccctgttgcgggaagtacgtttcgtttttttttgattctttagactattggggctaatcattctgtgttaaacgttgttctatgagcaacatctaaaccaatagtaatatgaaagatttagtagctgacatcaagtatgatgcctcaaaagtgattaatcaggccgtggggccaagtaaagaattttgcatgggatatatgaatcccggtgctggtgagggatacatctctaccatgaagctctccgtcggtacagtcgatgtgaaagacctcgatgcagtaaccgagaacattgtttcttatgaccgttgcgagaagaatgatgcttatatcggtcagatcaacatgcttactgtctcttctttttgtggactgaatggtgcggtctggggttttgatcttgctaaacatgacgacattgcaagtggagcggaaaagccgatgtacatgcaatctcaacctgatggacctgatattcctgtttacaatgttcgtccgctactcgaagctaccgagcgcttgttcggtaaagagcaacaacgccgttttccgcctatgcccggttcacacattatctgtgctaataaggatgtcactgcccgtggtccgctatgggtatggtctgccattggtatcgctattctgaaagaccgtagtaaaggttcttctcttttcattgaagatgccaatacctacggcaatgattctactacagagtctgagatgattggctatcttgaaggtactcttcgtaaagtgaccaatagtatcgctttgtgcggacaagatcagggagtggaatacgaacgtatctatgtaggttacaaatacacattcgtagaacctcatcaggtaggttgtgctcttacttgtgccccttatattaacctcgctcagaatgcaattcctgagggtatgcaagcctccgacctgcgtcaactcactatcagcgagtgggaaaagaaattgaaacttgaagagttgactatctggtaatgaagccttcccttctgattattaaccattaaaaccaaaagaattatggatgaaaaaagaggaacccgttatccggttttcggatttgtaaccggtggaaccggagcgtttaatgatggcataccgcctcagccgtacgaaacatttgcatatgaccttgctttgcatcaggctggaattgaaaacttcaatgtgataccttatacttctgtgatgcctcccgaaatgagggggaatctggtgtctatcactcctgagatgaatgataaatttccttatttacctttccgtcccgacttgaaagatcaattccatcatggggcaatactcgaagtaatcatagccggtcatggtgccaactatgccgagcataaggctattgctacaggagttggtattgtgtgggcaaagaagaatggtaaatttatcggtggctttgccgcagaatatgtacagttctacgattcaaagattgatgatgagattgccggagcggaagcccggatgtggcttaccaaatcgttgaatcatgaactttcaatgcgtggattagaacaggatggcgataaggagctgtttcacaactttattaacattccgagtgataatccgtttgcttattgccttacggctattggtttcctcaacttcggatatgcacctttagttaaataatcatggctgatggttcaaagaaattaggactgggcgggctggttgccattgtctttgggtctatgatcggtggaggtattttcaatatctcacagaacatggctcagggggcagggttaggggctactctcatctcctgggtcatctcaggggtaggagtgttgttccttgtgctcaacttcaagatactggctgatgcccgtcctgatctcaatgcaggaatttatcagtatgcgaaagaaggttttggtaactatgtaggtttcaatgtagcctggggctattggctctgtgcagcgatgggaaatgtggcttttgctgtgatgctcaatgattcgttcggagagttctttccggtattgctaaagcatggctggcagacagtcgttttcggttctttcttcatctgggcaatgtacctcattgtggcgcgtggcgtaaaagcagcggccgcaatgaataccgttgttactatcgtgaagtttgccgcattgattcttattgttgtcattctctttatcttttttaaggtaggagcgctgagttatgacttttgggggcatgtttctgatttgggttctctcggtacacaaatcaagagtacaatgcttgtaacattgtggtgtttcattggtgtagaaggtgctgttgtaatgtctgcccgcgcccggaacagtcaggatgtggggaaagccggtgtcatcggttttttgctggcattggtgctttatgcgcttatcagcattttatcctacggtatcatgaagcaacccgaactggctaagttagacgatccttcagtggcttacgtattgaaagctgcggtgggagaatgggcatacacctttgtggtccttagtgtgattgtctccgttatcggaggatggattgcatggacactgttgtgtgcacaagtaccttatacagcggcacaggtgaaaattcttccgaagtcgtttctgcgtgagaacaaacaagagacaccgattcatgcattgctcatatcgagcattatcatgcaggtgtttatgatactggtagctatggccaagtcggtttacgatgcggcaatagatattaccggcgtaatgatccttcctgcttaccttttctgcggcctttatctggtgaaggcgagctttacaaaaggggagttgaagactaccgacgcaaagaagattctgcaataccggattatcggtatcatatcttccgttttttgcctatggttattgtatgcaggcagtctgctgttattgctgattacttccattttctatctggcgggattctatttctatgtagtggctcgcaagcagaatatggaaaagggtgaaaaggtattctcccgccccgaacgctggttggctatagctattgcggtttgttctgtaatagctgtggtgctcatggctgagggaaaggcaggattatagaaagagaaaatacaggttgcgagggcacacgggtttattgatacttttgagagaggaacggagtgttcgtttcattcataagttgttcgtttgtagtttgtaagtgcttcgtaacctgtatctcttttttaattgttttttatccaccaatcgatcattttacgtgccagactgagtttacgtggcagttccggtaggttctcacgtgtgtagaaagctcctgaactcaactcttcgtcttgtaaactgatttctccgccagcataatcggcaatgaatcctaccattagtccgctgggatagggccacggctcgttaccaaaataagtgatgtttttaatatcaagtcctgtttcctcttttacttcgcgcattacacattcttccagtgtttctccggtttccagaaaccctgctaccaggctatagaaagttcctttaaaatttcgtgcatgtaccaatagtaacgaatcttctttacgtaccaacaccagtatggctgccgaaatagaaggatacatttcgtttccgcatgccggacatttcttcatgatagtatctttcatttccgtttttgtgccacataccgggcagaaacggctatgctgatcccaatgtagtatttcgaaagcttttcctgctgtatggtattgtttcaacgggataaaatcataagaagcacgtagcccggtcatacaatattcgtcggattcttctatgggatggctgactacgaaggccttgcagggctgtccctccagaatacatatttcgtgtacatgggtatctgccgggataggtagaggaggttgttcgttacaagggattgtcaacttattattctgctttttaagtagtagctggtctttgtagaatacaatccaccaggtagtagttaatttgctcatttctttaataacttttttatatccgattcattgatccattgctgttttgacgggcgtccgtatccaatagtagttcccgtttccggcattctcacctgtctcatttgtgccttttcgcaggctgtttgcatggcttgcatgggatctttccggcggggtttgatactggaatattctttgggaaaatcgagtcccaattcttccattaataattttaactgccggcgtggttctttagcattcgggtgttctttgatgaggtacatcagcttccgacgcttgtcaaaaggttcctgatattcccgcagcatttctttgtttacaaaagtgatgtaagtgaccgttccgtttccggcgtggtctattacacttagtccttcgttgtgtgccaggtattttgtattgcgatgcccacacatgacggtatctttcagaagagacaggtagatgaatctgattatgtcatgtttgtcattataccggatacctttgggcttcagataccggctgttgagcctcttcatatagtggggcgtcacccggctacacctgtattcgtcgatgaggtagatgcctttttcaccatattcgttggtatagaaggtataaaaggcataatgaatgacctttggatcttcaagcatgatcataatgttccatactattcctgtgcggggagaggtgacactcacatgactctctaccggaaacgacagggaatacttcattccccgtccggttcttgccagtagtccgatatattcttcggataaaaaatcccactctttattcagttctccttctatctgtataggtagtagcttgttacttagttctttcattctctttatgctctcatcaggaacacctctgatttaatagagttacaaagatatgcattttaaaggatgattttcctttccactcctatttcatttataaaatatttatcatgtgatactaccagcactgttcctgtataatctctgatggtcgatgtgatgatttctatactttgaatatccaggttgttggtcggttcatccagaataaacatatcgggcgtattattactgatcatcagacaacagaaggcaagccgcatcttttctccgccactgagtttcttacagggtttatcccatactgtggaggggaacagatagcgattgagtctgattttcacctcatgttcgggcaggttgcgaatgttgaaagcctccgcttgctgaagaacactccgttcattctgaatgatagagtactcctgattgaggtagacatatttgaaatcggcacggagtaatgttccttccttgggcgtgatatttccggtgatgagtttgagcaaagtggttttaccgcatccatttgaaccttcaatgcaaagacggtcaccacttttcaattgaaagctgagtggatctttccataacagctcgtctttatagccaaaattaatatcggttgccgtaatcagaatctttccgatacgtaatcctgaagtatcaaaatcggtttttaatactgccgcatcagaaagggaacttctgatttgagtcatctcatcggttaacttttccgctttctcagcatgtatatcattaagtttggtagtactcttttctgctctgtctttcaatgtattcatcataatgcgtggaatacctttcctggcacttgctttctcgccgcgtacattctgtttttcttttcgttcggtcacttcacgggctatcttccgggctaaacgaagttctttttctttttcttcgagttgttgttgcagggcatttagcatgatacctttttgttctttatgcgaatcagcagttgataatcatctacctttttcgcttgttaaaatgttattattcagttaattatctcattaattagttttctaatctccttgaaaatcagtatattagaagaataaaaccactcattgttctaattatgattcccaaggagaaagaattaaaacttataaaaatatatatgtatatctgcgatgtttacgagtcttcactcaagttctactgccagaggttcagtaataacaatcatccaatctttaccgatcaggaactgcttactgtatatctgttctgcggagcttatcagcaatactttaaaatcaaagacatacatacctttaccaaagaatacctgctttcatggttccctgacttgccttcttaccaaacattcaattatagattgaatttgatgccggaagcaatcagcgaactcgtcaggcagttaatccattcattcaaacctcaagattgtgacagtatgaaatcattagttgactcgatgcctatcattacttgcgcaggaaagaacaaagtaggaaaggtcgccactgagattacttccaaaggatattgttcgacaaagaacatgtattatttcggactaaaactccatgcagtggctttccgtagaaaaggaactataccttttcctgaaatgctcatactttccgctgctgatgaaaatgactccactgtattcaaaagagaatgtgtgggaaatctgaacaatagagaaatatatgccgataaaatatattcggatatgccattctataaagagacgaaagaatccaaaaaactcgagctatttactcctgtaaaagctatcaaaggagaatcacctgaaataacaaaaagggagaaagcggcaagagacttgttttcaacggcagtctcaaaagtcagacaacccattgaatcattattcaactggttgaatgaaaaaacaaatattcaaagagcgatgaaagtcagatctacatctggacttctgatacatacgatgggaaaaattgccatcgcattaattactctaatttttaactaaggaatcaaatactgattcgtattctttataaaactcatagttgcctccataagtagtaatgttgtttggggttagttcacaggtagtattcagcagattgagcagtgtccggtcatggctgacaacaataagtgtggaagctgctttctttatgaaatcataaagccgttttctcccttgaatatccagatggttggtcggctcatccagcagaattacggagggagaatgtatttccataccagccaggaatacccgggttttctctccgccactgagttggcacagggggagtgaggctgttttatctcctaatccccaggactctaaagcagattgtattctttcttcaatattccaatcttcatcaagagtattaaagttttctacagacacatcaccgttcagtatggcgtgtagcgcttctatttttttgtctactcgtaaggcttgtgcaatggtctgtccgtcatattgtccgaaatgttggggaatataatagatatcgtccggccggaccaccgttcctgatgaaggcggcagccatccggctataatctgtagcagggttgatttgcccgaaccattatttccgattaatgcaatcttttgccccttgtttacagagagggtaaggtctttaaacagaatttctttatctgcatgtatatacgtgatttgttgaatggatatactcatactaactactgggtttgaatgttaaatacttgggataattaaaaaaaaggaggggagggacaaacacaataatggctaaacatacacgtttgtgatgcttagcgtcaatagaaagatagcatataaaaagtgatgtttaccgaaatgtgttgtcttacttagatattctcatcggggtagtttaaattgattcggcgacaaagatagaataaaaattggaatagacaaaataaaggttcatttgataaatgtgtagttgtcaaaaaagcaattataaaaatcctttaagagagaatataaggtagaatataaatactcactctgatgtaatctgctgattgataatgaatataaaacttctgtttaaagataggcaagagtgtacaattatgcgagtgttaattgtacatctttgtgatactaaaatgtacacatttgatatgctaaaatgtacattcttataaagcaaaatcaggggtgttaaaaaatgaattaacattattaacgaactacgcatttgtaggatgaatcaaaataaaagcccccgtagaaggacgagggcaacctaaatgttttcacaacggaataatccttattgtgatttgctttcaaattagtattgcaaatataaataaaaatactggataaagaaactattctatgaataataattatatatttgtgtatcttcatttttaatagaatagtatgaaaaacatattaggactggatttaggtacaaatagcatcggatgggcagtaataaactcggaagaagatggacctatagtaaaaaaaagaatagaactggccgggagtaggattattcctatggatgctgctgtattaggaaattttgatagcggagttacaaaatctcagacagcggagcggacttcttttcgaagtattcgtcggttacgtgagcgtcaattactgcgtcgtgaacggttgcataaagtattacagatattaggctttcttcccgaacattatgttaatgatatagattttgaaaatcatcccggtaaaattaagagaaatacagagccgaagttaccttggaggaaaaactctatgggacaatttgaattcatatttcaggattcgtttgaagctatgttaactgattttgccactcatcagcctgtatttgtttccgaaggtaaaaaggtgccttatgactggactctctattatcttcgcaaaaaggcattgacagaagggatatctaaagaagaacttgcatggcttattttaaattttaatcaaaagcgtggatactatcagttacgtggagaagaagaggaagagcaatccaataagcttgtggagttttatgctttgagggttgttaaggtggaggctactgatgacaagaaaggaaaagacacctggtataatgttcatttggagaacgggtggatttatcgtagaaccagtaacattcctttggactgggaagggaaagtgaaagaattcatcgtgacaacagatcttaatgaagatggaacgcccaaactggataaatatggagaggtgaaacgttctttccgcgcaccgaaagaagatgactggacgttgataaagaaaaagacggagtctgatattgcaaatagccataaaacggtgggatgttatatctatgatgccttgttacaaaatccgcatcaaaaaataaaaggtagactggtgcggacggtcgaacgtaaattttataaggaagagttgcgtttgattttagaaaagcagctatccttccatccggagttacaggaccgggatttatacagagcatgtatcgacgccttatatgtcagtaatgaggcacataagaataatatctccggtagagattttgtttatttattcatagatgatattatcttttatcaacgtcctctgaaaactaaaaagtcattgatagataattgtccttatgaggagaatcagtatatggatcgggaaacaggagaggtgaagcaagcacccattaaatgtattgcaaaatcccatcctctttttcaggagtttcgtttgtggcagtttatttctaatatacggatttatcagagagaaagggttctggatgatggtaagttggaaacggatgtggatgtgacgcctgattttcttaaaacagaagacgattatactactttatttgaatggttcaatgatcggaaagaggtagaccagaaagcttttctgaaaaatccgcaattcggtttgaaaaagacttttactgaatatcgctggaattacgtagaagataaatcatatccttgcaatgaaacaagaaatgctatattgaatggtttgcaaaaagcgggtgtttctgctgatttcttatcccgggaggtggaagaagctttgtggcatatactctattcggtagaagataaaatagagattgaaagtgctttacgaaagtttgcttctaaacatgatttggatgatcgctttgcggatgtatttaagaaactgcctcctttcaaaaaagaatatggtgcgtactctgctaaagcaataaagaagcttttgccactgatgaggatagggaagtattgggaactatcgaatattgatgataaaacgaaggaacggattgataagattattacaggtgaatgggatgagaatatccatgacagagtgagggaaaaagctataaaactgtcggatataacagattttaagggacttccgttgtggttgtcttgttatgttgtgtataacaggcattctgaagccagggctattgctaaatgggagagtcctgaggatattgactcatatctccggttgttcaggcaacattcattgcgaaaccctattgtagagcaggttattacagaaacattgcgtactgtccgtgatatttggaaacgtgtagggcagattgatgaaatacatgttgaactggggcgtgagataaagaatccggctgataagcgggcaaagatgactgctcaaatagtagaaaatgaaaacaccaatttacgtattaaagctttattagcggagtttatcaactctgagtacgaaatagagaacgtacgtccatattcatctaaccaacaggagaaattaaaaatttatgaggacactgtgttgaatggagttaaagaaataccggaagatattaatactattttgaaaaaatttagagaaagtgatttaaagaaacgcccaacaaagtcagactttttgcactataaattgtggttagagcagaaatattgttctccttatacaggtagaattattccattagggaaactttttacctccgcttatgagatagaacatatcattccccaagctcattattttgatgactcatttagtaataaggttatttgtgaagctgaagtgaatgggttgaaagataagaagcttggatatgaatttataaaacataatccaggaaaaatggtggaaataggttttggcaaaccacctgttagaatattttcagtagaagaatatgagcggtttgtgaaggagaattattctggtataaaaaataaaatgaataaattgctaatggatgatataccagagacgtttatagaacgccaactgaatgatagtcgttacattagtaaggtcgtgaaaagcttgttatcaaatattgtacgtgagaaggactcgaacggagagtatgagccggaagctatttctaagaacgtaatagtatgtacaggtagtgttacagatcggctaaagagagattggggagtaaatgatgtctggaattcgattatctatccccggtttgaacgactaaatgaattaaccggaagtcaacaattcgggtgttgggaaaataaggaaggaaagcgtgtttttcaaacggcagtacctcttgaaatgcagaaagggttcagcaaaaagcgtattgatcatcggcatcatgcaatggatgcaattgtaattgcgtgtgctacacggaatcatattaactatttgagtaatgagtctgcaagtaagaaagcaaaaatatctcgtactgatttgcaacgtttgctgtgtaccaaatgtcggactgatgataatggcaattataagtggattgtaaaaaagccctggccggcatttactcaggatatacgaaaagcattggagaatatcactgtaagttttaagcagaatttaagagtgataaataaaaccactaattattatgtacattttgatgaaagtgggaagaaagtattggagaaacagataaatggcgatagttgggctatacgtaagccgatgcataaagatacggtctttggcaaagtgaatcttcagaaggtgaaagaagtcaggcttagccttgctttggatactccgaaaatgattgttgataaaaaattaaaggaaaaagtacttcagctgtattcatataaatatgataagaaaagaatagataagtacttcaaggaaaacgcatctctttggaaggatttgaacttgtcaaaagtggctgtttattattttacgaatgattctactgaacctttagtagcggttcgcaaaccattggatacaagttttaatgcgaagaagataaaggagtctgttacggatacgggtatacaaaagatactgcttaatcatttgagtaataatcaggatgatcctaacctggcattttcgcccgatggtatagataagatgaacaagaatcttactgctttaaatgatggtaaatatcatcaacctatatataaggtgcgtgtatgtgagccacaagggaacaaatttagtgttgggacatcaggaaataagacttctaaatatgttgaagccgccaagggtacaaatttgttctttgctgtttatcaaacagaagatggcaaacggagctatgagactatcccgttgaatgttgttattgaaagagagaagttgggatggactcctgttcccgaaaataataataacggtgataagctattgttttggttgtcacctaatgacttggtttatgtgcctactgcagatgaattgaataatggtatgaggttggataatatggataagggtagaatctataagatgatttcctgttccggaccccagtgtttcttcattcctcagaatgtgtctaatgctataattcctgttattgagctgggagcaaataataaggcggagaaatcatggaataatgagatgattaaggttgtttgtgtgccgattagggttgataggttgggttgtataacacaaataaacaatcaaaaataagaaaggttattgtattatgtagttttctatttatgtacgtcattgtgccagtagcgaaaatgcggatgctcacataaaaagggttaagtcttttcttccggaacatggtcaagtaggaatattatgtataaccgataaacaatttggaaatatagaactgttttatggaaagaagatacagggagttaatactcccgggcagcagttggagctgttttaaaataaaaaaatcctatagaaatatgtgatttccttttggaaacaatctctttttattttctataattagatataactggttgataatcagatgttagttgagcgtactatttccaatggttcaaagatgttaatttgaaagccaatcacaactattatattcacgacatagtaatttgtgtttttaaacataactactattctttgaagtatagataaaagaactaaatttaataaaaggggatcgaaacttttcattcgttaataatatcttagaaactccatgcatggagtttctaagatattaagaagctatattaagggatgtatactttttctcttgtgataatgccattttctaattgagattcaattacataaaatcctgatggcagatttactgcattaatatcaaatagactaatcaggtttttatcagagtaaatcagctcatatgagaggttgtatattgcaacggatttcgtaccaatctgacgggaattctgacctgagactctacgtttaggagtaaaactgagccattcggcgtaagaaccgcacctgttgtatccggtaacaacaatgataactttgttggtatcgtaaggtagcaaatctgctatgttattattgggccatattccacatctaccttgcttcaactcccaagtataagaggtcgcaccttccattattacttcagcatacgttaattccatctccgtggcttcatcaccacctattatatcataagtttcaggaacacctgcatgagcctgctcttctaacttaacaactctattaccatagtagatagatgccacgaaaggtagtgcatatccgggagcttcaagtatacgcacttctacagaagtagtaccattaccagatataatttctttatcaaaataaaggttccaaacgatagaatcacacctatcggtaggacctgatatggaaaaagtatgagtttcacattcacatagcagatccggaactatcatagtaaatggtttactggctaaaatagcttcgtatgcagagactaagccgtagccagtttcattattccatctattgggagacgggtattgatatccagggagtttagtacaggaggaatatatagctgatgctacatccttctgagataaattcggcttaagagataatatcaaagcggctacactggctacgtgtgggcaagcagcagaagtacctccaaaggtaccatagctcccagaggggtacgttgtataagttccagcgccgggtgccatcacttttagattcgaaccatagttagaactgaaccgacggttacctgtgatttcgagattacctacagaaataacattaggcaggttacaataaggactaacggtactactgccatcattacctgttgaaaacactacaacagaaccacgtccattcctaccatttgtagtaagagtatttattgcatctgataccgaagcggctacattcgtgctactaaatgaacaacttaccacatctgctccacgccgatatgcttctccaaaaccacgagctattgtggcagagctggtacgccactttttttcatcgttttcatagtagcctattgcgatccttattggtatcaccttactttgtggagcaataccggtcattccaatattattttctaatgctgcaatgataccagcacacgcagttccatgtgaatcacctggagctgccgcaccatttataccaggaccgtcacccaaagttgcatcatagcctggtaataaattatcctttaaatccggatgggtgagttctacaccttcatctagaacagcaactttaatatcttttccttttgatagcttccatgccgctaatacatccatagtaaacccgtacggatttactatagaccattgattcgttgaataaagatcggttgttgcattagtagatgttggcccgtctataaattgtataaaattaggttctgcgtatactaagtctggtgaagagacaagcagattgacaacatctaacgtattgtccgaagttggcagctggacaatggagacatcggataactcttctatttccgatatcataaggtatggtattctcaaattatccaatactgaagatacttgttttcctggatttaccttaaccaagatttcattcgtaagaactactaactcctttcctgttggaaaacgcaaaactttatatacggactctatattaccatcgttctttaactgtgtgatttcacttggggagtcaattcgtattaattcagattgttgctcttgccgaatagttacaaccttattacttaatttcactttgcgttgatgtattggtacatcttttctaaagcagatgtaggaaagcgtatcgactgtttccaatttaatcacctttttattctttgtattgtaagacatttgtctttgtgaagacaaattcaaacaaaatagcaaagttaataatagtactgtgtgttttctcatacttttttatttaagggttattgaatgaacagtaaagagaacatcgtaacagctttggttagatcttgtatcgggttttgtttgacactcttctgcagcaaatttacctgttacaagaacttttactgttgctggtggagtgattccccaagattttatctttgctgataaaccataagtatcataaagacgaccttcgaaccaaaagttagaaaggatgttgctatttaccccctctgggtaatcataatagataatacaatcagcaggtagtggttttggttctggaccatctccagctattatgtacataggcatctcgtagtttaacagctctttaccagctggatacggatatgcttcatcatctttacatgaaactaataataaacacagaatactaagagctaagcatacataattaatttttaaattttccatattcatattttttaggttaaacattttacaaatatagcattgttcgtatcggttgatatatatttacgtatgtttagaaacacataagtactattttttttactttggcaaaaactaaacagtatcttaataaagtatcttcttaaaagttgtgctatcaatcagcgtgttgagtattttgaaactaaaaccgataatcatgatcgataactggaagagttagcaaaaaagtggatttcttaattcggacttcactaccccgatgctatatattatgaggagtatggatagcacaaatagtgcagttaacatcttgtaaatcaatgcttataaaagtacgtacttttagggtataagagtacgtatttaagtcactattaattacgtatttaactcatatttaaatacgtacttttgcgaggtaaggattataagagcttttcgtatgccatcctaactcccctgccatatattatttccccacaatatacaaagccaagccgttctaacatcttatgcatgtagaaattatcaaaattggtatctaccttgaaactatggattcctttcccgcgactaaattcttctactttttgcatgaacagagtagctatgcccttttgcttcatttcatcggctacagccaggcgatgaactactacataaggctgttcacttaaccatttaccttcgatggcttcataggccggttcgccatcaaaagagactgtaccataggctattatgacaccctcgttacataatacgcaggcataaccgttccgaatgtcactggttatattttcgggtaggggataggtctcgtcccattgttgcttttgttgccgaagcatttgttctttggcttgcaggatgatttcccatattctggctgcatcatcggtggtggcttttcgaaaagtaaatggcataatctttgattgataagtttgattttctttcattttgagttttactctttatgggcaatgttgttacaaaagtaagaaaaatatagataaaaatcagaactatctatttcaatcaaatgtgaataactggtttaatacttcactcatacttgggtgtgtgaaaataaagtcccgtaagaagctgtaatgctgtccggttttcattgctatattgacaatgtttataatttctgatgcttcggcacagaacagggtacatcccatgattcttccggtatgtgtatcaatgatagccttcagcatgccgtctgtttgttgcaaagtacgggcacgtgctacagctgtggccggtaaacgggatactttgaaagaatatcctctcttgattgcttcatcttccgtcaaaccgacatgggcaagtggcgggtcaataaatacggagtaagctatcggatcacggtcttcggtggtgcgctctttatcaccaaacagtttattgcggataattctgaaatcatccagagatacataagtaaactgcggtcctccctttacatcgcccattgcccagatgtgtggagtagtggtgtgcaggtgtacatccgtaataatagcaccgtgtgcatctacttttatgcctgctgcttgtaagttcaggccctctatcattggttttcggcctgtagccagtaggatagcatcgccttcaacaaagcaagggatgtcatcagcggtgtttgtatatgtcagagtcaccccatctgctgtatcatgtatggactgtgcacgggcattcagacgaatttctattcccttcttttcaagtaccttacgtacactgtctgctatatcacggtcttcacgcggaatgaacgcacttcctccttcaagtatggttaccttacttccgaattctgcatacatggaagcaaattccagtccgatgtatccgccgcctacaataataaggtggcgtgggagtatgtccagatccagcagattggtactggtgtacacgtgcttactttctttaactccatcgatggcagggataatacttgtagctccggtgttaataaaaatttctttaccctgaagttctatctcttcgtcgggaagaacaactttcaccgtgttgggtgaagtgaatgaagccattcccgtatagatcgtaacattgggccgaccatccagatcgctgaagttcttttctcggagaaaagaggtcagttcatttttacgggcaatagcctgtttataaaagtcactttgttgcttatagtcttccttgtacatcagtccggatatcccggcctcatgtaccaatgctttggtagggatacaggctatgttgatacatgtacctccatacattttatcagaccgttcgatgagggcgactttccagccacgattggataattcggcagccaatgtttttccacctttgccgaaacctatgataatagcatcatattgtttcatatctatattcttttaaagggttattctgtaggtttataacatccgaagcgggagatttgtttcagttaccgggtagtagctgtcaaagatttcaatacccgttgcgaggagtcggaaagtaatactactgcgcctgccaggattacgatgtctttaataaccagtcttccggcacccgagagcaaggggaacccatattcgccacttcccaagttgggtacccatacttcgggggtagtgacaagaaaagataatgtgccgagtgtcatgataatggcgagtgcatctcctataataccaactttaggaaagaagataccgagaaaaaccaggataccgatactcataatgagcgcacccagtccgtaagagaatgtgtatgtattattggcttcgtgccattcgcggttttcgggtacatatgcaccttcggcgtttttatgttccttgtattccggagctcccttagcgtagaagaaactcataaacggactgtttgccacgaaaggtacgatgccatctgcctcgtagtgaaaatacttcaatccgccaatccagacgaatacaaccagaatggctacacggataaatttgataccgaaacttttaagaccggaggtgaaggtcagaagagtgattaatttttctttcattgctataactttttatgggtttaacttatagacgcaaaggtcggggttttcccatttgccggaaatagcaatttagctttatcgcttgtcaatttttcccttcggatgaatttcggaattgtacagtactttgtccggtcatgttcttgaagaaacggctgaaagaggactggtcttcaaatcccaacaggtcggctatttctttagaacttttattgctgtatagcaataatcgcttggcttcggcttccacacgctcatgaatgacgcgcaatggggaagggagtttgcaggctgaaaaaatatttgataatgttttaggagatttatgcagcatatcggcatagtcctgtacttgttttttctcccggtaatgtgtatctaccagaataaagaactgacgaataatttcaaaactgtattccttttcctgtgtgatgttcaggcgccggcgtgcgatacgggtagactggattatgaagcgtttgagctgaatgcggagcatctcttcctgtaaattgtccgatacgcagaattctttgctgagtgtatcggttatgtcgtttagtagttgctgttcggtgtcatccaatacgaaccggatcacatgtgaggaaccattgaagaggaaaccgctgcatgacacttcgtggtcgttgccataaatacaatagaaattactattgaacagtagcgtcaggtagtctccgtcaatggatttgaattccagatgttgcaggttggacaaagagataacttcattcggcacaagtattacctcctgatgatctatttccagcgtaatactgccatttcgtacccagataaatttataaaggctcttttccttttgcaaggctttgtctgtatggtaagaatcggtaaggacgagctttccttttagtttggtattatattgttgtatcattattctttcatggctgaggcgtcaaatgagagtggtaacagatcgcagatacttttcacctcataaatttctttctttccgtagagtagaatgcggatgggctgtttgtagcgtttctccgtttcgagtattacctggcgacaagcaccgcaagggggaatagggagatcgatgaagtccttttccgtacgggcagcgatggcaagggtcagcaccggttgatcgggatactgagagttggcatagaacaaggtagtgcgttctgcacataaaccagacggataagcggcattttcctgattggttccggttactacaattccgttggcaagcaaggcggcagctcctactgagaatttcgaatagggagcgtaactacgtgtagttgcctccattgcacttgtcatcagatcctgttccgctttattaagttcatcaaatgtgtatactttgataatgctggtaatcgtcaggtctttcatctttatcaagggtttttgttctacaattaatgttacaaagttaggaaagagattgataatcccaattatttttatgatttttgtggcatttaactcacatttggacaataatgaatcaaactcaccacagagtaccactgagtctcacagagctttctttatcagatgaaacgcggataaacgcagataaacgcagattaaaatactgttgttctttatcttatccttgtttttctttgcgaaaatctgcgttcatctgcgtttcaattaatcatctcttggtgcacctccctgtgcgggaaacacttagacttgtcgtaataacccttgcacttatgctttctgtgggtacacaggctcaacgcaaaaattcccgttatgtagattatattgataagtataaagatcttgccatagagcagatgaaagagcataagattcccgccagtattacgctggcacaaggattgcttgaaagtggtgccggaatgagtgaactggcacgtaagagtaacaatcattttggtatcaagtgcgggggaagctggaaggggcgtacggtgcggcatgatgatgatgcccgccaggagtgtttccgggcttataaaaatccaagagactcttatgaggatcattctacgtttctgactcgtggggcacgctatgcttttctgttcaagctcaatattaccgattataaaggatgggcacgcggtttgaaaaaggcagggtatgccacagatccttcctatgccaaccgtttgattactattatagaggattatgatttgtataagtacgattccaaaggtatttattcggaacgtaagttgcgtaaacatccgtggttgttgaacccgcatccggtgtatatagccaatgacattgcttatgtggttgcccgtaacggagatactttcaaagagctgggtgatgagttcgatatcagttggaagaagttggtgaagtataatgacctgcaacgcgactatactctgacgcagggtgacatcatctatctgaaagcaaagaagaagaaagctcccaaacaatataacgtgtatattgtgaaagatggtgattctatgcataccatttctcagaaatacggtatccgactgaagaatctttataagatgaaccgtaaagacggtgattatatcccggaagtgggagatcgtttacggttgagataacctgagtgtttgtaacatttcatttgctaaattcgtacagggtgttcgttttcggacacccttcttttttgtcttattccttgttttcagcactttagtactttggcacagatttagtatctccaatcgtaaatcgctaaatcgtaaatagaaataagatggacagagaaattccgaaagaagtacgtaacaaagaacgtaataaaaagattattcgctattcagccattggggttacggccgttgtggttatcagtgtacttgtttccctgatgcgtacaggggttcagaaaaaggatcttgtactttctactgttgacaaaggtacaattgaggtcagcgtcagtgcatcgggaaaggtggcaccggcttttgaagaaattataacttctcctatcaatagtcgcattgtagaggtttatcgccgggggggagacagtgtggatgtcggtactcctattttgaaactggaccttcaaagtactgagacggaatacaagaaattgctcgacgaagaacaaatgcgccgttacaaactggatcagcttcgtgtgaacaaccagaccaaactttctgacatggccatgcagataaaggtgtcggctatgaagctgaaccgtatgaaggtggaacttcgcaacgaacattacctggatagccttggtgcaggtactaccgataaagtacgccaggcggaactgagctataatgttgcccagttagagtatgaacaactcaaacaacaatataataatgagaaacaggttgctgctgccgaactacaggtacaggaacttgatttcaacattttccgtaagaaccttgctgagatgaagcgtacattggacgatgcacagattcgttctccgcgcaaggctattcttacttatattaataatcaggtgggtgcgcaggtaccgcaaggcgggcaattggccattatttccgatttgagtcacttcaaagtggaaggtgaaattgccgatacttacggtgaccgtgtggctgccggcggaaaagcaattgtgaagattggtacggaaaagctggaaggagtggttagcagtgtgacaccgctgtcaaagaacggggttatctctttctccgtacaattggtggatgataacaaccgtcgtttgcgttcaggtctgaaa

SEQ ID NO: 1113 - DNA, 24539 bp, synthetic construct
  misc_feature 1..24539: note = Synthetic
  source 1..24539: mol_type = other DNA
ctttggaaagtttattagattctgctaaaacattatctaaacgtgtttgggtcgtacgtctattttcatctaattgtagtaaattttctaatagaggttgggcgtcaatatttctcttggctaaggcaagaataatatcttctttattgtcccgaatggtctgtatttgtaacattataacattgtatttgaatgcaaatttacgttaatcttatatttataagagtaacttttaaatactaaacctgtattaaactaatttttagaattttcgaagtttgaagggtgaatccagtcatgatgttttaatcgaaaccatttttctgctgctaaatcagttgtggaatctataaaggggacatagggtttacggtttatgctaatcttagaatttattaggtatactgatacgtttctattgttttgctcgaattctttttttaaatattgggcaaactgccatgtaaaatctggataggcaaatattttacgctcctggctgccagataaataatctttaggttcaataataaattcttctttagtgttcttatcgactactttaaaggtgccttttccttgtctgctacgtagcatcatgcgccagctcatcctatggccttcttcactccataacacattatcttcaatggcatggtgtcttaaaggcaatactaattgaattatgaaataaatagttgtgcctaaaactaatgtatttttatggttgggcaacgctgtataggtagatgcgaatgcagttttagttttaaaaaatattttcctaattgattcaggttcaaaaaagaacacactaaaggcaatcgataaataagggaaaatacctatctgaaatatgattgaattaaataaatgaaagaataaggaaagaaaaaatgccgcttttctggttggtttccaaagtaatgcaggtacaatgagcaaatcaaataaaatacccacggttccaattatagtatgtacccaaggttcttgtaaaatgtcacccactagccaataattctttttaaaatgcatcataacggctatagtgctaaaatctaaccagtctccatacatttttgctatagatgcgtatacgtaaactataaataattgtagaacaactatccattttacataggcatacatggaattgctttctatcttcggattcattttaacatcgtaagatctacttttttctgcaggaaaaaagcacatgagcaatgctattaaaatgagtaagtagtaatgattgttgtaggccgttttttgcattaaataggttacggtccataaaattgtgaaggatatgatacttgccctatatttaaaccccatggcaataaaaaggccaagtaagcccattaaaacaaaatagaaatacatgccgttacctggtaagggttgtagaaactcaaaatctataaaaggaaaagtatattttggtgtaattaaatttcgctttatccaaccagtcgcaatagcaccaaaacattcaagagaaacgagaataccaaaaaatatacgaaaggcaattaaggggctattatctatacgttgaaataataacctattgagcatattttaccggttaatgtattgtagtgatttttctttgtcttttactaattgtgctttaagcgcatcaatagattcaaatttatgttcatctcgcaaacgggctaaaatattaatttgaatttttaagttgtacagatctgcatcaaaatcgaaaaaattgatttctatagatttttccgtaccattaacagttggattataccctatgttcatcatgccataaacaattttaccatttagaagactgtttacaacgtaagctccattttttggtatcaatttatagtcctcagctattaaaaggtttgctgttgggtagcctaactgcctaccaatgcccttgccttttattattgtgccggtaagcatgtattcatagcctaagtagctattggctgtctcaatgtccccgtcttctagtgctttcctgatctttgttgaactgacggatacatcgtcaatttcctgagcaggtatttcatctaccgtaaaatcaaacgtatttccaaaagctcttaagtcggttatgttagcatttctgttacgaccaaacctatgatcataacctattattacttttttaatattaaaagtgtttacaagaatatctcgtacaaattccgtagccctaagtctagaaaaatctttagtaaatgggtgtattattagaatgtcgagtcctaaacgctctagaatgttaattttttcttcaattgtattcaataatttaatgttggcatctttctgcaaaaccattctcggatgcggaaaaaaagtaagaactgaagattttagatctgaacccttggcatggtttatgattttgttcagtattttgaggtgacctatatgcacaccatcaaaggtgcctatggtaatgaccgtaggatattcttctttgtatttagaaatgttgcggactgtaatcacttatgatagaaaataaaaagacttatatttgatttgtaataaaagccccttaatgattgcaaaattacgcctagttttttcattttccatattatttctttccttttacggggtagctcaatctacatattggaaaaatacggaattaaacggacgcgctaaacaattttctaagcaacggctgcaagtaaataagggtaaagcatttgttttaaaccaagaactttttatacaagcacttaccgcaaacaagaattctaatgtaatttattttccaaatgaagaggggattttaatagaatttcgggtacaggaagcaagtgtgttttcggaaaaacttgcagaaaaatacccttctataaaatcgtacaaaggtgtcgccgtacatgatcctactaagcaagttcgttttagtgtttcaaataaaggcattcaaagtatgacaagtgtggcaggggagaacggatctttgtttatgcaaaagtcagtggatgacacctatgtgttgtataggagaacagaacaagaaaaaagtgatattgattttgtttgccgaacaatgcctagtttaatggaatattcccaaaataacactgcaaagttagtagatgaccaagtattaagaacatttagggtagccatttcagcttctggggagtatacacaatttcacggtggaacggttatcgatgccctagcggctattaatgccagtttaactagaattaatgcaatttttgaacgcgacctagctataactcttgaactaatagataataccgatttagtaatttttacggacccagaaacagatccttatacaggcagtttaagtgcacaagttcaaaatacacttacaaatattatcggtgaagcaaattatgatataggccatctttttaatcaacaagataatacgctggatggtaactcaggatttattggtgccgtatgtcaagacaatagaaaggggagcggctataccaccttgtcttcacctgttggcgatgcctttgatatagatttggtagcgcatgaaatgggacatcagtttggtgctaatcactcattttcacatatttcggaaggtacaacggtgcaagtagaaccagcaagtggcactacgataatgggctatgccggtattactggcaacaataatgtggcttcaaacagtgatgattattttcattatgtaagtgtggttcaaattagagattatctgcaaactatttcatgtgggcagactcaagttttaacgaattcgccacccacattacttcctttgtcaaattatagtattcctaaggaaactccttttgtgttggttggtgaggccaatgatgttgacaccaccaatgttcttagctattcttgggaacagatcgataacggcattgttacgagatctacctttgggcctgctaatccggcaggggctaattttaggtcactgcctccaagtatttcgccacaacggtttttcccaaaacttaatcgtattttaagtgggcaattaatacaggcggcaccaagtgttgacgaagcttgggaaacgctttcaagcattggccgtgaattcaacttttctttaaccgtccgtgacaatgctttaaatggtggtcagtcaatttcagatgaattaatgatttctgtaattaatgatgccggaccatttgtggtaacttcgcagaatacagaagagacatttgaagcaggttcggtgcaaaacattacttgggatgttgcaaacaccaatgttgcgccaattaacgctgaaacggtttctatttacttttctacggatcgtggaattacttttccaacgttattagttgaaaatacggtaaatgatggaaaccaaagtgttattattcccaatttacctaccactacagggcgcataatgataaaggccgatactaatattttcttttcggtaaatagctctaattttacaataaccccttctgatattgtattaaattttaatcaggtagttttcgatgtgtgtaaaccaaatgatatctctattccttttacttatgaaaccaatataggatttaatgaagaaagtacttttagtgctatagatttaccaacggggctgacagctaacttttcaccaatatcagctgatacgaccaataccaatgtaactgtagattttgtaggtatttctaatctttccgaaggtgaatatcccatcaaaattatagctacttctgcaactgcttctaaagaagttacgctgcaattaagggtgtacgatgctatttttgaatctgttgaattaaccgctccaagtaatggaatggaaaatgtgtctaaagatgtggttttgaattggacaaacgccataggtaatacattgtacgatattgaaattgcgacagatataagctttgcaactattatagaatctgctacggtaagtaccgatttttatgcaccatccttactagaaaacaatagccaatatttttggcgtttaagacctaaaaacgattgcggtgaaggcgtttttggtactgcttttagtttttctactatacagtttaattgtgctgtaaaagaggcaacggcattgcctataacgatatcaagcagtggtacgcccgtaattagttctaagatcgtattttacgaaaatcttgcggtggcagatttaaatgttgttctggatatagaacatacctttttagccgatttagtgattaaactaacatcaccagcaggtacagcagtaacattggtttctggttcttgtggcgaggctcaaaatattttggccacttttgacgatgatagcccctcttttaattgttttaataatccaggtataagcggttcggtaaggccattaggaagtttaagtgcttttaatggagaatctatacttggcgaatggaccttggaaatacgtgataatgcgccttcggatggcggtcgtttaaatgcttttgctcttgaggtatgtgtggagggagattttagacccgatgatgataacgacggtgtttttgatgatggcgacgacctttgtcctggaactttaaatggtctcgaagttgatgcttctggctgccctgtctaccgttttcctgaagaaaactttttggtaagtttagaaagcgaaacttgtagggataataacgatggttcgttgactataataccaaaattagctcttgattatgaagtagccattacaggtaatggcattaatttatcccagaatttttcaaattcctttattttggaaaatttgagttcaggtacatatacgctatgtataactggaacagacggaaccatatcatatgtggagtattgtgtagaagttcaaataacagaaccggcaccattgagcgtttcttctaaaatagcactagatggttcgcaaattacccttgaaatggaaggctcgtcgatttataccatcgagttaaacggaatttctattcaaacagaaaaatctagtgtggtgttagatttagaaaaaggattgaatatcttaaaagtttttacgaatattccatgtcaaggaatttatgaagaggaatttggcttttttgagaagccaatagtttttccaaatcccgttaaggatatagttaaagtatacttaggaagcaaccaagaaaaagtgttggtaagggtgtttagtgttgatggacgatgggtttttgatgaatcggtactatcacaagacggcgtcgtagaaatagatttaagctcattatctaccggtgtttactacctaaagtataaaagtgtaaaaataaaaggaacctcaaaagttgttaaagaatgatgcgccttatactgtttagtgtttgtttagttatcactttttctggttgtaaaaagaaaagaacgccaatgcctcctgaagcggcgctacttatctttccagaaaaaaattctgaatgtaccactggccaaagtttaggtcaagaaaccagtcaagttgagtttcaatgggctgctgccgatcatacagaaacgtatgagttaagggttacgaatactactacaggtaccacgcaaaccataacatcaacaactacatctgcaaaattaccattggcaaaaggcgaacagttttcttggattgtccgctcaaaaaatagtcaagtagaacaaaccgtgtccagtgagatgtggagtttttataattcgggttcaagaactacgttcgccccatttcctgcaacaattataagtccggaatcatcagataatgtttttaaagacttaaataatgaagttacactttcgtggtcggcatctgatctagatgatgatatcgtaagttacgatgtatatttttccgttgaaacaccgcctgtggatttagcaggtacattacagccaacggtaacaagtatgaaagtttctgttactgccgatacggtttattattggaaaattgtagttaccgatgcagaagggaataaatcggatactggaatttataactttagggttctttaagaattgttgaattggttcattgttctggcaattcctgcaagtgcaaatgaattaatgatttctgtagatttttttaagcgttcgggcaactgatcgttttcttcatcgctccatttgcctaatacatactctacttgtcttcctttgccaaaatcggcacctacaccaaatctgtatctattatataaaatagtttgtagaaacagctctatatcttttagtccgttatgccctccattgctgcccttggtttttatgcgtatagtgccaaaaggtaaattaatatcatcagtaattacaagaatattgctttgaggtatattctctttgtccatccaatattttaaagctttaccactacgattcatatacgtagacggcttaagacatataattgttctaccctttatcttaaatgagccaatgtccccaagtttagccgtttcaaaagtaaattcatttgcttttgctacttcatctaaaattttaaatccaatattatgacgggtttctgcatattcatcaccaatattaccaaggccaacaattaaaaattttttcatgggatctttctcttcaatactgttcttctttgaaaaaatatagtttaaaaaagcgaacattttcttttgcgattaaggatgtaaaaatacaaaagcatcctgatactagtaccaggatgctttatagataatcttaaactagactgtttattcttgagcagaatcttctgaagaatcttccgcgccttcagcaccttcttctccttcttcatcctcgtcctcaatagcaactgccgtacgtgcagtcttaacttgaacaacaacagtagtgtctgggtgtagaatggtaaaatcatcgcttaacaatgtacctacagaaatgttttgaccgatttttaatttagaaatatcgacatcaaagaaatccggtagtttacttggcaatgctttaatagtaagtttacgttttctaaataataaacgtccaccattacgaacaccaggagagtttccttctaatcttaccggtatgtccatagtaataactttgttatcaaataattgataaaaatcaatgtgaatgatagcatcggttactgggtgaaactgaatatcttgcaatactgcattaattgaggttccaccatccaattcaattgcaactgtatgtgcatttggagtgtaaaccaagtctctgaacgatagttcgtctgctgaaaaatgtaatggtttatcccctccgtatactacgcaaggaacctttccagcattacgtagggctttcgttgcctttttgcccacgctttctctttgtgatcctttaattgtaattgacttcattatatatattaaaaattaatactctatttaattgtgccttccataaggcttggtcaagtctattttatctaaattgctatcataataaaacggtagcggagcgcagccaaagctacattaagaatttagaagaaatagaattgttgttatgtaccttatccattacatctgcaaataaattggcacagcttaatactcttactttatcactctttacctcaataggaattgaatctgtaattatcaattccgtaagcttagagttttcaattttctcgtatgcattacccgataataaaccatgtgttgttatagctcgtacactaatagcaccacgctccatcattaaatcggccgcttttgttaatgttcctgcagtatcgaccatgtcgtcaacaagcactacattttttccttgtacatcgccaatgagctccatatgcgaaataatattggcttttgctctttgcttataacaaactacaacatcacaatctaaagctttggaataggcatatgctcttttagaaccgcccatatctggggaagctatcgtaaggttatttaacccaagactttttaggtagggtaaaaacaaggttgatgcaaataaatgatctacaggcttttcgaaaaatccttgtatttgatctgcatgcaaatccatcgttataattctagtagcacctgctgtctctagcattttagcaactagttttgctgctataggcactctaggtttgtcttttctatcttgtcttgcccacccaaaataaggcataacggctgttatgtgacgcgcagatgctctttttgcagcatcgatcatcaataacatttccattaaattttctgggccagggtgtgtagaaccaattataaaaattcgtgttccacgaatagattcttcaaaagaaggttgaaactcaccatcactgtaacgagaaaaaattacattacccaattccattccgtaagccttagcgattttttcgcctaagattttactttgggtacaagcaaatattttcggttgtggtacttggtatggcatgtctttcttattgttttccaaagagttgcttctataatttattgaagcccttgtttttaaagaggtgcaaatttaaaaattaaatttggttgctaatgcataaatcttaatatttttagtgatggtaagaaaataattatttagttttgcagtcctatttttataggatgccatttgtaaaatggttaacacgctcgagtggcggaactggtagacgcgctggattcaaaatccagttcttcggagtgcgggttcgattcccgcctcgagtacggagtaaaaacctaacaaattgatattcaatttgttaggtttttttattttatttaatgccgatattttgccgaaaaaaatattttttaacttttcttttatcactatccatttgaaatacatttagattaattccaaaaaaaatgccccgaattggaagtcgaggcggcttaaatgttttcacaacggaataatccttattgtgaattgctttcagtatggtaaatgtaatcattaaattttaaaatggattacgggattccgtaaacacattcttacaatactttgtattttcattgcataatatataagcatgaaaaaaatacttgggttagacttaggaaccaattcaattggttgggcgttaattgaaaatagttttactgaaaaagagggtaaaataaatgatatgggtgttcgtattataccaatgagcgctgatattttagggaagttcgatgctggccaatctcattcgcaaacagctgaaagaactggatacagaggaacaagacgtttatatcaacgggacaatttacgtagagagcgtttgcatcgtgtattgcatattctaggatttttgcctaagcattatgatgaacatatagattttgaaaagcgattaggtcaatttaaagaagggaaagaaataaagctcaattatagatgcaacgtagaaaataaacatgagtttatttttatatcatcatttaacgaaatgcttacagaatttaaaaaagctcaaccggagttattttatttgaagtccaatggagaagaaactaaaataccgtatgactggacactgtattatttacgcaaaaaagcactttcacaacccttgaccaagcaagaattggcttggattattttaaatttcaatcaaaagcgtgggtattatcaattgcgtggagaagaaattgacgacgataaaaacaagcaatttgttaagcttaaagtaaaagaagttattaattctggtgaagcggtaaaaggaaagccattgtttgatgtaatttttgaaaacggttggaaatacgataaacaagtagttaaaaccgaagattggatagataggacaaaggaatttattgtaactacaaaagtgctaaagaatggcgatttaaaaagaagctacaaaaccgttgattccgaaaaagattgggctgccataaaagcgaaaaccgaacaggatattgagcgttccaataaaacggttggcgaattcatttatgaaaccctgcttgaaaatccaacacagaaaataagaggaaaacttgttaaaaccatagaacgtaaattctacaaagaggaattaaagaatattttaatcaagcaaattgagctacaacctacacttttttcagaggaattatataaggcttgtattgaagaattatacccaagaaacgaagcacaccaaaatgctataaaaaaccgtgactttatctatttgttgatggatgatattattttctatcagcgtccccttaaaagtcaaaaatctaacatttctggttgtcagttagagcaacgtgtttattataaagccaataaagattcaggtgaaaacgaagaggttaaacaggctgtaaaagctataccaaaatcacatccactatttcaggagtttagaaattggcagtggttgcaaaacctaaaaatctataataaagttgatacggaaaaaggcgaactaaccgatgttaccaagcaattattaccaagcgaagatagctgggttaatttattcaactttctacagtgtaaaaaagaactggaacaaaagcaattcattaagtattttattgataaaaaactcattaataaaactgaaaaagaccattaccgatggaattatgttgaagataaaaaatacccgtttacagaaactagagcgcaatttatttcccgcttaaccaaagtcgaaggtatcgaggaaatcaacacgtttttagataaaaaaacacagatcggcactaaagacaatagtccttttgtatctagaattgaacaattatggcacataatttattcagtttcagatattaaggaatacgaatctgctttagaaaagttcgctataaaacatcatttaaacgaagaatcttttgtagctaattttatcaaatttcctccttttaaaagcgactatggtagttattctaaaaaagcattaaataaattactaccattaatgcgaagaggtaactattggaccgaaaatgatatttcagaaaaagtaaaactacgtgtgtctgaaattatggaacgtgttaatgcgcttaacttaaaagaggattatagctctaaagaacttgccgaaactttagtaaatgttagcgatgatgatgtaaaaaagcaacttataaaaagctttgtctcgtttaaggatagaaatccactaatgggtttaaatacctttcaagctacatatttggtttacggtaggcactcagaggttggtgatatccaaaattggaaaactcccgatgatatagacacgtatcttaaaaactttaaacaacactcgcttcggaatcctattgtagaacaggtggttactgaaactttgcgggtggtacgtgatatttggaaacatcacggcaaaagccaaactaattttttcaatgagattcatgtggagttaggtcgtgaaatgaaaaacccggctgacaagcgaaagagaatttctgaaagaaataccgaaaacgagaacacaaacaatcgtattagagaaatcttaaaggacttaatgaatgatgcttcaattcagggagatgttagagactattcaccaagtcagcaaggtattttaaaaatctatgaagaaggtgtttatcaaaaccctaaagtagattattcaaaagttagtgaagatgaaatcacaaaaattagacgtagtaacaatccaacgcaaaaagaaattcaacgctatcgcctatggttagagcaaggctatatttcgccgtatacctgcaaacctattcctttatctaaattatttacgcaccattatcaaatagaacatattattccacagtcccgctattttgataattcatcaagtaataaaataatttgtgaaagcgaggttaacgaagacaaggataataaaacggcatttgaatatttaaaagataaaggcgaaaacgttatcaatgggcataaattgctaagtctggctgcatacgaagctcacgttaataaatactttaaaaacaaccgtcaaaaattgaaaaatctattaagtgaagatataccagaaggatttatcaatagacaaatgaacgatagccgctacataagtaaattggttaaaggattgttgagcaatatcgttcgtgaagaaggcgagcaagaagtaacatcaaaaaacttaattccagtaacgggttctgtaacctcaaaacttaaaaacgattggggcttaaatgacaagtggaacgagcttattttaccacgatttaagcgcttaaaccaattaacacaaaccaatgactttaccacagccaatactaatggaaacaccataccaactgtaccggatgaattgctaaaagggtttagtaaaaagcgtatagaccatcgccatcacgccttagacgctttggtagtggcttgttgcacacgaaatcacagtaattatttgagtgctttaaatactgaaaataaaaactatggtttacgtgataagttgttgattaaaaacgataatgatcattataccaaatcatttcaaatgccgtggcacggttttacaaccgaagctaaaaaccaattagaagaaacagttattagttttaagcaaaatttacgggttatcaataaagccaacaacaaattttggtcttataaagatgaaaatggcaagctaaatctagataaaaatgggaaacccattaaaaaacttcgtaaacagactaaaggcgataattgggcagttagacaaccactgcacgaagagactatttctggaattgttaatctaccttgggtaaaagcagagaaagaaaaatttacttatgctacaagaaaatcacttgacaagtcttttgacctcaaaaaaatcgagaaaattacagacacaggtattcaaaagattcttagaaattatttaatgcaagaaaagtttaaagaactcgataaaaaagataaagaggtctataatagtgaacttgcattctctcaagaaggtttagaagatttaaattcaaatattgaacagtttaatgatcagaaacctcataaaccaatttataaagtccgtctatttgaaaaaggaagtggtcgatttgcattaggatttaaaggcataaatgcaaagaaatatgctcaaggatcacccaatttatactttaacatttatagaaatgaggatgggcaatattatgaaacagtacctttaaataaagtaattattcatcaaaaaaatgctgcaaatatgcctaagaaaaatagaactccagtccctatttctaacacagcaataaatagaagtaaagaagttttagtagattataaaatgacactttcgccattagaccttgtttacattccaacagaagaagagcttaataatatcaattcattggattttaataatttaagtaaaagccaacgtaaaagattatacaatgtaaatgacttttcgggttatacgatttacttctctcccaatacattagcgaagtctatttgtccaaaagaagttgatatgaaatttgatgaaaagaaacaaaaacctacgggttcttttgattcaaaaacagcgagtttagatggtatgagtataaaggagcgatgcatcaaactcattatagacagattaggaaatatttctaaagcttagtattatgatcaaacgcacgctatttttcggaaaccctgcttatttaagtacccgaaatgagcaattggtggtcaacttcccagaagaagctaaagaagaaaaaaccattgccattgaagacataggctatttggtgttggaaaaccaacaaattacagtaaccaatggtttattaatgaaattaatacaaaataaaacggcagtgctaacttgtgaccaacaacatatgccatgtggttttttacagccattagttgggcatacggaacaaacggagcgtatgcgccaccaattaaatgctagtttacctttaaagaaacaattatggcaacagaccgtaacggctaaaatagaaaaccaagcaaaccacttattgcatagaaaaaagaatgcgttaaaattaaaacgttgggccaaagaagttaaaagtggcgataatgaaaaccatgaagcgtatgcggcagcctactattttcaaaacctatttgatattgatggttttagccgtaaccaaaaagggctagctcccaacaatttgttaaattatggctacgccatactaagggcagtaaccgccagagctttatgcagtagtggtttattaccatcacttggtatttttcatagaaacaagtataatgctttttgcttggccgatgacattatggaaccgtataggccttttgtagatgctttagtgtatgatattgtagaaactggctgccagttacaggagcttaatacccaccttaaaaaagaattattggcattacctgctattgatgtttttatagatgggaatcaaagccctttaatgaacgctatgagccggactacaaatagtttgtacgagtgttttgaagggagcaatagaaaagtattgtaccctgaattttaaaggttaaaattcgctgttaaacaacatcaaacaagatgtgttttatgagtaaaaatagatttgaacgccttaaccaataccggagcatgtgggtacttgttttttttgatttgccaacggaaaccgccactgaacgcaaacatgccgccaggtttagaaaagagttgcttaacgacggatttaccatgtttcaatttagtatttatatgcgtttttgcccaagtagggagaatgcctatgtacatataaggcgtactaaaaatgccttgccaaaaaaaggtaaagtagggattatgcaaataaccgataagcaatttggaatgatcgaattgtttcatggtcaaaaagtacagactccagagaccccaagccaacaactagagcttttttgaatttaaaaaagggaagcactgatactaagtgcaaaagaaaatccgcttattttatattcctaaataagaggttaataaacagtataccagtgttttatgaccggtatactgtgaatcatcaataaaattaaagaactgaaagcaattcacaacataagtcccgttttttcgctcatcttctggactgtgaatcatcaataaaattaaagaactgaaagcaattcacaacgctgttgttggttgtgtaactcgtacatacactgtgaatcatcaataaaattaaagaactgaaagcaattcacaacgtaggcaaggggaaggaagtagctattgaactgtgaatcatcaataaaattaaagaactgaaagcaattcacaactattgctgctgctgctttattttttggtagactgtgaatcatcaataaaattaaagaactgaaagcaattcacaactttgctgtaggtttatgacttataaatatcactgtgaatcatcaataaaattaaagaactgaaagcaattcacaactactatgtttacttttcggtttaaggttatactgtgaatcatcaataaaattaaagaactgaaagcaattcacaacatgtacgggatcgcctttttaggcgatacaactgtgaatcatcaataaaattaaagaactgaaagcaattcacaacagacttgtacacaatactcctaagaacttcactgtgaatcatcaataaaattaaagaactgaaagcaattcacaacctgtttcaataatggcggttgatttgagggactgtgaatcatcaataaaattaaagaactgaaagcaattcacaacaggtagaactgatataagatttaattacaaactgtgaatcatcaataaaattaaagaactgaaagcaattcacaacggaaatataattaattaaataaatagtaaactgtgaatcatcaataaaattaaagaactgaaagcaattcacaaccaatatttctttttataacgctttgtttaaactgtgaatcatcaataaaattaaagaactgaaagcaattcacaactattacctacaccaataatttcacgcagctactgtgaatcatcaataaaattaaagaactgaaagcaattcacaactgatacaggtgaaattataatgatggattaactgtgaatcatcaataaaattaaagaactgaaagcaattcacaacaggatggaagttcatcatagtcgataaagaactgtgaatcatcaataaaattaaagaactgaaagcaattcacaacttgcggcctacgggtaagcgaggtcgtaaaactgtgaatcatcaataaaattaaagaactgaaagcaattcacaacaagatactgaaatgattgggccaagtgcaaactgtgaatcatcaataaaattaaagaactgaaagcaattcacaacacggtaaaaggtataaagacattctgcccgactgtgaatcatcaataaaattaaagaactgaaagcaattcacaacggcgttcgtggaagaggtgaccaataattactgtgaatcatcaataaaattaaagaactgaaagcaattcacaacagttctgctttaaaagaacgggtactgcacactgtgaatcatcaataaaattaaagaactgaaagcaattcacaacggcgaatggacaaaagcttgggaagcgggtactgtgaatcatcaataaaattaaagaactgaaagcaattcacaacaatgcgcaccaacgaccgcttaaccaataaactgtgaatcatcaataaaattaaagaactgaaagcaattcacaacctatccaaagtttggtcatctatctttaagactgtgaatcatcaataaaattaaagaactgaaagcaattcacaactctactggagaagaccagaaactagcaccaactgtgaatcatcaataaaattaaagaactgaaagcaattcacaactaattctaccggtggttgagcgtagccgaactgtgaatcatcaataaaattaaagaactgaaagcaattcacaactgagtgccgtgcggcaactgtccgcattaaactgtgaatcatcaataaaattaaagaactgaaagcaattcacaactgcatagactctttggtacccgatatcagtactgtgaatcatcaataaaattaaagaactgaaagcaattcacaaccaatacgcatgggtataccgaatttctcttactgtgaatcatcaataaaattaaagaactgaaagcaattcacaactaagtgttcttcacgttctgcatcaagtacactgtgaatcatcaataaaattaaagaactgaaagcaattcacaacaatgcacgtagaagttgaatttagcagaacactgtgaatcatcaataaaattaaagaactgaaagcaattcacaacaggtagtttaacacctacttctgcaagtccactgtgaatcatcaataaaattaaagaactgaaagcaattcacaacctaacggacagtgcgggcatactacgcgttactgtgaatcatcaataaaattaaagaactgaaagcaattcacaacttcatgtcaactataacgagaactacactaactgtgaatcatcaataaaattaaagaactgaaagcaattcacaacgaagaccacctagattagaaacatggtccaactgtgaatcatcaataaaattaaagaactgaaagcaattcacaactacctgatattgctattcttatatgcttagactgtgaatcatcaataaaattaaagaactgaaagcaattcacaacactttttacaaacaggctcaaagagcgataactgtgaatcatcaataaaattaaagaactgaaagcaattcacaacgttacatgtgcatagcatatatactgctctactgtgaatcatcaataaaattaaagaactgaaagcaattcacaacccgacgctgcactggatatcaacgaggaaactgtgaatcatcaataaaattaaagaactgaaagcaattcacaactggcgaggtaaacgaacatacaggcactttactgtgaatcatcaataaaattaaagaactgaaagcaattcacaactatagttgtgtttacccttgctaaatcttcactgtgaatcatcaataaaattaaagaactgaaagcaattcacaacctgaagtagttccaatattttcagttccttactgtgaatcatcaataaaattaaagaactgaaagcaattcacaactcaaccaatcccatctgtaaagcatcctcaactgtgaatcatcaataaaattaaagaactgaaagcaattcacaacacctactatatctacaggggtctgtcttatactgtgaatcatcaataaaattaaagaactgaaagcaattcacaactatttcgcccgttgccctgtccttatacatactgtgaatcatcaataaaattaaagaactgaaagcaattcacaactactacaaattccttggttacaaacgggggactgtgaatcatcaataaaattaaagaactgaaagcaattcacaactatattgactctatagaatggtctctgcccactgtgaatcatcaataaaattaaagaactgaaagcaattcacaaccagacccaagaacggaatacgttataggtgactgtgaatcatcaataaaattaaagaactgaccgagcatagcgaccgatgaatactttttaaaaaaatagacatgcatgaataaagaaattcacaacgattctttcgagaatgatatatatcacttcactgtgaatcatcaataaaattaaaaaattgaccgagtataacaaccgatgaataccgagcctgatgtcgttattgaaactcttatggcattaaaacttggtcagtttaatagagaaatgtcttttaccactagaaaaatagaagtttttgccacaattgccccagtaatgtctagggtttctagattttcagcgccttttacaactactcttagttattaagaatttcaattcttttgttgaatttcaatatcttaacgattaaaaagattataatgtcgcatatttttttagcgattttttaaaaccacgtataacgcaacgaatgtcaattgttaatttcacatcaattgttttaaattacaatctctatgatagaaaccgaagtaactacatctaatacgatattaaaacagtcggttcatgatttaaagaccgaactaaaccagtataaagatgtttttgttgaaaatagaacccatagtgagctaaaggccatagtgagcaataaatttttaaaaatttgcaaaagctttttgtctgttggtcaaaatgaactggaactattagagcgtgaaactggtgaaattggggaattagcatatttaatgcactttagattacccaatttttttaaagatcttatgataattcatcgggatgttttattgcaattacaaataggaaaacataaaaagctggaaggtgttgccaccaagaaagctttagaattacatagtgctgcatcacaaaatacactaataaaagcggttgatttttttattcaaaaatttagagaagaagaattagctactgaacgtattagtaaaactaaaagtggggttgtcgggaaggttaggcatcatcaaaatccttggaatacctatgttgaccaatttgagatagtattagcgcaatttaatactatcaataataacgatgccatcgttaagttgtccatacgtgtttttaaagatttggtcaaccgtaccaatgaaataacggcacaatctattagcgaatctgaggaaatagttaataagcttcaatattgtatatcaaatattgaaaaaattgatagtaaggaagatatattgcgcataatacaagaattagagaaaatagaggttagcatagatgcgccacaaaattaccaagaaggttttacacaatctatagcagatatatcaaacaacctgcaacgtaccaatatacccgtagccactaatggtggttaccttcttgaacggaaagtggattttggcaggtcggccaaaaaatggatggacttcaatatcataccccaggtaattgaattatgggataataaatcggaattgtttgcatttgccaagcacagtatctttaacctaaaaggcagcctggttgttgctaaaaatgaagaatttgtttcaggttctgcaattgaaatacaatcattaaaaagtatagaagaaacgtttaaagaaaatttaaaagaacaacaaaacctcgttaccgcaatttctaaaatatttgaaactgattttttggcaacatcaatttaccgagaagaggaatttttagaggtttcattgcaaaattctttaaatcaatatactagcgaaacaaatgatcgtttcactaattggatcggtaagattagtggcttttttggcaatgtaaatatggcttacgataaagtagtttctgttaagccaaaagatttactcgaaatcagtactgattgcattgcgcacagaatgtttaaagaagaaaatgcgcaatacgatatgcttttcttaaacaaaaattttctcggagaccattttttgacaagcagaattaatgaagaagaagtttttgagaaggttctagagcagtgggataaagggtttcacaagtctgtacttgttgtaggtgataatcatagcggaaaatcaacttttataaacaaagtggttaaaaagagcttgaaaaaagaagtaattgctttagatatagacagtactattacatttcaaggaagaaagtttaataccactaaaaacctaaaagtagctttacaggaaattaaaaagtatcgatacaattctaaacctattataataattgacgatttggaattatgggtagataagagccatgcctttttagataatattagggcagttttaaaatttgccgagtcagaagctgatgatattttattggttgtttctgtatctaaattaatgcaacaacatctaaaccatagattgtcttttacgaattcattttctacactaatagatttgtccagcagtactaatgcagaaatatttaatgctgtacggttaagacatggagcatctcatagaaaattagtagatatcaacgacgaactaatttctccccttcaatttgaaaaactggtttataggttgtgtaaaagatttggcaatactataggagaagtgctacaggcttggacatatggtaccagtcttaccaatgataataaagtggtgtatagcgaaagcacacattatttcccggatttttttaccaatgaagaggttattcttcttaaatacgtgcttttgtataagataatagatgagcgaaccataaaatcatttctgggtaaacgatatgcctttgggtacgaatctggtttaaagcggttggtgaatacaaaagttttagttcgtgaccaacgtgggtttttgtcgcttaatgcggtcgtatcttatgaaattcaacaaagtttaatctatagaggaattttaaaataatggaaacaatagaatcttttaatacatgggaaggcttgttttatttaacaactggtctgtttttattgtattggcttataaaaatacttcaattggcagcagaacggtttcctcgaaaaagtttgttcacaaaaaaaggtattgacattttaaaatccgttcttctggtttttaaacccgttgcttttttgctcattattttagattttatagcaattaattatatagttcatggtctttttttaacccttattggtgtattggcctatatgcaaattcgtaattatataagcggacttttattaaatatgaacccattggtaactaaaggtgctaccataaccattgctaatttaaaaggagaaataaagcaattgttgcctcaaggtatggtaataagcacagagtctgggcaaagttttgtagagtatgggtccattgataaaactggtttttcaattacttccaaagatactggtatctatagacatacgcttactatttctgcggagttaagtaaagagcaattattagatttcctttttgcaaatcctattctaaattttcaagagccgccaactgttcgtgaaagcgagatcctaaatacatttaaattacaatacacacttgaagaaggcggtaacgatgaggattttttagcctttttagccgaacataaaatcaaaacaaccttaactcaaaacagcgaagtataatggaaatattatcatcttataaccttattatcgaggtatctgttattattattttatcatttttatttaatagaatttctagtaaaacaaatattcctgcagttttaatgttgattattttgggagttgctatgcaatacgctttaaaatatgcaaatgttggggatatagatttttttcctgtactagaagtgctaggaattgttggtttgatcatgattgtattagaggccgctttagagctagagttaaagaaagagaaactaatgccaattttaaaatcgttggttattggtttggtgggtttagttttatcggcatgggttgcagctttaatattatatcaatttatccctgaaatgaccatgcaatccgcatggttatatgctacgccgctatcaattttatcaagtgcaataattatacctagtgttacgggtttaaaagagcataaaaaggagtttcacgtgtatgaaagtaccttctcggatattttgggaattatgatgttctactttttaacaggtggtttaaacccagaagaagatgccggtgtggtcggcttttttgggaatttactattaacggtagtaattgctctggtagctagttatgcaatcatacttatttttcagaatataaaaagtcaaattaaactattcttgttaatagctgtattgttgttgttatatggtcttggcaaaaaaatgcatttatcctcacttattattattctaatatttggtttggttatcgcaaacatgaggctgttttttaaaggcaaactaacaaagtatttaaagtacaaacaagcgcatcatatttatcatgagctgcatacgattacaggggaaacggcctttgttgtgcgtacatttttctttgtaatctttggtctaagcattgccattacctccatttttaatttagatgtagctattataagttctcttattattctatccatataccttattcgttttgtcctattatttatttttgtgggcaaggatattcttccgcaactatttatagcacctaggggattaattacagtacttttattctatgctataccagctgaagctcaaatagcaacttttgaccaaggtattttgcttttcgtaattattggcaccagtttaattatgacaggtgctatgatttatgataaacgaagatctagtacagccattaatgctgcaaatagtactaaagtaggtacagcaaagtggaaagcacctgtaattggcgagcaagaaggctaatagatgatgaaaaaatcgtccgattttaatccataatggaggcgaatttatgatgtagtacaagatagcagtacgaaaaagggtaaagtgtttaaccttgcctctctgggcattattattatcagtcttattggtgttgttaggaagggtaaatgctaaatattgcca

SEQ ID NO: 1114 - DNA, 24539 bp, synthetic construct
  source 1..24539: mol_type = other DNA
  misc_feature 1..24539: note = Synthetic
tacagatttgcaatgaatataataataaaaaggattattaactagtatttccgcttatcattccttttggatatttcgtagtttagtgggaatagtgtacatttgcgggagtaaaaagtgaatggaatgatgagacgatatatcaccactttgatgttggcttgctgcatcggaggatatgggcaagaaaagaagcaagccacctttgtaccaccttttgactttcctcttacattgagcggaaacttcggagaaatccgttctaatcactttcacggcggattggattttaaaacgggaggagtaatcggtaaacctgttcgtgcattggcagaaggctatatttcacgtatccgtgtgacgaatggttcgggctatgtacttgatgtctgctatcataacggttattctactatcaatcgtcatttgaacggttttatttcccctattgccgaaagggtggaaaaactgcaatatgaaaatgaaaactgggaagtagagattatccccgaaccggatgagtatccagtaaaagcgggacaacaaatagcatggagtgggaataccggctattcattcggaccgcatcttcatttggatgtttttgaaacggagacgggagattatgtagatcccatgccttttttcaaaacgaaaataaaagatacgcgtgctccgaaagcggacggcataatgttttttcctcaacttggtaaaggagtagtggatggtaagcaagaaaataaaatgattcttccgaacaccggacgtccggtggaagcatggggtgtgataggtacaggcatcaaggcgtatgactatatggatggagtgagcaatcattacggagtgtattctgtagtgcttacagtagatgagaaagaagtattccgcagtactgtcgatcgtttctcacaagaagaaaaccggatgattaactcttggacttgcgggcaatatatgaaatccttcatcgagccgggaaatacattacgtttattaaaggcatcgaacactaatcgtggtttggtgactattgatgaagaacgcgattatcgcttcttgtatactctgaaggacgtttttggcaatacttctaaatacagtttcacggttagggggcgaaaacaaccgcttgagccattgcaacatcgcgaaaagtatttctttgcgtgggataaggtaaactatctgcaagagccgggtttgaatctggttgttcccaaaggaatgttatatgacgatgccccccttaattatcaagtaaaagctgatagcggtgctgttgcgtttacatatcagttaaatgacaaaccgattccgcttcatgcaagctgtgaattgcgtattggcttacgtagaaagcctataactgatactacaaaatattatgtagtccgtgtcaccccgagaggaggaaaatatagtgtcggtggaaagtatgaagacggatacatgaaggcatctattcgtgaattgggaacttatacggttgccattgacacaattccgcctgaaattattcctgttaataagaagcaatggggaagaaccggaaagattatctatcgtttgaaggacaaaggaacgggtattgcatcctaccgtggaacgattgacggcgaatatgcacttttcggacgaccgaatattgtgaaatcgtattgggaatgtgtacttgatccgaagcgtgtgaagaaaggtggaaaacatatcgttgaatttacggtaactgattattgcggaaatgaaaccgtatcccgtgaaagttttatctggtaaattattaaaagaaaatcatatatgaagaaaagacttattttttgtgctgctctattcctggcggcagtggcggatactttcgcctgtactaatttaattgtcggcaagaatgcatcgactgatggttcgactatcgtttcctattctgccgactcgtatggcctgtttggagaactttatcactatcctgctgctacatatcctaaaggaaccatgttgaaagtgtacgaatgggataccggtaaatatttgggagaaatcgaacaggcacgccagacttacaatgtagtgggtaatatgaatgaatatcaagttactattggtgagacaacttttggcggacgccctgaattggctgattctacaggaattatcgactatggaagtctgatttatattggtctgcaacgttcgcgtacagctcgcgaagcgattaaggtgatgactgatttggtacagcaatacggttattacagtgaaggggaatcttttaccattgccgacccgaatgaaatttggattatggaaatgattggtaaaggtcccggtatccgtggagcagtatgggtagctgtacgtgtgccggatgactgtatctcggctcacgccaaccaatcacgcattcatcagttcgatatgaacgacaaggagaattgtatatactcgccggatgtcgtatcttttgcccgtgagaaaggctatttcagtggtgtgaataaggatttcagctttgccaatgcgtatgcaccgttggatttcggagcccgtcgtttctgtgaagctcgtgtgtggagctatttcaataaatttacagataacggtaaagattatcttccttatatagaaggaaagactaataccccaatgcctctttttgtgaagccgaagcataagctttccgtgcaggatgtaaaagacatgatgcgtgaccattatgaaggtacgcctctcgatatttccaatgatttcggggcaggtctttacaagactccctatcgtctttctcctctgaatttcaaagtaggcgaccgggaatatttcaacgaacgtccgatttccactcaacaaagcggctttgtatttgtggcgcagatgcgtgccaataaacccgatccgataggtggtgtgctttggtttggagtagatgatgcgaatatggcggtgttcacacctgtttattgctgtgcaactaaagctccggtatgttacacacgtgtggacggagctgattatatcactttctcatggaattcggctttctggattttcaattgggtgtctaatatggtttatccccgttacagtttgatgattgatgatgtacgtgcaactcaaaaagaactggaaacgactttcaataatgctcaggagggcatagaagaaatggctgccagacttttggctaaagataagtctgctgcagttgaatttttgacgaattataccaatatgacggctcagagtactttcgatacttggaaacaattaggcacattcctgattgtgaagtataacgacggagtagtgaaacgagtaaaggacggtaagtttgaacgtaattctatcggacagcctgccggtgttattcgtccggggtatccgaaagaatttctggaagaatatgtgaagcagacaggaaaaagatatgaagtgccggaataatagttgttttagttgttattaaatcatatataatgtccacatcatttctgctttgcgggtgatgtggatttttattatgttgataatcagtaatgtatttgccatgtatttgtccattccaaatatttggattcttttctgctgctgcctatctttgccttattctatttcaaacaccaactactatgcgaatcatctttattatatattacttgcttatcacattactctttgtttcttgccaagagtcatcatctgttgaagtagagagggaaaagatagcctctctgttacagaagggtgacagttgccgtcaggttggtaatgaggaaaattcaatagccttctattatcgttcgttggaattagctaagcaaacgggagaacaattgttggaagcagctactagtgatcgtctcggaattgtttatttatatcgtgaactttattatgatgcactcgatttatttcggcaaagtgcgtcgatttatgcattgacgggagaaaatatccggttggcattggcattgcgtaatatagggcgtacgaacttggtgttgcatcattccgatagcatagcctgttattatgagcaggctattgaggtggcttcccgcttggaagataagaagttactgcatactatatccaaagaactggaagctatctattcaaaggcgggattttacgattattcacctcgtctgatgttgaagtgtttggatagcgtatctgatgacgatttttccaatttgcttgcaggggagtactatatcggtatgaataatgccgaagaagcgagaatttggttgaagaaagctgttcagacgagcgatatgtatatatgttcgagtgcatatcagcttttatatgaaattgagaagagaaccaatcatccggacactgccgttaagtatgccgaatattatatccagtgtaaagattcgcttgataaacagatttcggtttcttcgacgattcgtgctttaggacagaattatgaaaaagaacgtcttaaatgggagaatcagcaattgcagaatgagcaacttcgaaagcgtatgtattatttgatcattctgtcaatttcatgttgcttgctggtagtagggttggttttgtattatcgggagaagtggaagaaagagaaggtattggctggtgttatgaaacgtttacgtgacaatgagcgtcaaatagagaattacacagctgtaatagaaaagaataggcgtattatcagtgatttgaaaggaactcagcagaagaatgcgttactgttacgtgaagaaaagaacaaatctataaattatgagaatctgcaacatgagaatttgttgttgatgaaacaactgcatatattgcattccgatagggaaggattgttacagcaacttcaaatgggaaccaactcatctatttcttcacaacggattaccgctttcacacaactttggctattgaaaagtgaaccttattatggaatcatagagacacaagaagaatggaaccgattgtttgaactcattgacctgttttatgggaatatttccgccagactgaatggttgtgagttattgagagagcatgacagaagaatctgttatttgcttcatgccgggcttgacaattcagctttagggatattattcaatatagataatacttctgtgactaaatccaagcaacgtataaagaaaaaactgggattgggccctaacgatgtgctggaaacatttcttaatgagaataaaaaatagtatatagattgtttcactttaaatataaaacagccatgaaaagactattatttacctttttagctttatgccttgccgttgccggttcggctcagtcggggcagatgacttccaaactgccgactattgatatcactaaggaatatccgaaaaagaaattagtattgcaagatattgcaactgctgaatacattccgctggaaacatcggataaagtgttgctggacggagtggctactctgcattgttcatttaccgaacactatataacaacgtataatgccaatgaagggcaaatcttcgtattcgacagaaaagggaaaatatgccatacatttaatcataaaggagggagtggggaagaatacaactatcctttgcagttacgcttggacgaaaaggctaaagagttgtttctgcttgacatatctaataaaatacaggtctattcgatagagggaaaatacaagcgttctttgtctattcccaaagatgtacggattgaaattatgtacaattgtgatgagcaacatttgttgggttacgatagttatatgttggatagaaaagataaacagcccaatagtcgtccctatttactgatttcgaaaaagaacggagttgtttcccgccttccggtaactatccacaaacgtgtgggaaaacgcatttatattactcaagggggacagacggctaccgtttcaatgtctctctatccgttagcaaatagtggttcggagtttatctttgcagatttggcaggtgatactgtttattcttattgtaatcataagttgaccccgttgtttgtacgtactccgaaagcagatgcttccgagccaagactcgttatgcaatgttatgccaagattgggaactatctgttaatgtcgactgcattgaaaaagtatgaaccggggaaaacttcgtttgataccaaagaatttgtttatgatacggttgagaagaaagtatatgatttggaatttgagaatcaagactattcgcccgcccgttcaatgcgaatgggaggcgtattatcggcattacctgaaaaatgtgttttcgattcgtgggatactgaccgtttattggatatgttggagaaaggaaagttgacgggaaacttgaagaaggtggcggagaagatgacagtagatgataatcctttactcatattgtacaaattcaaatgaaacgtagatgaagattatatggttctttttctccttgtgtctgctggtaggatgtaaacgttcggatgtggcggtatcggtggaacaaacgttaccggtgatagatttgaatgctgcttatcctgaaaagaaactggatttggcagaggtggcgagtcctgaatatattcctttgtatacagtcggggcggattcattagatagatatagtctgacttcagcgagtgtttcgccccattgggtagtagcttataattggcagcagacaattatggtttttgaacgggcaaccggaaaacttcgttatcgttttaatcatcagggacagcaaaaagaacaatattattatatattctcggtgtttgtagatgaagaacgtgaagaaatatatgtagtcggttcagttttcaaaatccaggtttatagcctgtccggcaactataagcgtacgttgaatcttccctatgatatgtctttcgaacaggtgtttgattatgataaagattcattgatatttaacgacggaagggaagatgtagataatcctgtccaaaaagggacttattattatttaatgtcgaaaactgacggaggaatgcgtcctttgccttttcatgtaaagtatcgtattacgaaccgctttcgcatccgactaaggaatggagacaggcaaggggtaatttcctgtatgttttccgtaaagccattgttgaagaatggtgatgaagtgatattatccgaattttccaatgacaccgttttctcttatgggaaagaaggagcgaaacctttgttggtacgtactccggctccccgttctacttttcctttgaagttaatgtcagtttcagcttgtagcaggcgttttctgtttttggatgtgatagagaaagtgtatagacggaatatcaagaagttggacggagactcgtttgtctacgattaccgcgaaaaggagatctttactccggtgttggtcaatagtgattttatccctgaactgccggttgagatagataatatgaacggaagttttccgaaatatgccggtgcgtcttctattcattcccgggagtttatgcagtactatcggagaggaaatttacaggggcgggcatgtgaagcggcctcttgcttgacaagagatgatatttatgttttagtgctgtatcattttaactgaatagagccggtaaatgtattcttacggttattattttgaggaaaaatgtaggatttataaacttattattttacatttgtgtgctcaagaaatagatagtaataattcattaaccaataaacaataatcgaaatggaaaatcaggaacttattaaacaggtcactgaaaaagccgaaaaatggttgaccccggcatacgatgctgaaactcaggctgaagtgaagcgaatgttggaaaacgatgataaaaccgaattaatagaagcattctacaaagacctcgaatttggtaccggtggtttacgcggtatcatgggcgtaggtagcaaccgtatgaacatctatacggtaggtgccgctacacaaggtctttctaattatttgaagaagaactttaaagatctgccgcagatttctgttgtggttggtcatgactgccgtaacaacagccgtttgtttgcggagacctctgccaatattttctctgccaacggtatcaaagtatatctgttcgacgatatgcgtcctactcccgaaatgtcttttgctatccgtcacctcggttgccagagcggtatcatcctgactgcttctcacaacccgaaggaatataatggttacaaagcatactgggatgacggtgcgcaagtactggctccgcacgataaaggtatcatcgacgaagtaaacgctattgcctctgctgctgatatcaaattccaaggcaatccggatttgattcagattatcggtgaagatatagacaaagtttatctggacatggtgaagacagtttctattgatccggaagcaatcgcccgccacaaagacatgaagattgtttatactccgattcacggtacaggtatgatgttgattccgcgtgctttgaagatgtggggatttgaaaatgtgtttactgttcccgaacagatgattaaggacggtaacttcccgactgtcatctctccgaacccggaaaatgccgaagctctttctatggctgtgaatctggctaaagaaattgatgcagacctcgttatggcttccgacccggatgcagaccgtgtaggtatcgcttgtaaggatgataaaggtgaatgggtgctgattaacggtaatcagacttgtatgatgtatctttactatattctcactcaatacaaacaactaggtaagattaaaggtaatgagttctgtgtgaagacaatcgtaactacggaacttatcaagaagattgctgataagaataacattgaaatgctcgactgctacaccggattcaaatggattgcacgtgaaatccgtctgcgtgaaggtaagaagaaatacattggaggcggtgaagagagctatggtttccttgccgaagacttcgttcgtgacaaagacgcggtatcagcctgctgcttgattgcagaagttgctgcatgggcaaaagataacggtaagtcattgtatcaattgttgctggatatctacgtagaatacggattctctaaagaatttactgtgaatgtagtgaaaccgggcaagagtggtgctgaagaaatcaaagctatgatggaaaacttccgtgctaatcctccgaaagaattgggtggttcgaaagtgattctgagtaaagactataagactttgaaacaaacagacgataaaggtaatgtaactgctattgatatgccggaaccgtctaatgtcctgcaatatttcacagaagacggcagcaaagtttctgttcgtccttcaggtacagaaccgaagatcaaattctatatggaagtacaaggtgaaatgggttgccgtaactgttatgcttctgccgagtctgctgcaatggaaaagattgaagcagtgaagaagtcattgggtatctgatcctatttcttctgatagttcagaataaataataaatagcgcctccatagtcttttcgaagattgtggaggcgcttctttatatctgtcctgcatctgtttcccactattcaagccggtttagtacagttctttcatttcctttgcattctttaagtcccctttctaatcattcttccgggaatcttgttgtattggcatcatctcaatttaagcacgcaggctacggatatacacacttttgttgatgctttagagtgatacgctaagtttcattttcgtaagttgttcgtttgtagtttgtgtgtatttcgtggcctgctttttggtatccctatagtacaactttggggtcataaagatataaaaaagcccccgtaaaaggacgagggcaacctaatgttttcacaacggaataatccttattgtgatttgcttcaaattagtttagcaaagataatgaaataatttggtatatcacttttttttgtaggaaaaaagtgatatatttgatggaaattgtaaaaacacacaaatatgaaaaaaatattaggattggatttgggaaccaatagtatcggatgggctgtcgtctgtcatagcgatacggacggacaaactgaacgtaaatggattgaaatggctggtagtagaataattccgatggatgctgctattctcggtgattttgacaaagggaattccaaatctcaaacttcagagagaacaggctttcgtggaatacgtcgattgcgagaacgtgttctgttgcgtagggaaagattgcataaggtattaaaacttataggatttttgccacaacactatatcgatagtcttgattttagtaatcattcgggcaagtttcaattaggtactgaggttaaacttccttggaggaaaaatgaaataggaaaatatgaatttctttttcagaattcttttaatgaaatgctggcagattttgctaaaaaacaacctgagttagttgcaatggggcgaaaggttccttatgattggacaatttattatttgcgaaaaaaggctttgagtgagaaaattactaaagaagaactggcatggattcttttaaactttaatcaaaagcgaggatattatcaattgcgtggtgaagaggaagaagaaaaaaagaatagattggaggatttttatgcgttgaaagttgtagaagtagaacaaacagacgataagaaagggaaggatatttggtataatgttcatttagagaatgggtggatatatcgtcgaagtagtaacgttccattggattggaaagataaaattaaagaatttatcgtaacgacggaactaaatgaagatggtaccccaaaagtggacaaagatggttgtgtgaaacgttcttttcggatgcctaaagaagatgactggaagttgcttaaaaagaaaaccgaagcagatattgaaagaagccataagacaataggatgctatatttacgatactttgcttcaaagcccccagcaaaaaataaaaggaaaattagtccgaacaattgaacgtaagttttataaagacgagttgaggttaattttggataaacagcaagcttttcacccggagttgcaagatagagaattatataaagcctgtcttgatgtactttacccaatgaatgtggctcacaaaaacaatgtggctaatcggggatttgtttatttgttcatggaagatatccttttttaccagcgaccgctgaaaagtaaaaagtcactgattgataactgcccttatgaagaaaatcaatatatagatgtgactacaggtgagattaagaaggcgccaattaagtgtattgcaaaatcgcatcctctctatcaggaatttcggttgtggcaatttattgacaatatccgtatttatcaaaaagagaaaaaggtggatggcaaattattgacggatattgatgtcactacagaatatttaagttcgaaagatgattatgtagcgttgtatgaatggctttgcgttcgaaaggaaatagagcaaaagacttttcttaagtatcccgcatttggcttgaaaaaggagattgaaaattataggtggaattatatagaagggaaatcatacccttgtaatgaaacccggagtttgattttacattatttggagaaagcaggtatttcttcaacttttttatcaacaaagatcgaagaatcgctgtggcatatactatattctgtagaggataggattgaattagaaacggcattacgaacatttgcttctaaatatcagctatcatgtaactttgtggaagtatttaagaagtttccaccttttaagaaagagtatggtgcgtactctgcaaaggcaataaagaggcttttgccattgatgcgaatgggaaaatattggaaagtggatgctattgatggaaatacggcagaacgtatagagaaaatactttctggagaatgtgatgagaaaatacttaataaagtctgggagaaaactatccatttatctgaaacttctgattttcaaggattgccattgtggttggcttgctacgttgtttataacagacattcggaggtgaaagaagttgcgaaatggaaatctccggaagatattgatatttatttgaaatcatttaaacaacattccttgcgcaatcctattgttgagcaagttattactgaaacattgagagtcgttcgtgatatttggaaacgagtggagcagatagatgaaattcatgtggagttaggacgagaaatgaaaaacccgtccgagaagcgcaggcagatgactgaacggatgcttgagaacgaaaatgctaatatacgtattaaggctctgcttacagaatttatgaatcctgaatatgagatggaaaatgtcaggccttactctcctagccagcaagaaatacttcgtatttatgaagatactgttttgaatggggcaggagacatacctgaggatattgagattatattgaaaaagttcaaggagaatgacataaagaagcgtccgggaaagtccgatttcttgcgatataaattatggttggagcaacagtatcgctcaccctatacaggagaaattatacctttaggaaaactgtttactacggcttatgagatagagcacgtaatacctcaatcccggtattttgatgattccttcagtaataaagttatctgtgaatcggaagttaacaaactgaaagacaatatgcttggatatgaatttataaagaagcatgctggtgaaatagtagagctgggttttgggaaatcagtgaagattttttcagttgaagcatatgagcggtttgttggagagaattattataaagcagggagtaagaagagtaaattactgatggatgatattactgagaaatttatagagcgccaattgaatgatagtcgttatatcagtcgggttgttaaaggattgttgtcgaatgttgtgagagaggaggatgcgaatggcgaatatgaatcagaggctatttccaaaaatgtgattgtatgttctggtagtgtgacagataggcttaaaaaagattggggagtaaatgatgtttggaataacattgtgtattctcgttttgaacgtttgaatcgtttgacagaaagccagcaattcggacattgggaaaatcgggaaggaaagcgcttttttcaaaccgaactacctttggaatatcaaaaagggtttagtaagaaacgtatcgatcatcgtcatcatgcaatggatgctatcataatagcctgtgctacccgtaatcatgttaattatttaagtaatgaatcggcttctaaacatgcccggatcgctcgttatgatttgcagcgtatgttgtgtgataaatctaaggcagatagaggaggtaattataagtggattatacagaaaccttgggcgacgtttacgcaagatgtttatcgtacattacttgatataatcgtcagttttaaacaaaatctgcgggtaataaacaaaatgacaaactattatcaagcttatgatgatgctggtaaaaaggttttcaaaaagcagaagaaaggagatagttgggcaattcgtaaatcaatgcataaagacacggtgtttggtcaggtaaatttgcgaaagataaaagaagtaagactttctgttgctttggaaagtccagaaaaaatagtagataagaagattaaagagaaagtattacagttatttgcatatcaatatgataagaaaaagattgaaaaatattttaaggaaaatgcttccttgtggaaagaggtgaatcttgctaagattcccgtttattattttacagatgaatcttctgaattattggtagctgttcgcaaaaatttggatactggttttacagaaaagaaaataagagaatctgttacagatactgggatacagaaaatattattgaatcatttgagtaataaaggagataagcccgaattggcattttcgccggatggcattgatgaaatgaatcggaatttagtaatattgaatggtggaaagcctcatcaaccaatatataaagtccgcgtatgtgaacccttaggcaataaatttaaagtggggacaaatgggaataaatcggctaaatatgtagaggctgctaaaggtacgaacttgttttttgcgatttatgtaactgatgatggaaaacgtacttatgaaactattcctttgaatgtggttattgaaagagaaaaattgggttggcttccagttccggagaagaatgataaggggggaaatttattgttctggctgtctccgaatgatttggtttatttgcctacagaagaagaattgatgaatggaattatttcagatagtattgataggaataggatatataagatggtaagttgtactggtaatgagggacattttatacccgaaaatatatctaaccctattattcccacattagaattaggaagtaataataaggcacaaagggcttggactgatgagatgataaaggagacatttatacctattaaagtagatagattggggcagataactgaaataattaataaaataagatgagtaatataaagctatttcaagataggaaaattcgttctgtatgggatgaaacggaacagcagtggtatttttcggttgtagatgtagtagccgctttaactgatagtgttaatcctacagactatttgaagaaaatgagaaaaagagatgaatcattagctgcctacctggggacaaattgtccccaggtagaaatgatgacagaaagtggtaagagaagaaaagtattggctgctaacataaaagggttatttcgtattattcaatctatcccttcttccaaagctgaaccatttaaactttggctggcacaggtagggtatgatcgtatacaggaaatagaaaaccctgaattggctcaagaacgaatgaaagaactatatgaacaaaaaggctatcctaaagattggattgataagcgtctaaggggaattgctattcgacaaaatttgactgacgaatggaaggaaagaggtattactgaaaagagtgattacgcaatacttacagctgagatatctaatgcaacttttggcttaactccttctgaatataaaaagtataagggattgatgaagaagaatcagaatttgcgtgatcatatgtctgatttagaacttatttttacgatgttgggtgagcgtgtaacaactgaaatatctcaaaaggaaaaaccggatacgtttattgagaataagcaggttgcacaaagaggaggaaatgtagctggagttgctcgtgaacaagcggaaaaagaattagggagaagtattgtatctaatcagaattttttgcttgattctgaattggatacaagtgaacctcaattgcctttcgatactgatgacgaataggggatagatgcttaattagaatttactatgattaaaaagacgctttattttggaaatccagtgtatctttcattaaagaatgcacagttagtaattaaacttccggagattgtgaaaagtgagtcattgccggagacatttaaacagcaatcggaagtaactaagccaatagaagatattggaattgttgttttggatcataagcaaattactataacttcgggagtattagaagcgttattagagaataattgtgctgtaataacctgtgatagtaaaagtatgcctgtaggtttaatgcttcctttatatggaaattcaacccaaaatgaaaggtttaggatgcagttggatgcttctcttcctttaaaaaaacagctatggcagcaaacaatgaaagcaaagatagaaaatcaggcttcagtgctatatacttgtaaaaaagaggaagtaaagtgtatgaaagtttgggcgaatgatgtgaaaagtggtgatcctgataatttggaagctcgtgctgccgcttattactggaagtgtatgttttcggacattgaagggttcacacgggaaagagaagggataccacctaataatttattaaattatggctatgcaattcttcgggcaatagtagctcgtgctttggtaacgagtggacttttacctactttgggaattcatcatcataatcgttataatgcttactgcttggcggatgatataatggaaccttaccgaccatatgtagatgaacttgtgtattctattgtaaaagggtatgaaaactatgatgagttaacaaaagaattaaaaacgattttattgaatattccaacgttagaagtgataataaatggaaaaagaagtccgttgatggttgctgtagcacaaacgacagcttcactttataaatgttttactggagagcttcgtcgtattatttatcctgagaagtaatggatcgttttagtgaatatcgtattatgtggatattagtgctttttgacttgccaacagaaactaaaaaagataaaaaggcttatatcgattttagaaagaatttacagaaagatggttttactatgtttcaattttctatttatgttcgtcattgtgcaagtagtgagaatgctgaggttcatataaaaagaataaaatcatttttgccagaatatggtcaggttggaataatgtgcataactgataagcaatttgagaatattgaactcttttatgggaagaaaatattatctgttaatacaccagggcagcaattagagttattttgaataaaaaaatcccgtgaggctacgggattttttaaagaatttacagctcattttctttttctatattgtgaattaactgattgaaatacagtgcctaatggtgattgtgctgtattcaatggttcaaagatactaatttgaaagcaaatcacaaccataatttagtttttaaataagtgactcaagctgtattcaatggttcaaagatactaatttgaaagcaaatcacaacatgacaagcatggttatttttttgatgctgctgtattcaatggttcaaagatactaatttgaaagcaaatcacaacgtgttcagtcttgtactgcgtctatgtctggctgtattcaatggttcaaagatactaatttgaaagcaaatcacaacgcttcacgagcgttaaaatcattattcattgctgtattcaatggttcaaagatactaatttgaaagcaaatcacaacgagcttcacgagcgttaaaatcattattcagctgtattcaatggttcaaagatactaatttgaaagcaaatcacaacaggcggaacgcatgatgtattggcaatctgctgtattcaatggttcaaagatactaatttgaaagcaaatcacaacgtcaaaacgttagtaaaacagcccttttcagctgtattcaatggttcaaagatactaatttgaaagcaaatcacaacacacttcaaagatatggatactttccggacgctgtattcaatggttcaaagatactaatttgaaagcaaatcacaaccaacctccctacggcctttgtttagcgcttgctgtattcaatggttcaaagatactaatttgaaagcaaatcacaacattttaaagggttattaatttcttatcgacgctgtattcaatggttcaaagatactaatttgaaagcaaatcacaacaagaaacgaaccctttaaagaagaaactcagctgtattcaatggttcaaagatactaatttgaaagcaaatcacaacgttcccttgcatctcttatggcgtaatgcgctgtattcaatggttcaaagatactaatttgaaagcaaatcacaaccaaggttcgcctctcttatagaacgcgcacgctgtattcaatggttcaaagatactaatttgaaagcaaatcacaacagcgtcagcattttactcgtactcaacctgctgtattcaatggttcaaagatactaatttgaaagcaaatcacaacgtggtgctctttttggtaagaaatctacgggctgtattcaatggttcaaagatactaatttgaaagcaaatcacaacacgcgcctgctcataaacggatagatatttgctgtattcaatggttcaaagatactaatttgaaagcaaatcacaacttatcatgctgccttctccagtgagaagatgctgtattcaatggttcaaagatactaatttgaaagcaaatcacaactcagcaagcaccgttacaatattctttctgctgtattcaatggttcaaagatactaatttgaaagcaaatcacaactatctatctcttcattttttgcctcttctgctgtattcaatggttcaaagatactaatttgaaagcaaatcacaacggattgttactaccacttcccaaagccttggctgtattcaatggttcaaagatactaatttgaaagcaaatcacaacacaacatcaatattgctgcattcagactttgctgtattcaatggttcaaagatactaatttgaaagcaaatcacaaccctttgccaatcagtacatacaccaaaagagctgtattcaatggttcaaagatactaatttgaaagcaaatcacaacgcagtccactatcatatttcgaagcgtccagctgtattcaatggttcaaagatactaatttgaaagcaaatcacaacaaacctggcgcacgtaatacttatgtgtatgctgtattcaatggttcaaagatactaatttgaaagcaaatcacaacagtgcatttcctgtaaaattcttcctttctgctgtattcaatggttcaaaaataccaatttgtaatataggcatttatacagaacaaaacctaattgtcccgtataaatcccataatatgttgttctatagctcaaattattcaattcatacatttttgcattatttgctccctatccaagtccatttatgccatatcgtctccaatggtccctgtttatgtccggacagccaccatttacagaactgaacctgtaagatacaaagaacaatacctataatcaagcttagagtatatccgcagtaaggagccagataaaatccgaatgggaaatagataatggcacccagaacagattgggaaatatagtttgtcagactcatcttgccgtaaaagcggaggctggaaacagctttttgaaacttagctttctgatacagtaggatgaaggaggaaatcaatacgatagtgaacgcgaatttctgccacatatcaaaagcggtacccactgtctgttgaatcagactgttgtcactctgcatgatttgctctttcaaagagtaaagaggtgcgaagctgatagcagcaatgatgagcacttttacccaaaatttcaaatgagattcggtggtgacgaataactgtttgcgtccgatgtacaagccgaataggaaaagtccggcagtttgtaagaaacgtccggcgccgatagcccaaaacaaactggctttctgtcccaaggtgacattacctatcaggaattcccagaagtttccacctttggtataagctgctacttcagcatacatcgctccgacatttaagtcgggcagggtataggcaggattgaaaaggctcataatgtagtggaaccattcaatcggttgtagtgagaagaagatagcagtgattaaaatagctttgtcactccatttgcatacgataaacagtacgatgccgaccacaacgaacagaagcaacacatctcctgccggaaaaaaggcagcattgagagtagcaaagcctgcaagcaataccattctccataagaaacggtagccgaagtcttttcctttcaactgctggttgtgcgattggatatagaaagtgaatccgaaaagcagggcgaagattgcataagattttcctgcaaacaatgagaatgttgcattaaatactccggcatctaaaatggtaagccattcgggagaactttccggatagacggggaaaatgaaatgctccaggttatgtaccaagaggatagccattacggcaaaacctctgagagcgtctactacttcaattcgtggtgtttttgttgataattccatggggttgatttatgattgtttttttagtgaatattcgttttacccatttgttggcaggcttttcaaaataataaaaagaaagcaggctgagtataatggtgatgcagagaatgacggggacacttattgtccattgtatctgccaatgatagtgggcggacattcgcatatatgcatctatgataaacaaatgtatcaagtagaaactataactgatttctccgcctatgattaagaaccggttggatagcaatcgggatatgcctccctgttgtaaggcgaatataagaatgattagcgagacgggtaaccagtaataacaagaatagcgatagactttaggaatgtctgcggcgcagaggaagaacagtaaaaataaggcaacggctcctgcctctaataaagttccggtggaataagaaagttttttattacataatgaccggtagaactggtaaagcaggacacctacgaaaaagtcaggcaggcgggtgaatggatttacataccagtatgctttgatttgctcctcgttggtcagatacatgcctgccagcataattggaagacagatgagcagtgtgataaacaggcttcttttggtatgcaagaaaggaacaatcagaggaaagcagaaataaaacaactgttcgcatcccaaactccacgaaggactgttgaatgaaaagaagtagtcggcagaggggaagaacggttgtaggagaaaggtggaggcggcaaagtgttttatccagtctgccgtgccgctatattgaacgtatcctcctatgcatacggcaattaataatgtcagtaaatgcaagggataaatgcgggcgaggcgtgctacccaaaatgttcgtttggtagcggtcttttccaataacttctcctgatagttgtaagcaataataaaaccgctgagcacaaaaaagaaactgactccgacaaacccttctttaaagaaatgagcatcgaaacttgaatcaatgacgtagcagtgcgccccaaataccattagggcaaagaatatccgtaaagaagttaatgtgttaatcacgatacttatcagtttttttgtattcgactgcaaaagtagtgttttcttatgagataaaaattcacatagattaaaaaagaacttaggattcggaacgcagacggctaagatgttggggagtcatgccaagaaaggaagctatataccccagttgggcacggtgaatgacatcgggttgttcacgtaagagttgttcgtaacgttccttagccggaagatagagccggttgatatggtgcatatccatatatagcaggcattcctgatgaataacccgtccccagttggcaatctcgatgttggtttcataaatccgattcaaatcttcgatacgtatggcatataattcgcagtcctccaacaattctacatattcgtatcccggttcgtcgtgatacaagtctttcatggcaaaagtgatatcaccttcgcgtgaaaaccatatcgtgatttcttcgccgtcgtgtaaacaataagaccggcaaaatcctttttcgataaagtagacgtgacggtctgctacaccaccgcgtatcagtaagtgctttttaggaagttccagcttttccatgtgactgaaaagaacctccagagaactgtccgataccggataatattgccggatacctttgatgatgttttccatagccgattatttgtgagagcattccagccaccagtcgatcatctttcgtgcgaggctcagctttcggggaagttccggcaagttgtcccgtgtgtagaagtctccggaactcagttcttcctcctgcaacttgatttcccctccggcataatctgcaatgaaaccaaccattaatccgctgggataaggccatgcttgattgccgaaataggtgatgttcgtcacatccagtcccgtttcctctttcacttcacgcgctacgcactcctctaatgtctcgcccgtctccaggaatccggctacgaggctgttgaacgttcccttgaagttacgggcatggaccaggagcaatgaatcttcttttcttactaagacgagaattgcagtagaaatagaaggatatacttcccgtccgcatttcgggcaacgtttcatgatgtcctctttctgttccataggagtgccgcaggcagaacagaaacgactgttccggtcccagtgcagaatctcatgcgcttttcctgctacctgatagtgagatagcgggagataatcataagaggcacgaagtccggtcattacatactgtgccgattcttcaaaaggcgaggagagggagaaagacttacaagtctttccctctaatgttgtgatagtatgtaccgtcgttttttctttaatagtgataggcggaatttctccataaggaagagcaaatgtgccgttctctttcttctcaagtaatagctggtctttataaaagacgaaccaccatgattgcgttgttttattcattttaatctttttcttttgcttcgcgctgcgaaggtataaaaaactgtattgatatttaatactttgtctgataaaatgtcaatggattaacttaatacaatacgctgttcgataccgatttctcgaatgaaataattatcgtgcgaaatggctatgacggtacctgtatagtttctgatagtcgcagtgatgatgtcgatactctgtatatccagattgttggtcggctcgtccaaaataaacatatccggtgtgttgttgctgatcatcaggcagcagaaagcgagccgcatcttctcgccgccgcttaatttccggcaggacttgtcccattcggaagcgggaaacaggtaacggttcaggatgatctttatttcatgttccggcagattgcggttgttgaaagcgtaaacctgttcaaggacactgttccggtcgtcgatgatagaatactcctgattcagatagacataagaaaaatctgcccgtgtgagtgttcctgtctgtggctgaagttgtccggtgatgattttcaagagagtagtctttccgctgccgttggtcccttctatgtggaggcggtcgccactctttaactgaaaactgacgggagtttgccaaagcagttgttccggcaggttattttcggaaggttcgttatcgctttggctatcgctgtcgttcggagcataatgataaccgaagttgatatcctttgccgtaattaacgtttttccggtgtgcagggaagaaccgttgaaatctgttttaagcgcagccgttggagagagagaaccccggagttgattacgttcttctgtcagtttgtcggctttctcctgatgcacgctgttaagtttgccggtacttttttctgattttccctgcaatgcatttagtacaatgcgtggaacacctcttttaatattagctttctcaccgcgtacattctgtttgtctcttcgttcggctgtttcacgggctaccttgcgtgctatccgcagtgctttttctttttcttcgatacgctgttgtaaggcttcctgcatcagagttttctgttctttgtagaattcgtagtttccgccataataagtgagttgatgtttctccaattcacatatttcgggaagaagattgagcagggtacggtcatggctcacgaccaacaacgtagagtgacatttctctacccagtcatacaaacgttgtcggcccgacgaatcaagatgattggtcggttcgtccatgagtatgacagagggattatgaatatccatacctgccagaaaaacacgggtcttttctccgccgctaagcaaatgcattgggtaggacaggggaaactgccctaatccccatgagtcaagagcggcaatggaacgttcttcgatattccaatcatcgtccaactggttaaaattctccgttgaggcatctcctgccaggatagcttgcagggcttgttgcttgcggtctatccgcaaggcttgggcaatggtcagcaaatcatattgtccgaaatgttgggggatgtaataaatgtcgtccgggcggacaataacgccggaagacggcgatagttgtccggcaataatttgcagcagggtagatttcccgcagccgttattaccgactaatcccagtttctgtcctttactaatggcaaagttgaggtcactgaataatacttctttatccgggtggatatagctgatttgttgaatacttataggcatggttgtctattggggttgaagtgaaagaaatagtgaaagataatcacggggcagggggcgacaaacacaataccggctaaacaacacggattccgtgatgcttaacaacgaggaaaaagcatataagaaaagtgatgtttacttagaagtgttgtcttacttggaaattctcattgcggtaagtatatagtttaacttgggcgcaaagatagcacttttggggaagaatcctattctatttcagtagaaaagttatttcagaggctccatttactcaattcag

SEQ ID NO: 1115 - DNA, 24539 bp, synthetic construct
  misc_feature 1..24539: note = Synthetic
  source 1..24539: mol_type = other DNA
gagcaaagtattgcctttttcatccgtgtaatgcaagtctgcgccatttctatacgcaagctttgcatcaagcgcagcaatattccccgccttgatggcgttctggatttgctccaccttggtatacgcatcctgaagcacaagcaaactctgctgcgtcttggcataattcttcaaatgctcatagttttcctgaatccattcatgcggacgcgcctggacaaaaggtttcgcataataagagcatcccgattcaagcgcaagctccaacggggtacgccccatattatcggtcaaccgctcatcagcgccatgatgcaacaacgtatcaatcagctccgcagagccaatccttactgcataatgcaaaggcgcatcaccaactgagtccttgctattgacaaagactccgttattcaacaaatccgcaacgtacttggcgtcgcccacggcacaagcggagaatagcttttccattttacgcttagggtctttcggaatgtagccgttatcgtacaagacaaaataagccacagaaatcaaaagcgcagcaccaatcaacgtaaaaagcaagccccaaagtcttactcgacgggcttttaccaaagcaacctgcgaatacatcgctgtttcacgcgctctctgttgcgttgaatcgcgctcacgctgcagagttgtaatctgctgagtcaacccgacaagagtcccctccaaagtcggcacaacaacattcttgacaagccccaatgcatacgcatacgagtcaatcacataatcgctcatcacgcgatcaagcctggaattttcggcaaaaaactgtttctgcttgcgaatacagaggttcaggtcactgcgattgcttgcaaaaccgagcatagaactccccacgcccagctgctccgcaagcactattgacgaacggtattcataaaacgactcgccaagttcatcagcaagcaacccccgcaatctatgatcgcagacaatgtcgttaccataagtattgacaagctgacgcatgataatatgtaaggggcgcttattcatttactgttcgtttccttttttgttgatgatcccggcaaggctcatgtcgtccttgctgccgtgcaagctcatatcgctgaagccttcgtccatacgggcgaccgcctgctctttaccaatatctaaatacatttgcaaaagccgcatatagaaccggttcagacattcaggagctacatcgtaatcgcctacagaatcctcgattccatcgctacacgcaaataccgcaaacgggaaatgccctgtaccgtcaaatgcgtagcggaacgagtccgcgggattcttatcgcaaagcgatgtcgtgtagttcaagaaacacgttgaatcccacggcactggcggagtccagttttcataaggctcggcgctatcgttcaggcaaagcagtctgccatcgcccacgtgaatcgcaagccagccccaccgcgtctgcacataagccatcagcgttgagccataagccttcaccaagtcgtttttgcccaagagttccttctcagcatcggtcagcgggttttcttgggcgtcctgctggatggcggcaacccacttttcgcaaattcgacggcacacatcgcggattagcttttcttgcggctggatattcccaatctgttgctgatacagcattgcttgctcttcgcgaagcttcgctgtttcggatttttcctccgatttttcagtccaacaggaatcccccacatccgtgcgggctgtcaccgcccccgtccgatttccaaggaacttgcgagcatcttcggattgcatgaactgcatcagttcatcctttgcaatcccagccgcaagccttgccccaacatcactccggacgtaagacggtgaaccatgcccatcgcataccacgatcaactggatttcgccatcattatattctagcgaaaagtcctggcacgggatatttgcaggcaaatgcttcgccccgactttgctcaccgcaaacgtttcagcattttgcatacacacctcagactccctagttccagccggaccagtcattggaaccggaattggccgtacttgaacccacatcgactcctgaaagcgatgcatcgtttgcaaccgtattcgaaattgactgtgcgacaagctggttctgcgttaccattgcagcgccgacagatgcactttggcttgccaccgttgtcgcagacacgctgaccgtatgaatcatcttcttgagctgatccacattgtgaaccgtgatgaccgattccgaactgcccgtaaattcccggagcacgtcattattggcatcgtcaccgatggcgatagccaccttcacaccagccttgaaccagcgattccccttgagcttttccagcttacggacatagccatccgtcggagcgccgtccgaaaggaggacaatggcaggtgcgcggcaccccgtcttttcgcccataaaaccattagacctggaaagtttagcgtccaattctgcacaggcgctaccaaacgatgtcgtaccacttgcgctcaaatcctgccactggaacttttcggcttcaagcggctgttcgtacatccaattgacagcgctactgaactcaagcacggcaatcttgatttgcgaatcgccgcaattcttggagatgtcgcccacatcgtcaagagcgtcacgaaccgccgtattgagcgatgcaatctttgaaccggacatactgcccgacgtatccaccataaaaatcagatgcgtgacacgacgcgggatcggttccaacgcaaacgggtcttttgtagccatattctattctccttttattcaataacggcagtttcgccttgatttccaaacttgatcttgtaacctttgcgggcaggcatgccctgaccatccgcaacgactcgctgagtgccgtccaaacacgtcaccgtccaggattcgccagaattattgcaaagccccacctcattgttcttgacgacggttctgccaacgaccttgtcgtaatcggttgagcagtggactagacattcatggagcttctgctccatcatcagcggaattttaaacttacctacgcgcaacattctataatctccaaatgacttatcgcagtaagcacactttttgtcaacactatccgggtccgcaaatgaaaattttccgcatttcgggcatttgacaaaatccgcacgcacctgcagcaaaatatcgcgccattccttatccttcacgcggaggtctccgttttgcagagcctccttactgaacgtcttgcagaatgcatcgcgcaataccttcggatagatatcccaacggcgcatcacattcttatgcaggctcggatccggcgcattgctcttgtcgtttggatccataataaatacggcgttataccccaaaagttgccttgccatttccgggtcgttatcacacgggcaagagagataacgtctgccttcaaacggacggttcatataaatcaagatgaacagacaaaccgcaagcgaatggtaatccgtcactttgcgcggcctagactttccttcgacaatttcgggtgccatataccccgccttgccaagaatgccaaggtcgtcggtaccatcgggagccacgttatcgttatcgcaaatcagcacgtcacccgttttagggttaataaagaagttgccatcgttcatatcctggtagctataaccgtcgcgatgcaggtccaaaaacgatttcacaagttgcatacaggcgttcagctgggcattcacatcggcaaaacgggcagtcaccaagatgaacttgctcatgtccacatagcctgcggggcggattttcatcaaatagccaaatccaccattggggtcttcggcaacagccatcggccaaataaaatgttcgttcggcgtctggcgattcgcattgcgcttcagattttcacggaaacgctcactcaccttttgcgtgtaccattttaacgcatactcactaccattataattgacagcgtaaacgattccctgaccgccacgacccaattcacggacaacttgacaagtgtcaccgccagcgagcgcgaccacatccccttttttcaattcggacataaagcctcccaaaaattttttcttcatacttatcgacttgagggggctaaatgtcaaattaatttcaagaaataatggaacccgtcgctacgcttcaggatgacaagcgtcaggatgacgagcaatgacattataatagggggttctgaaaaaaaattttcggcaggacctccgaatgtcattatatgacagtgcaaaaaattatttttgggaacgctttcaagttcacctcatccaaggagtcgcccatgatgaacacccacaccaccgcaaacgaagtcatgaacctcattgacctcgcccagcacaccaaaaatggcaaggaaggttccgatgccatcaacaaactgtgggacatcttcggcgacaaggtcaccggaatcaccatcaagaaatctttttcgcacgattccgaccatagcatgcacggcatgtcggtctacgaacgccgtaaccagctccaggaacaggcgtttgacacattccgcaacgccgtcttgacatacgatgccagcacgaacgtgccattcatggcttacgtttcgaagaaaatcaactggcagcagcttgacttcaagcgcaagaacgcaaagcacacccataacgaaaaagccaccgacttttccatcgaaggcggctcttccatctcaatggacgatccaaaaaacgcagaaatgctggaaaccatgaaccacattgacttggaatcacccatggcaggccgttttgtcgaggattttgaaaagcagtcatacctcgatgacatggtccacgttctcttcggcaagctccagaacgaaaagaagcttcttgaattcgccaccacatactatgaagtatgccaggaagaagacaaggacaccgatgccgaagtcgccaaaaggatgggctgcacccgctcttacgcaagccagctccacaaaaagctcatcgcattcttgagcaacaccgatttcgccgacgactgccgcatggctcttgccgcataaaaaatttgataagagaggctttttatagcgtttcactataaaaagtcccttttcagagtaggtttataggatttttcatttttttttagaactcccccttgccatgtgcaattttgattgatatttttgtgtcatgatgaatttcgtaacaaatgcaactctcaaccgtcgttggtggcgcggactctaacatagagcccggtatttgttacaaatcacccaagatttttaagcaaaggcttccggactcacggaggccttcctttttaccgaaaattgacgaaatcctccgggaaataaagcctttgcgaaagcaaacgagttttaaaactagaggattaaaatgactaagattactcacatcaccgaacgcccgggttacgctccgcgtaccgacagcatttacgtcgctctccccggtgaacgttacaccccgttttcactcgccaagaagctcggcgcaaaggccatcttcgaatcggcaagctttgaccacggtcgtagccgttattcgaccttgatggtggacgaaggttttcgcctgcgccagaacgacaagaacgtaagcattgtcgtggatggcaaggaaagcgaattcttggctgagggtgatggtgacattctcgacgccttgctcaagatttcagccgaaaatactgtgccgcccaaccagattcctattccgtcttcgggcgtgggctacctcggctacgaattctgcgcccgttgcgatacgatccgccttgctccgcaggtggatgaactcaacattcccgaagctgaatttttggtcggccacatttacattgtattcgaccactttaccgaaaagctacacttgttcgccctgaactacgaagaacaccaaattgacctgaaggccgcaattgaaaaggtgaaggctcgccttgcagaccttgacttcagctacctcgctccggaaaagcagtacagcaagggcatcacgatgaccgacctcgaacagtcccgcaaggaatacgtggaaaaggtcgccgctttgcagaagcacatcgtggcaggcaacattgttcaggctgtgccatctcgccgcatccagttcgcaagcgatatcgaagccctcgacatttaccgccgcctccgtacggtgaacccgtctccgtacatgttcttcttggattacggcacgcaccagttcatcggcgcatctccggaaagcttgatccgcgtgcgtgaaggcatcgccaccatccacccgattgcaggtacccgccgccgcggtaaggacgacgcagaagacgaagcattgatgaagaatttgaagggcgatccgaaggaacgcgcagaacacttgatgctcgtagacctcgcccgcaacgacctcggccgcgtttgcgatgccggtacggtcgaaaccacgaagtacatggaatgcgaaaagttcagccacgtgattcacttggtctctgacgtgcaaggccgcgtttccaagaacaagaaggccattgaagtgctgcgctccagtttcccggcaggtacggtgagcggcgctccgaaaatcagcgccattgaaattctttctggtctcgaaaaaatcaagcgtcgcttctacgctggcgccgtgggttacattgaatcggacggtgacttggatttctgtattgcaatccgttgctgcttaaagcagggcaagaccatcagcctccaggccggtggtggcattgtcgcggcatcgaacgccgaccgcgaatttgaagaaacgaatgagaaactgggtgccatccgcgccgtgctcgaaggagaaaattaagatgatcatcattattgacaactacgattcttttacttataacgtttatcaggctttggccaagattactactgaagaaattcgcgtgctccgtagccgcgaatgcaccattgcagacatcgaaaagttgaacccgagccgtctcattgtgagcccgggtccgggtcgtccagaagatgcaggtatttccgtcgaagccatcaagcactttgcaggcaagctcccgattttgggcgtgtgcctcggccaccaggctatcggttacgcctttggcgcaaagattgttcaagccaagttcatcaagcacggcatcgccgaagaaatcgacctcgacggcaagggacttttccgcaccatcggcaagaagaacatcttcacgcgttaccacagcttggtcatcgacgaatctacgctcccgggcgatttcgaagtgaccgcccgcgcaacagacggcgacatcatgggtattcgccacaagacgctcccgattgaaggcgtacagttccacccggaatccatcgctagcggccgcgccgacgaattcttcaaggctttcctcaactaccgtcgcgaaccgctcgatatccgcggaatcctgaacacgcttactgcaggcaaggatttgactcgcgaaaccgccgaaatgttcatggaagacttgacggacggtatcatggacgaacgccagatggccgcaatccttaccgcactttccagcaagggccctgttgccgatgaaatcgccggttgcgcgaaggtactcagcagcaagaagcgcaagttcccctacagcggcgacgaactcaccgatatcgtgggtaccggtggcgacggcaagggtagcttcaacgtgagctctctctccggccttatcgccgcaagctgtggcgccaagattgccaagcacggcaaccgcgcggtttcgagcaagtccggtgctgccgacttctacacggctgcaggtttcaagctcgacatgactccggaaaaggctgcaagcgtcattgacaagacgaactttgtattcctcatggctccggtctaccacagcgctatgcgttttgcaggcccggttcgtggcgcactcggcgtgaagaccatcatgaatttgctcggccccctcacgaacccggccgaagctaagtacctcatgctcggcgtttacagcaagtcgattctcgaaccgttcaccaaggctgcaaagttcctcggtgcaaagcgcgtgatggtagccatctccgatgacggctacgacgaaatttctccgtgcgtcccgacgaccattgccgaaatcttggaagacggcgagtatcgcgaataccgcattgacccgaaggaattcggcgtcccggctgtggacccggaagacctcgcaggcggtacgggcgtggacaacttcaacctcgctctcgacgtgctgaacggcaagggccgcccgggcatcaagtacgcttgcgcattgaacgccggtgcagcgctttacatcagcaacaaggctgcaagcatcaaggaaggcttcgacaaggcgattaaggctatggaagacggctctgtgctgaagaaaatcgaggaagtcaaagtcgctacaaacgcgtaatgaggtcggtcgtgctcgctccctttggggtatgagcgcaggcaacgtcctttgtgataagtgctccgagaaatcggggtgctttttttatcagattaacattgtaaaaatggttacaaactacgcttctaactgactgcgaagcacaacgatgtcttctagagaaagatccgtggttgcggcaatttcctcatcggaaagtttaccgagctctatcattttcttcgcaaattcgcgatttctatcagaaatacgttcttcaatcttcgcgttgatgtcatccgcgaattccttgaagattccccgtctcatggcgttatggtcccagaccttgtgatacatattccgataaacctcgaattctttcttgttgaagttagatactttcgcgctctctgtcaagttcttgaactttccctcgtccaattcttcggggagttccttgagccggttcaaatagcggaagaaaaagagccatttgcttaggtcgcttgatgtcttttcaatgaaaaacggaacctttgaaagttcgatagcagtaaaattgtaggtatccacaagctgttctccgctttccaaatcgattaccgtcgcacggtggacggcacgttcgtcagggaaaacagagaaacgcgtcagagcgatcacgtaggtcggctggatgtcgtaatcccaatactgacctggttcggcctggttcgctaccatttcgctcgcgtagaacgcaaggcgcttcataaagttatccacctcgcgaatttgcacttcgatctcgatgagactccccaaatcgtccttgcaatgcagatcgaaaatcgccgtgcgcgatgctttgctgccactcaagttcttcgccacgctgcgggtccatacatttttgatgggccgtttgagctgcggttccagcaggtcgttcagtaaattaatgaggttgttccggctggtgggcttatccggatcgaaggccttcttaaaggccaaatccactagcaggtttgcatacgggctcgtttcacccggcttaacgatacagtccctaaaggacttgcgtgcattcatctttcactccttccgcctacatgcttaaaaaggcggggctttagtcattttcctgtgtgcgcgaaaaaccacactctacacatttgtacactacaatataaattacggaatggcggttgtcaagaggtcttaaaagaaagaggacgatgctttcgcaccgccctaaatgttttcacaacggaataatccttattgtgaattgctttcagattatgaaaataatatagttaaaatttttgatttgtgactgattttttatgaaaaaattaaaatagccaaaaaaaaattcgcaaatgtcacaatatgacaagaagaaagtttatatttatgagtttatgttgttttacatcattctataaatttggcgtttttgttgaaattttgcggttttttgtctttttcactcaaaaaaatgttactttaatagaagaaaaataaaaaaaaggtttattcatgaaaaagattcttggtttggatttgggaaccaattcaattggttgggctgtggtgaatgcggatgaaatcactcgtgatgacggatcacgttacttaaaacctaacggtatttctgctgcgggtagtagaataatcccaatgtccgcagatattcttggcgattttgagaagggtaactcaatttcacaaactgcagaacgaactcggatgcgaatggctcgtcgtttgcacgaaagagctcttttaagacgagaaagacttctgcgtgttttaaaccttttggattttttgccgaagcattttgctgataaaattgatcgctatggtaaattcactgacgatagtgagcccaaattagcatggcgcaaaaatacagaaggtaaatacgaattcattttccaagacgcattcaatgaaatgctagccgaatttaaagacaagcaaccagaaattgtcgaagaaggaaagaaaatcccctatgattggaccatctactatcttcgtaaaaaggctcttgagaaagctctttcaaaagaagaactctcttggatactgctccagtttaaccaaaagcgcggttattatcaattaagaggcgaagaagaggaaattcctcaagataagaaaattgaatatttagcacaaaaagttgttaaggtagaagcaaccgatcagaagaaaggcgatgatgtttggtacaatgtttatcttgaaaatggaatgatctatcgacgtaccagtaaagcaccccttgattgggaaggaaaagtcaaagaatttattgtaacgacagaagtcgaaaatgacggtgaaacaccgaaaaaagataaagaagggaacatcaaacgctctttccgcgcgcccaaagaagatgactggactcttcttaaaaagaaaaccgaagccgatattgaaaatagtcataaaactgtgggctgctacatttatgattcgttactaaacaacccaaaacaaaagattattggaaaactagtcagaactgttgaaagaaagttctataaagaggaattgactcagatacttaagaaacaagttgagctcatccccgaactccgcgatgacaatctgtacaaacagtgtattgaagaactctaccccatcaacgaggctcatagaaatactattgcaaagaccgattttgcaaatcttttcattaacgacattttattctatcagcgcccattaaaaagtaaaaaatcccaaattgacaactgtccttacgaagagcgcattttcattgattcaaaaacaggcgaaaagaaaaaagttcccgtaaaatgcattgcaaaatcaaatccgttattccaggaatttagactttggcaattcattcaaaatttgagaatttaccagcgagaaaaagaaatcgatggtaaacttttaacagatattgacattacaagtgaatgcttgaaatctgaagaagattatgtaagactttttgactggctaaacgacagagaaaccatcgaacaagaagatttattaaagcatctctttaataccaaaaaatcaaaaaataaagaaaacccatatcgatggaattatgtagaagataaggtttatccttgcaacgaaactcgtgccacaattttgaaaggattttcaaaatgtggtattaatgcatcagttctttcgcctgaattggaaatggctttatggcacatactttattccgttgaagataaaaaagaaatcgaaacagccctgactcattttgcacaaaaacaaggctggaacgatgattttgcaaaagtattttccaaagcgaagcctttcaaaaaagactatggctcttattcagaaaaagcaataaagaagttgctttctcttatgcgaatgggcaaatactggaaccaagacaatattgataaaaacactcttgataggattgataaaatcatcaatggcgaatatgatgagaaaatctccaatagagtccgtgataacgcaattaacttaaaagacataagtgattttagaggcctaccggtctggcttgcctgctacatcgtgtacgacagacattccgaagccaaagattgtaccaaatggaattctcccgaggaaattgattcttatctcaagaaatttaaacaacattccttacgtaacccaatcgtagaacaggttgtcacagaaactctgagaaccgttcgagacatttggattcaggaagaacaaattgatgaaatccatcttgaacttggacgcgacttaaaaaatcctgccgataagcgcaagaaaatgtctgaaaatatcctgaagaacgaaaatacgaatttgcgcatcaaggccatgctaatggaattcatgaaccccagcatgggcattgaaaatgttcgcccgtattcaccaagccaacaggatattctgcgcatttatgaagaaaacgctcttgacaacctaactaaggatgacaaggacttcgactttatttcaaaaatttccaaacaggcacaaccatcaaaaacagatattatccgttacaaatgttggctcgaacaaaagtatcgttccccgtacacgggtaaaacaatttcgctatccaagctatttaccccggcatacgaaatcgaacatgttattcctcagtcgctttatttcgatgactctttcagtaacaaagttatttgtgaagccgaagttaataaacttaaagatcgccaattaggatataaattcattgcggaacaccatggagaaaaggttcaattaagccaaggtgaagttgtcgaaatactctccgtagatgcttatgaaaaatttgtcaaagaaaattatgcgaacaatcgcataaagatgaaaaaattattgatggaaagcatccccgacgaattcatagagcgtcagttaaacgatagccgctacatcagtaaagttgttaaaggacttttgtcaaatatcgttcgcgaaaagattgacgatgaaaactatgaaccagaagcagtgtccaaaaatcttatttcgtgcaatggcgctattacagaccgattgaagaaagattggggcatgaatgatgtttggaacagcattattttgccaagatttattcgaatgaaccaaatcacgggaaaagattgtttcacaacgactaacgcagaaggtcatcttattccacagatgcctttagagcttcaaaagggatttaataagaaaagaattgaccatcgtcaccacgcaatggacgcaatcgtcatcgcttgtacaacacgagaccatgtaaatctactgaataacgaagccgcacattcaaaattcaatgcaactaggtatcagttacaacgcaaacttcggcgttttgaaaaggctgtaattgacggtaaggaacgcgaagttgcaaaagaattcctaaagccatgggattcattctcttcagattccaagaatattcttgaaaatattatcgtaagtttcaagcaaaatcagcgcgtgataaacaaaacgacaaatgcgttcctgcattttgacgaaaacggaaagaagacttttataaagcaaggaaagggcgatagctgggcaattcgcaaatccatgcacaaagacactgtttttggggaaatcaatctgcgcaaagtaagaagtgtttccttaaatgaagcaataaaagttccagaaagagttctcaacaagaaaatcaaagaaaaaatcctcgaattaaaaaacaacaagattgacgcaaagaacatcaaaaaatacatcgaagaaaatcatacaggcggttatggaatagattcttcaaaaatcgatgtattctattttactaaagaaacaaaggaacgattcttcgccacaagaaaaactcttgacacatcttttaaccaagcaaaaatcaaagatagtatcgctgattctggaatacaaaagattttattggctcatctaaaaagcaagaacggagatgcagaacaagctttttctccagacggcattgatgaaatgaacaaaaacatcgttgaactaaacaatggtaaattccatcaaccaattctaaaggtgcgcgtttacgaaaaggcggataaatttgctgttggacaaaaaggcaataagaaagtcaaatttgtcgaagccgccaagggaacgaacttgttcttcgccattttcgaaaaagacggaaaacgctcgtatttgactattcctctaaacgtaatgattgattgccaaaaacagtatggtaatcagtggaaaaataatattgaagcttatttaaaagaaaaggaacttgtcgagaaggacgttaagctccagtttattctttcaccaaatgatttggtatatctgccaacagaagggtctattgacaaaaagcgtatatataaagttgtttcctttacaaataatagactgtatgccattccatatgccatagccaaaagtattgtagacaagaacgaattcactcaattaaataaaattgaatttaccgacaacaaagagtcaattaaagatgcatgcgttcctgtaataatagacagacttggcaacgtaatcgaatttaacggaaaacgattatgattaagcgtactctgtattttgggaaccaggcttatttaagtctcaaggacaaccagcttgtcattaagaaacgcaatgatgaaatcgtcaccgcagctattgaagacattgcttacattgttcttgattcgcctcaaattacagtgacaaacgctttactcggggctttgctagagaacaactgcgcgataataaactgcgataagacgcatctaccctcaggcttactccttcccctttcagggaataccctgcaaagcgaaagattccaggctcagatagatgcatcgcttccattaaaaaagcaactatggcaacaaacggtccagcaaaaaattttaaatcaggctgccgttttgcatggttctcatgacgctgaaattggaaatatgacggcatgggcaaattccgtgcgaagtggagatgttgataacagagaagctgttgccgcagcttactattggaaagaaatgttccccgatattcctgattttgttcgtgaccgaaatggagtaccgccaaataatatgctcaattatggctatgccattttacgcggtgtggttgcaagggctttggtttcgagcggacttttaccgactttgggaatacaccaccataatcgttacaacgcctattgtttagcagatgatataatggagccgtaccgcccaatcgtagacaaactaattttagaagttattaacgaaatagaagaatatcctactgatctttctactgaaataaaggctaaacttttaagaatccctgtacttgattgtgttattgatgggaatcgaagcccgttgatgaatgccgtttcaacaactacagcttcgcttgccaagtgttatttaggaacaacaaggaaattgctctatccggaggtgtaggatggaccgatttagcgagtacagaattatgtggattttgtgtttctttgatttgccgacagaaacgaaaattgagcggcaacggcacagcgaatttcgcaaaaatctgttaaaagatggattttcaagattccaattatccatatatgttcggcattgcgcttctgtggaaaatgcagaagttcatattgctcgagtaaagagttttatgccgccagatggttcagtaagcattctctgtatcacggacaagcagttcgggaaaatccaggttttctacggtcgaaaggaaaaaccgaagccaaaatcaacggggcaattagagcttttcctataaaaaacgttcaaaaacaagaaaaaatcgaccccaaaaggtcgattttttcttttcgcaatgatacatctaactcgttcatagctgtatagttacaacgaatcagttgttattgcactagtaaaactagaaaatctgaaagcaattcacaacgcatatctgaataaactaaacaacaaaaagttgttattgcactagtaaaactagaaaatctgaaagcaattcacaactattttcagtgtaggtcatgatttaccccagttgttattgcactagtaaaactagaaaatctgaaagcaattcacaactgtagttaataccattatcgctaaaatcaagttgttattgcactagtaaaactagaaaatctgaaagcaattcacaacaataatactttgcaattgtcaatagaaaagttgttattgcactagtaaaactagaaaatctgaaagcaattcacaacagcatttggaatttctttgagttgtgtttcgttgttattgcactagtaaaactagaaaatctgaaagcaattcacaactaatttgattcgcaattgcaccgctagacggttgttattgcactagtaaaactagaaaatctgaaagcaattcacaactagatatttttgacaatttggattgtatctgttgttattgcactagtaaaactagaaaatctgaaagcaattcacaactttcttttgtgtagttcatggttttatcctgttgttattgcactagtaaaactagaaaatctgaaagcaattcacaacaggtctgctggtcttccgggaagagcatctgttgttattgcactagtaaaactagaaaatctgaaagcaattcacaacggaacgcgcaccgtttgacgcaaagaaaggttgttattgcactagtaaaactagaaaatctgaaagcaattcacaacaaagtttctcccaataaacgctacaaagagttgttattgcactagtaaaactagaaaatctgaaagcaattcacaacgctggccctcttggtgctatggccgcaggcgttgttattgcactagtaaaactagaaaatctgaaagcaattcacaacgcaagtatggtaatatgtatgaccacggcggttgttattgcactagtaaaactagaaaatctgaaagcaattcacaacagtattcggactatatcgggcgggctcgttgttgttattgcactagtaaaactagaaaatctgaaagcaattcacaactacaaagataggatgttgcatatttattaagttgttattgcactagtaaaactagaaaatctgaaagcaattcacaacttaatttcgtccacaccgtcaaacctaaacgttgttattgcactagtaaaactagaaaatctgaaagcaattcacaacagaagagcgagttcacgccgttgtgggttgttgttattgcactagtaaaactagaaaatctgaaagcaattcacaacgctactgtgcagtcattacaagaccgcgttgttgttattgcactagtaaaactagaaaatctgaaagcaattcacaactggtgtgagtcttggttctcgcttcgctcgttgttattgcactagtaaaactagaaaatctgaaagcaattcacaacgctactgtgcagtcattacaagaccgcgttgttgttattgcactagtaaaactagaaaatctgaaagcaattcacaactggtgtgagtcttggttctcgcttcgctcgttgttattgcactagtaaaactagaaaatctgaaagcaattcacaacgattaacgttacaatcctccacctttccttgttgttattgcactagtaaaactagaaaatctgaaagcaattcacaacgggttgagtggtccagcttgttatctactgttgttattgcactagtaaaactagaaaatctgaaagcaattcacaacggaaggcgatacggataagttgaacgaaagttgttattgcactagtaaaactagaaaatctgaaagcaattcacaacagtatcatggcaatattctttcggggcattgttgttattgcactagtaaaactagaaaatctgaaagcaattcacaacgctcagcagcacgaaattactaatagtcctgttgttattgcactagtaaaactagaaaatctgaaagcaattcacaactatcgacttgcgacaacgaagctcttgatgttgttattgcactagtaaaactagaaaatctgaaagcaattcacaacaatctgtaagcactattggaaatatggtctgttgttattgcactagtaaaactagaaaatctgaaagcaattcacaactgcttgacgaagttggcaatgaatggtacagttgttattgcactagtaaaactagaaaatctgaaagcaattcacaactaaaatcccgacgtatgtattcatcgacggttgttattgcactagtaaaactagaaaatctaaaagaagttgcgccccaaacagcgaggaagggggctatgtcaactgcaatatagattatttaaagagaaaaggagatgccccgtcaagcggggcatgacatcagggcgagtggctaagctaagccggggcgttgcggggcggcgtctgagcgcccgcatagagagggtgatggaagactcggcaacccgctttttgacgaaaggggtgtacgctcaaaggcgtacatgacaatccgaagtgactaggttgccgaggctgcaatcagggggattcctcccccatccttcataagctatcaaaattttcaataacacattttgacattcctttttataccttaaaatgcatcggacgaaactactaataaagtaattctattagtagcgatatttttttagtattggacaaagggttttgcattctctatatttgtctctcaaaaatgggagacattctatggcagttgattattctactcttaaaaagggcggctggatgcgccagaagcagaagaacaatttctcgttgcgcgttcgcgttgttggtgggaacctcacagcaacacagcttgccaaaatcgccgaagtcgctgaaaaatatggcgaaggttacgctcacctaacttcgagacagagcgtcgagattccgtttatcaagcttgaaaatattgacgatgtgaaaaacgcacttgccgagggtggtgttgaaccaggcgtttgcggggctcgcgtgcgtaccattacggcatgccagggtgaagccgtttgcccgagcggttgcattgatacttatgcaatcgcgaaagaacttgacgatcgttactttgcacgagaacttccgcacaagttcaaattcggtgtgacgggttgccaaaacaactgtctcaaggccgaagaaaacgacgtgggcatcaagggcgccatcaaggtggattggctcgaagacaagtgcatcggttgcgggctttgcgcaaaggtttgccgcaaagaggccatcaagatcgaaaacaagaaggtcattttcgacaaggaaaaatgcaattactgcggccgttgctacaagtcctgccccactgacgcctggagccacattcacggctacatcgtatcgtttggcgggcttttcggcaacaacatcaacaagggcgaaacgattattccgtttgtagaagacaagcagaagctcttggacatttgcgatgctgcgattcaattctttgcagacaacggaaagagcggtgaacgtttcaagtacacgatcgaccgcgtcggccgcgatgtattcgcaaagaaaatccaggacgtatacaacggataaacgcttgcataaaaaggcctgcattccaacatactatcaacaaatgaacatcgaaaaaatcaagacagacttgctgattattggtggcgggaccgctggctgttatgcagccattaccgcaagtactttaggtgcagcgaaagatgtcgcagacatcaagatattggttgtcgaaaaagcgaacatcaagcggagcggttgcctcgctgctggcgtaaacgcgctgaacgcctacattaccgaaggccgtacgcccaaggattatgtggagtacgccaagaaagacgccgacggaatcgttcgcgaagacttgctgtacagtatttccgagaagttcaacgaggtcacggcgcacttggaaaagttgggccttgtcatcttgaaggacaaggatggaaagtatgtgacccgtgggaatcgtaatatcaaaatcaacggcgagaacataaagccaattttggcggcggctgtcgcaaaggcaccgaatgttcaggtgctgaaccacgtgaacattttcgatttttccgttcacgacaacaggattgacggagctttcggtttcggaatcgagaacgatactttctatgccatcgaggcgcgtgctgtgattatcgcgacgggcggtgcagccgggctttatcgcccgaacaatccgggattttcccgccataaaatgtggtacccgccgttcaacacgggtgcaggctacgccatgggaatccgtcacggtgccgagatgacgactttcgagatgcgctttattgcgctgcgctgcaaggatacgattgccccgacgggcacgcttgcgcagggcgtgggtgcaaagcagataaattcgcttggtgaagtttacgagacaaagtacggcatttcaacttcggaacgcgtgtacggaacagtggcagaaaacctggaaggccgcgggccgtgctatttgcgcaccgtcgggattacgcccgcacaggaagactcgcttttaaaggcgtacctgaacatggctccttcgcaaacaattcgctggcttgaaaacgaaacgccctccaaagcaaatgtcgaaattgaaggtactgaaccttacatcgtgggcggccacaccgcaagcggttactgggtcgataccaagcgtgcaacgacaattgacgggctttacgctgcaggcgatgttgccggtggagccccgcaaaaatacgtgacgggcgcgcttgccgaaggcgagattgcggcgaagtcggcggtggaatatatcaatgcggtagattgccgcacccccttacagggggttcgcaatgacgtagatgcagatcctcgcgaagacgtagacgccaaagcaaccatcaaggaagcagaaatcgcccgacatgtcgcagaaatcgaaacatatttatcgcagaaaaactcgctgtacactacagaacaacttgaagaagccatgcaaatagccatggacgaatatgcaggcggaatcaagacgggctatggctacagcgaaaagcatctcaatatcgccaaagaaaaaattgacgaaattgaaagccttacagacaagcttagcgcagccgatttgcaagaagtgatgtacatctacgaactcaaggaacgtctaacagtttgcaagagcgtgatagcccacctcaaggcacgtcacgaaacgcgttggcacagttttgcagaaaacctagactaccccgaaaaggacaacgcaaacttccgcaagtacgtcaattcaagactcgaaaacggcgaaatcaaaatcatcttgcgcgacctcaccgcagaagggcaaaagaactatgagcatcagcattgatcaaagcaaatgtatcggctgcaggagatgccacgacgtatgccccggcacgctaatcaagataaatgaagacaaaaaagcatttatcaaataccccaaagattgctggggttgcacatcgtgcatcaaggaatgccctgttcacgccatccaatttttcctcggtgaagacattggcggcaagggaagcaaggtacataccgaaaaagtaaacggtctaattcgctggattgtggaattccctgacgggaacgtcaaatccattgacattgaccctaaagaatcaaataaatactaggagtttcacagtgagcgaattttcacacctcgacgagctggaagccgaagccatttacatcatccgcgaagtcgccgctgaatgcgaaaagccggtgatgctttattccattggcaaggacagttctgtcatgctgcatttagccatcaaggcattctaccccgaaaagcctcctttcccgtttttgcacgtcaatacgacctggaaatttcgcgaaatgattgaatttcgcgaccgcacggcgcaaaagctcggcatcgagatgctggaatacatcaaccaggacggcgtcaagcagggaatcaacccgtttgaccacggcgcagcatacaccgacatcatgaagacgcaggccttgaaacaggccttgaacaagtacggcttcactgcggcatttggtggcggcaggcgcgacgaagaaaagtcccgcgcgaaggagagaattttctcgttccgcaattccgcgcacgcctgggacccgaaaaaccagcgcccggaaatgtggaagctttacaacacgaaaataaacaagggcgaaagcatccgcgttttcccgatttcgaactggaccgaaaaagatatttggcagtacatcaagcgcgaaaacatcgacatcgttccgctttactttgcagccccgcgcccagtcgtagtacgcgatggcaacatcatcatggtcgatgacgaacgattccctttgcgtgaaggcgaaaagcccgaaatcaagtcggtgcgcttccgcacgctcggttgctacccgcttacaggcggcatagaatcaacagctacaacgcttgacgaaatcattgacgaaactttgagcgccgtatcttcggaaagaacatcgcgcgtgattgacaacgaagccgccggcagcatggaacgccgcaagagggagggctatttctaatgaaaggtttattgaagtttattacttgcggtagcgttgacgacggaaaatcaacccttatcggtcatattctttacgattccaaattgctttacaccgatcaggaaaaggctctggaattagacagtaaagttggtagccgcagcggtaaaatcgactattcacttttgctcgacggtctcatggctgaacgcgaacaaggcattaccatagatgtcgcgtaccgctattttacaacggaccatcgcagttttattgttgccgatacaccggggcatgaagaatacacccgcaacatggcggtgggcgcctcgtttgcggacctcgccgtgattctcgtagatgcatcgcaaggcgttctcgtacagacgcgtagacacgcccgcatttgcaggctgatgggtattcgccactttgtctttgccgtgaacaagatggatcttgtgggctacagcgaagatgtattcaacaaaatcaaggtacaaatcgcagaacttgcacagactcattccctgagcaacatacaagttattccgctctcggcaacggaaggcgacaacgttaccatcaaatcgaaaaacattgcatggtatcaaggtcctgcattacttgaataccttgaaaatgtcgatacttcaagctctgcactagaaaagggattttacatgcccgtgcagcgcgtgagccgccccgaccgtacattccgcggattccaaggacaaattgaatcaggaacgattcgcgtcggagacgtcatcaaatccctcccgagttacgagaaagcatccgtcaaaagcattctctacacaaataggaatgtcgaagaagcccacgctggcgaaccggtcacgattacgctagaccgtgaagttgacgtatcgagaggttgcgtgctcgctagagatgcaagcatcggtagctacaagaaaatcaaggcgtcacttttgtggatggatgacgagccgctttcgctaggcaaagactacctcgtcaaaatcgggacaaagattattcctggaacactcacgaaaattgactatgccattgacgtgaacacaggcgcacacttagaaacagaaagcatttccaagaacgggatagccgtctgcgaaattgtttttgccgaagccattgtcgttgatctttttgaaaagcacaaaacgcttggcgagctcattctcattgacatcgtaacgcatgcaacagccgcttgcggcgttgttgaagggctctacgaaaagcaacttcaatccaacgaaaaggcagcctttgtgcaaggcgagcgccatggccgtggagaaatcttcgaagaattcttctacgatacagctacactttccgtagtaaagcaacagccagtcaagcagcactacactgtaggcgacgaaatcccgactgctggcgaaagctaccactaccccgacgatttcgatatcatcatcttgcgagacagtatcgccgtcaaggttcgtggcaagcgcatcgcggaaatcaccacggcagaggaataccactacggaaacgttcccgtcatcaatggacgcggctttgaaatcaaggtccattccgatgaagacgttaagcagctgcttaacgaatacgaaaaagcaggtatcgcaggtcgcgaagaattcttccgcaagtgggcttcatttaatacatatcgcaaagtcgtattacactaaatcacttttgcttcttcaccaccataatgctcggcacaccgccgagcatttcttattttaaataaaataatcaaaaattacaaataaattttacaatagcaaaaatcaatatctcagcataaaaatttagtattagacaaagtgaaaaacgcgttctatattttgccgcacaaaaaacaaaacacacaacaacaataaaaaacaataacaaggagttacgaatgaaccagacaatatccaagattttgattacaacagcactggtatcatccatttgctctgctgcag

SEQ ID NO: 1116 - DNA, 24536 bp, synthetic construct
  source 1..24536: mol_type = other DNA
  variation 16756..18215: note = n is a, c, g, or t
  misc_feature 1..24536: note = Synthetic
acgtgtcagcccaattgagtctgaaatttcggagctaaagcttaaaatggaggacgacaccattgcttaccatgaaaaggaaactatatacaatcaggttgaaaaactgacgaaagatttagatgcctccattgaagtggtactcctagaaattcttcctgaggcatttgccgtgatgaaggagactgctcgcagatttaaggagaactccgagattgtggttaccgccaatgatttcgaccgagatcttgctgccactaaagattttgtgacgattagcgatggcaatgcagtttatagcaacacctggatggccggaggaaactcggttacttgggatatggtgcactacgacgttcagctcatcgggggtgccgttcttcatcaagggaaaattgccgagatggctactggtgaaggaaaaactcttgtggctaccttacctgtattcttgaatgcccttgttggaaaaggggttcatattgttaccgtgaacgattaccttgctcgacgcgactccgagtggatgggacctctttatatgttccatggattatccgttgattgtatcgataagcatcagccaaactccgaagcaagacgcaaagcatacaactgtgatatcgcatttggaaccaacaatgagtttggtttcgattatcttcgcgataacatgtctctcagtcccgaagacctagtgcagcgcaagcaccactatgccattgtcgatgaggtcgattcagttcttattgatgatgctcgtacacctcttattatatcgggtcctattccaaagggtgaagatcaactcttcgaagagtttaagccaccggtagaacgcatatacaatacccaaaaaaacttggttactcagcttcttgctgatgcccgtaggctcataaccgaaggtaaaacagaggagggtgggctcgtgcttcttcgtgctcataagggattacccaagtataagcctttgattaagttcttatcggagcaaggtaataaggctttattgctgaaaacggagaacttctacatgcaggataacaacaaaaacatgcatgtggcaaccgatccgctctattttattattgatgagaaacaaaactccatcgagttaaccgataatggtattgacctcattacttcttttgttaccgattcgaagttctttatcctacccgatattggaactgagatatccgaaattgagaagaacatccttgatccacagcaaaagttgcaggagaaagatgcccttttggccgattatgccattaagtcggaacgtgtgcacaccgtgaatcagctgcttaaggcctactcgttattcgagcgcgacgttgagtatgttgtaatggataataaagttaaaattgttgatgagcaaactggccgtattctagatggacgtcgctattccgatgggttacaccaagcaattgaggctaaagaaaaggtaaaggtcgaagctgcaacccaaacatttgcaaccgttacacttcagaactacttccgtatgtatcacaagttggcgggtatgactggtactgccgaaacggaagcgggtgagttctgggagatttacaagttggatgtggtggtaattcctaccaacatgccagctactagaaaagataagaacgacttggtattcaaaaccaaacgtgaaaaatataatgccgttatcgacgaaatagttcgattaaccgatatggagcgtcctatccttgtgggtaccacctctgtggaagtgagcgaactgcttagccgaatgctaaaactgcgtggggttaagcacaatgtgttgaatgcgaaacttcaccaacgggaggccgatattgtggccgaagctggtcgtcagcgcacggttaccattgctaccaatatggctggtcgtggaacggacatcaagctaacgccagaggttaagtccgcgggtggtttggccattattggtaccgagcgtcatgagtcgcgccgtgtcgataggcagctgcgtggtcgtgccggtcgtcaaggtgatccaggttcttcccagttctttgtctccctagaggacgatttgatgaggttgtttggatccgatcgtattgctcgaatgatggacaagatgggccataaggagggcgatgcaattgaacactcccttatttcccgttccattgagcgcgctcaaaagaaggtggaagagaataactttggtattcgtaaacgacttctggagttcgatgatgtaatgaactcgcagcgcgaggttatctatactcgccgacgtcatgccttgtatggcgagcgtattcaggttgatattgccaatatgtttgccgacctttcggatactattattagtagttgccatggcaatatggattatgaggaattcaacctagagttgatcaggactgcttcgctagaggctccgtttacggagaaggagtatcttgagaaaaaaccagatgatctagccgataagttgtttgatgcaatgcaggagtcctaccttagaaaaatgggaaccattgcacaacaggcataccctgtaataaaggatgtttacgaaaagcaaggtgcttcatacgaaaatattgtggtgcctatttccgatgggaataaggtattccagtgtgtgactaacctgaagaaaacatacgagacccaaggacgcgaattagtacgttcgttcaacaagtcggccattctagttatgattgatgataactggaaagagcacctccgcgagatggacgaattaaaacagagtgttcagaatgctacctacgagcagaaggatcctttgttgatctataagtttgaatcatacaaactcttccgtgatatgattgagcgtatcaaccgagaagttacctcgatgctgcttaaggcccacattccacttcgtgatccagctccggtaaaggaggctgagcagcgtcgtaagctggatatgagtcgctaccaagcgtcacgtaccgacgatgtaagcacctctggtgagggcccatcacgaccaaaccctgtgcacgttgaaaagaaggtgggacgaaatgatccctgcccttgtggtagcggaaagaagtataaaagttgtcacggagttaatgagaactaaaaaaagagcgcccctaacgggcgcttttttttgatatacttccggatttataaacgaatgggttaactttgcgcctttggatttaaactcccctgcgataatgttgtggagcacagcatgcgaggcgtttgtatagtttttactgaaataggattattacaatgaatttggaaacatacttcttcgaaaaggttactgaggcgattaaggctctatatggtgttgatgtaaatgagggcttggtgcagctgcagaaaactagaaaggagtttagtggagatattacacttgtggcctttccattgcttaaaatatcgaagaaaggaccggagcaaactgccgaagcccttggcgaatacttaagtgcgactaaccctgaagttagcagctataatgttgttaaaggttttttaaatatctccatgtcgagttccttttggctggagcgtatgcgcgaaattgcattgcagccgaattttggtcagggacccgattccggtaaaacggaaatggtagagtattcttcccccaataccaacaaacctcttcacttgggccacgtgcgaaataacttgctgggagcctccgtttctcgcttgcttaaaatggcaggacacaaggttgtgcaagtaaatttggtaaacgataggggtattcacatctgtaagtcgatggttgcatggaagcgattcggcaacggagagacccccatcagcagcggaaaaaaaggcgaccacttggtgggcgattactatgtggccttcgataaagcatataaagccgaaatccaagggctcatcgctcatgagatcagtaaagaggatgccgagaaaaacgcacccattatggtggaagcgcaagcaatgctccgcaattgggagaagggcgataaggcaaccattgatctttggacaaccatgaatggttgggtgtatgaaggatttgcaaaaacatataccgatcttggcatcagcttcgataaaacctactacgaatcacaaacctacctgctgggtaaagcaattgttatggaggggctcgaaaagggtgtcttctacaagcgcgaggatggttccatctggattgatctcactgccgatgggctagacgagaagttgcttcttagggccgatggaacctccgtttatatgactcaggatattggaactgccgttcagcggttctccgacgagaagctcgatgatcatatttatgtggttggtaatgagcaaaactatcactttcaagtgcttaaactggtgctcgagaagttaggtcatcagtgggctaagcacctgtttcacctctcctatgggatggttgagctgcctgagggtaagatgaaatcgcgcgagggaacagtagtcgatgccgacgagctggtggaggagatgattgcaaccgctcgggccatgtcgcaggagctgggcaagctcgaagggcgcagcgaagaggaagccgttcaggtgtctcgcttagttggcttgggtgcccttaaatactttatcctgaaggtagatcctcgaaaaacgatgaccttcgatcctaaggaatccatcgattttaatgggaatactggcccatttattcaatatacttacgcccgtatcaaatcggtgcttcggaaggcacaagatcttggctttagcgcgacgcttgctgaaaagccacagtatcaactcgccgataaagagatttccctagtaaagttggttgatgagtttcctgccaccattcaggctgccgcagccgatcttagtcctgccctcattgctaactattgcttcgagctggccaaggagttcaaccaattctaccacgacttgaccatacttaaagaggaaaatcaggaggttcgcagctttaggctcgtactctctacgcaagtatccacggttattgcttcggcaatggctctgttgggcattgatgttccggaacgtatgtagcaaacagtatggactagaatggttttttgttaaatttgtatcccaatcttaagagacgatagcatatgtttgagaacttatccgaaaagctggaacggtcgtttaagctattaaaaggtgaaggtaaaattactgagattaacgttgccgaaacgctaaaagaggtccgcaaggcacttctcgacgccgacgttaactacaagatagccaaaaattttaccgatgaggtgaagaagttggccctcggggcaaacgtgcttaatgctgttaagccgggacaaatgatgattaaaattgtgcacgatgagctggccaagctcatgggcggcacaatgaccgatatcgatctaaagggaactccttcggttatcttagtggctggtttgcaaggttccggtaagactaccttctcgggtaagttagccaaccatttaaaatcaaaaaagggtcgtcagcccctgctcgttgcctgcgacgtttaccgtcctgcggctgttgagcagcttaaggtgcttggtgccagtattggtgttcctgtattcttcgaagagggaagtaccgaccctattgccattgccaaagcagctgtggcccatgccaagagcaagggctacaacgtagttattgtggataccgctggtcgtttggccgtggatgaggccatgatgaaagaggttaccaagattaaggatgccattaaaccacaggaaattctctttgtggtggactctatgacgggtcaggatgccgtgaataccgccaaggagttcaacgacaggctcgactttagcggggtggtactcaccaaactcgatggtgatacccgcggtggtgctgcactttccatccgttccattgtcgacaagcctataaagtttgttagtgccggggagaagatggagtcacttgatgtgttccaccccgagcgtatggccgatcgtatcctcggaatgggcgatattgtttcgctggttgagcgcgcacaggagcagttcgatacagaagaggctcgtaagctgcacaagaagattgccaagaatcagttcaacttcaacgacttcctttcccagatctcccaaattaagaagatgggtaacctgaaggacttggccgggatgattccgggcatgaacaagatgctcaagaatgtcgatattgatgatgatgccttcaagagcattgaggccatcatttactccatgaccccagccgagcgcgaaaatccggagttgctgaatggtagccgtcgcaagcgcattgcttcagggagtggaacaactatacctgaagtgaataagctgcttaagcagtttgaagaaacacgtaagatgatgaagatgatgaccggtggcggaaagaatattgcccgtatgatggggaatatgccacgtcagtaatcctttaaataacgatacatggaacttatcgacggaaagaagattgccgatgcggtgaagcaagagattgcgcttgaggtggaatccattcgggttgccggagggaaaattcctcacctatgcgctattttggtgggccacgatggcgcaagcgagacctatgtggggcacaaggagaaatcctgtgcacaagttgggtttaagtctaccttgcttcgatttgaggataccatttcggaggccgacctgcttgccgagatcataaaggtaaacgatgatgatgatatcgatggcctcatcgttcaaatgccgcttccaaagcatatcaacgagcaaaagataatagaagccatcaatccgaagaaggatgtggatggatttcatcccatcaacgtgggtcgaatggtgattgggcttcctgcctacatctcggctacacccgatggcataatggagctgctacgccgctatagtatacccaccgcgggcaaacgctgcgtggtgattggccgcagcaacattgtgggacgccctatggctaacctgctttcgcataagggaactcccggcgattgcaccgttacaatttgccatagccgcacacaaaacatgaaagaggtatgcctcgaggccgatattattgttgctgccttaggtaaacctgagtttcttactgccgatatggttaaggagggtgcaaccgttatcgatgtgggtataacccgtgtggcctccaataagactaagaatggttggaagctggtaggcgatgtaaagttcgatgaggtggcccccaaatgcagctttattacgcccgttcccggtggtgttggccccatgaccattgtatcgctcatgaagaataccctcatggctgctaaacgcgaaatttacggataggaaccattccatagaataccaaaagctcggagcaatccgagcttttttgttgtgaattcatactgatgagcacaacataccactggttttgcctactacaacgtaactatgcgtgacaccttatattcgttatcgaacttggttttataaaataccacgatctccacttcgcgcttggaggttagctggcttctgtatatctcgatggatcctttgccgttgatcacccttattttcttgtagggctgggtgtcggaaacaattggatacttcgcatatagccgataggtgtttattacggggttcatattaacggtaatgtcgtatttccctacactctttatcccatttgctacggctacttccatttgtgccaatgggataatggaaccatcctcggcatactcttttaaatctccaagccccttgctcatggcataggtttgatccgatttaagctttccactgcggtagtactggcggtattttccattacgtttgcccatatgaaaggatacctctttcgatttctcgcccgtgatgtagtattcagtctccacgccatcctttttacccatacgagcaactacgctcgattttgcttttccgttggagtagtagtatacgcacattccgtttggcatgctatccttaatctcgatattggacaatagcgctccatcgcgcgagtaaatcttttttaccccttttactagtgacccctcgataatctctaaactcccatcgggtagcgtttgcttggatataccattatcgcaagcattaaaggagatgcacagcaaagcgcaagcaagaattgcaattgtgtgtcgcatagggagtggttttgttttaggttttatgaagaactattaaccaaatatagcacataacattggtaatgcatgagccttttattaggtgcgattatttccgggctaatcgaagagatctccatccagcgcatcgcccagtattcccccaaccatgcttcccccgagtaatccgcctaatagggccgaatcggtagcggctccaatgatcgttgaaactataatggaatcggggctattcttcgtcacgcgctcttcattcggacactcgtggtagtcgatgctggagataatatattcgttgcaatgtttacagtagggcatagtgtaaggatgaagatagtaaataagtagaatgaacgtttccggttctatataatcggttttttcgacccatgccttcaataatccctgtagaatgaatctttcaacaaatgtagcataaatcgaacagaagaacgaataaccgtatgtgtagaagcaagaaacaatggctacaccacgttgggatcgttttagttgtttggcaacgaataggcaataaaactctggtatgcagttgcccaatatttataagccatatatccgaaacgaattctaaatggtagaagctggtgtcttgactgctaggttgttaatacaaattgctctttcttcctatttgtcgatatttcgcaggttgatgctctgtttgtagtgaagatgtatcgtcaacgaatactatttagctgctaagatttcctgctttgcctcttgacaaccgttcttttctgttgtatatttaggctattattagtgacgatatttgctttattaactatttaaactactatttaggtgagtggaataaagtataaagttacagaaaaagggcagcccggtgttatcggcggtggagtaaagaagtgttatgcccaagttgttttcggcgacgaggttaccgtagacgatctctccaaggaaattgaaaagttttgttccctaagcgagcccgacgttcgggcagtaattctcgcactggaaaacgtaatccagactaagctctccgaaggccgtattgttcgcctagagaagttaggttcattgtatcctgccataagcagccaaggcgaagagaaggccgaggatgttgatgcaaattcaataaagagtgtgagcgtaaactaccgtcctggtgcgcgcattctttctgcaatgaacgatgccggttttaagaaggtttaaccccgctacgctttcagtagcaaattccagccccttgccgccaagcaaggggcttttgtatgtaactgattcatagtgcgccaaaaccacgcgtcgttttaccccgaggcacacgtggtttgcctcaaaaccacaggtggttttgcttcgagacacatgtggtttgccttaaaaccacacgtggttttttcaaatatttgaagtggtgcgatattgcttggtagtgagatgtttgtgtttgtggctttttgaggagtaaatgctatgaaagaatgatgttgaatgcagcatgatttgctacaaattctcatttgtgtaatagaaatgtcaagattgttttggctttttaaataaatatattaaactttgagatagccaattgcaataaatgatggaatagggaagttggctgaagtttaaataagcgatttagaaattgcgtgtgaaatggggatagatagtgcataaaaacaacaaaggcgacttgcgccgccttaaatgttttcacaacggaataatccttattgtgaattgcttcagattgtaatgcaatattaaacgatatatatcaaaatacaaaatattatgaaaagaattttaggattggatttgggaaccaactctattggttgggccttagttagtcaagatgaatgtaaaagtgaaatattaggattaggaagccgtattattcccatgagccaagatatactcggtgattttgacaaggggaattctgtgtctcaaactgctgaaagaactttttttagaggtgtacgtcgcttacgtgaaaggcatttgttgcgacgcgaaaggctgcatcgggtgttaaatgtgctgggttttttaccggatcactacgctaagtgcattgattttgagaagcgatttggacaatttgtggaggagcaggagccaatgattgcttaccgacgtaatgttgaaactgctaaaatggaatttgtgtttccagattcgtttgccgaaatggttgccgattttaaggagcatcagccacagctacttaccgatggacgtttaataccccaggattggaccatatactacttgcgcaaaaaggcgctgacctcagaaataaccaaggaggagttggcttggatcctattgaactttaatcaaaagcgtggatactaccagcttcgaggcgaagagcaggaggacgataagcagaagatggttgaatattactcgcttaatgttgtggatgttgctgaaggcgaggtttcaaaaactaagggggaaaaatggtatagtgttgtgctcgaaaatggatgggtgtatcgccgaacaagcaaagcacagctcgattgggttggaaaaactaaggattttattgtttctactgaccttgatgaaaatggagcgattaaaaaagatagggatggtaatgagaaacgttcattccgtgcacctcttgaaggagattggacgctggtaaagaagaaaactgaagccgatgtggagcatagccacaaaacggtgggagcctatatttacgacaccttgctgcttaatcctcagcagaaaattaagggcaagctggtgcgaaccatagagcgcaagttttataaacaagagttagaggctattcttcgaaagcaactggagtttcattctgagctgcaaagccgtgatttatattcagcctgcctcgaagagttatacgaaaataacgatgcccaccgtaacagcattggtgcaaaagaatttgtccatcttttcctaaatgatattatcttttaccaacgaccgttgaaaagcaagaaatcgctgataagcaactgtccctatgagtttagaacctatgccgatcagaaaactggagagattattaacgaacctattaagtgtattgccaagtcgcatccgctatttcaggagttcagactttggcaatttcttcaaaatttaaagatatatgctcgtgaacgtgccgtaaacggtaagattgaaacagatgttaatattacccacgagctgcttaaaacagaggcggattggatagccttgtttgagtggttaaacgaacataaggagattgaacaaaagacctttttaaaatatcctgcatttgggttcaaaaaggatgccgataagtatcgctggaattacgtggaggataagcaatatccgtgcaacgaaacgcgaacgcttattgcatctcgtttggctaaagtattaaatgtcccggatgattttctttcaaaagagagagaggaggcgttgtggcacatcttatactcggtagacgataagcatgatatcgtgaaagcgctcggcacatttgccactaaaaatggcttaggaaacgattttgtcgattgttttaaaaagttgccaccattcaaaaaggagtatggagcctattcggctaaagcaattaagaagctgctggcactcatgcgcagaggtaaatattgggatagtagtgcaatttctagcgatgtgctagcacggatagataagcttcaaacaggagagtatgatgcaaaaataaaagacagggtgcgggagaaagccattaacttagtgagggttgacgattttcaaaatcttccactatggcttgcgtgctatgttgtgtacaaccgccattctgaatcgggcgatattcgctactggaaaacacctgccgatattgaatattttctacgagaggagtttaagcagcattcgcttcgcaaccccatagtggagcaggtaattactgaaaccttaagggtggtaaaagatatttgggcgcattacggtaagggtatcgagaactacttcagcgaaattcacattgagctggggcgcgaaatgaagaatcctgccgataagcgcaagagtatgaccgagaagatcagtgaaaatgaaaacactaaccttcgcataaagtctctgctagccgagatgctcaacgatggtagtattgccgaagttcgaccatactcaccaagccaacaagagattctgaagatatatgaagagggtgtgatgagtgctgaaactgacatcccggatgatattcttaagatttcaaaattgagcttaccatcaacctctgaacttattcgctataagctatggctcgaccagaaatattgttcgccatatacagggcagatgattccgctggcaaaactatttacttcggcctacgaaattgagcacgtaataccacaatcgcgctacttcgacgattccctatctaacaaggtaatttgcgaggccgaggtgaataaagataaggatagggccactgcttacgagtatattaaaaataattcgggcaagaaagtcgagttgagctttggcaaagaggtaactctttttactctttcggcctatgaggataacgtaaagcgcaactttgcgaaaaataggggtaaactaaaaaaactcctaatggaggatattcctgacgattttattgcacgccagcttaacgatagccgctacataagcaagatggttaagggacttctatcgaacattgtgagggaagagggcgagcaagaggctacctcaaagcaggtgatttcaaacaacgggtcgattaccagcacgctaaagcaggattggggcttgggtgatatctggaacgaaattattgcacctcgctttgagcgaatgaaccagataactaacagttccagctttggagccatgcgcaataaccacttcctgccacaggttccgttggagttgcaaaaaggatttaacaaaaaacgtatcgaccataggcatcatgcgctcgatgccttggttatagcctgcgctacacgcaaccatataaactacatgaacaactccaatgcggcaaaaagcaaggaggcggtgcggcatgaactaaggggggctctttgctttaaaaagagcaacagtgatggtggcactggctatcaatgggtatttaaaaagccgtgggatacttttacacaggatgccagagaggctcttctttgcaccgttgtaagctttaagcaaaaccttagggttataaataaaacggtaaaccactaccaaaagtgggaagtagatgagcatggccataagcaaaaggtaacggtaaggcaaactaaaggcgatagctgggctattcgcaaacctatgcacaaggaaactgtatcggggctggttgctctacgatttaaaaaggagatgcagctttcgtcggcactcgatacacccgaaatgattgtagataaatcgctcaaggctaaggttaaggaactgctttctattccttatgacaagaagcatattgtcaagttctttaaggataacgataaccaatggtgcggacggaacatatcgagggtggaggtttactacttcgagcgcgaaaatgctgcatcgcgcgttgctgttgatgagaagtttaattcatcaatgattaggtgtataacagatacaggcattcaacgcataatgctaagccatttacagaaatacagccaagaggtaaatggaaaaattgtggaacagcccgatcttgcgttttcatcggatggactcgaagccatgaataggaatattaaagcactaaacaatggagtaaaccatcaaccaatatacaaggtgcgaacctttgagcctattggaaataagtttgttgtgggccattctgggaataagggtgcgaaatttgtggaggcggctaaaggaactaacctctactttgccatttatgttaacagcgagggtaagcgcagctaccaatccattcctttaaatgttgttgtagagcgacaaaagcagggtctctatccggtccccgaaacaaatgcccttggcaattcattgctgttctatctttcacccaacgatttggtttacgtgccaactacggaagagcaggagaatgcaaatgctgtaaactttaataatctaactaaagagcaggtaactagagtttataaggtggttagttttacggggaatcgactttatgcgatacctttaaatgtagcacaatcaattgttgataaagttgagtttactcaacttaataaagtcgaatcggagcttatctacaagaaatcgattaaagagatttgttgcaaattaaaggttgataggcttggccgcattgtagatgctataaagcattaggcctaaagtccgggtgcgactagtatgcggatgagtattagtcgcgctcggactgtatattggctttaagtcaccccgtcactaaaattaagtaaagctatggaatttgaagtagggcacctataccatatctacaatcaaggcaacaatcgccagcgggtattctttacgcgggagaactaccttttcttcctcgaaaagataagtaagcacattacaccctatgccgatgtgctggcatggtgccttatgcccaaccacttccaccttatggtgcatgtaaaccatattagccttccggaaaatgctagtccgagtgcgactagtatgcggacgagtattagtcgcgcccggactgctaatgtaaccttacagcaatctataggcattatgctggcctcctatacgcgtgctattaacaagcaaaatggttggagtggttctctttttcgacaggaaaccaaagccatttgccttacgcgaaatgatgaattaacgcgagcatggtttttttttgatggagttaccagcattaataatacacctccggaattgcaatacccaaacctgtgctacaactatattctgcgtaatccggtaaaggatggtttggttaaaagtattgatgaatgggagttctcttcgtatttagatgtagtaggagaaaggcacgggaggttaataagcagggaacgaatagcagagtttggtttaacaatttaaagtccgggtgcgactagtatgcggatgagtattagtcgcgctcggactgtgcattgatctactactaaccataatgccatatgattaagcgaaccctttactttggaaacccaaccaagctaagcttgcacaacaagcagctggttgccgagattaccgatcccgatcagggccgaagaactgctaatgcatcggttgaagatgccggagttgttatacttgattctcctcaaattaccattactcaaccattactggaggcacttcttgagaacaatgtggcagtaataacctgcaacgccaagcatatgccccatggattgcttatgccgctcgagagcaatattttgcagcaagagaggttcgatacccagctggaggcttcgcagccgctaaaaaagcagctgtggcagcaaaccatagttgccaaaatcaccaaccagaagtggttgctcgaccaacaaggctacgacactgagcctatgaatcactggatacgaagcgtaaagagtggcgaccccaataatttagaaggaagggcagctgccttttactggaaaacgctcttttcggttaccgatgtggagcagtttgttcgggggcgatatgatgatgaacccaataatttgctaaactacggttatgcggtgcttcgcgctgtagtagctcgcagccttgttacatcgggtttactccccacgctgggtatacaccacgccaaccgctacaacgctttttgccttgccgacgatattatggagccttaccgtccattcgtggatagggtagtgctaggcatagtaaaatcgggagtcgattatacggagctaaccaaagagctaaaggcgcaattgcttgtgatacctaccattgatgtaataatagaggagaagagcagcccgttaatggttggcatgcagcgcaccactgcatcgctggccgcctgctatgcgggaacaagccgccgtattctctaccctagctttgagtagtagtaaccgattttctgagtatagggttatgtgggtattggtgctattcgatttgccaaccgaaacaaagaagcagcgcagtcatgcggcactgtttcggaaggatttgctgcaggatggattctccatgtttcagttctcgatatatacccgctgctgtcctagccgcgagaatgccgatgtgcatattcggcgcgtaaagctctcgttgcccagcgatggctacgttgggattctctgtattaccgacaagcagtttggtagcatggatgttttcttttcggcaaagcctatagaggtgcaacctgggcctcagcagctggagctgttttagaatatgctcacagtccgagtgcgactactagtcgtccgagtaatagtcgcccccggactactattccttacatagaaataaaaaaaggaacctgcttttcagtaagttccttctacttcgacattttctacttttcgtttttgacgataacaaacaaccattcagctttgnnnnnnnnnnnnnnnnnnnnnnnnnnnnnnnnnnnnnnnnnnnnnnnnnnnnnnnnnnnnnnnnnnnnnnnnnnnnnnnnnnnnnnnnnnnnnnnnnnnnnnnnnnnnnnnnnnnnnnnnnnnnnnnnnnnnnnnnnnnnnnnnnnnnnnnnnnnnnnnnnnnnnnnnnnnnnnnnnnnnnnnnnnnnnnnnnnnnnnnnnnnnnnnnnnnnnnnnnnnnnnnnnnnnnnnnnnnnnnnnnnnnnnnnnnnnnnnnnnnnnnnnnnnnnnnnnnnnnnnnnnnnnnnnnnnnnnnnnnnnnnnnnnnnnnnnnnnnnnnnnnnnnnnnnnnnnnnnnnnnnnnnnnnnnnnnnnnnnnnnnnnnnnnnnnnnnnnnnnnnnnnnnnnnnnnnnnnnnnnnnnnnnnnnnnnnnnnnnnnnnnnnnnnnnnnnnnnnnnnnnnnnnnnnnnnnnnnnnnnnnnnnnnnnnnnnnnnnnnnnnnnnnnnnnnnnnnnnnnnnnnnnnnnnnnnnnnnnnnnnnnnnnnnnnnnnnnnnnnnnnnnnnnnnnnnnnnnnnnnnnnnnnnnnnnnnnnnnnnnnnnnnnnnnnnnnnnnnnnnnnnnnnnnnnnnnnnnnnnnnnnnnnnnnnnnnnnnnnnnnnnnnnnnnnnnnnnnnnnnnnnnnnnnnnnnnnnnnnnnnnnnnnnnnnnnnnnnnnnnnnnnnnnnnnnnnnnnnnnnnnnnnnnnnnnnnnnnnnnnnnnnnnnnnnnnnnnnnnnnnnnnnnnnnnnnnnnnnnnnnnnnnnnnnnnnnnnnnnnnnnnnnnnnnnnnnnnnnnnnnnnnnnnnnnnnnnnnnnnnnnnnnnnnnnnnnnnnnnnnnnnnnnnnnnnnnnnnnnnnnnnnnnnnnnnnnnnnnnnnnnnnnnnnnnnnnnnnnnnnnnnnnnnnnnnnnnnnnnnnnnnnnnnnnnnnnnnnnnnnnnnnnnnnnnnnnnnnnnnnnnnnnnnnnnnnnnnnnnnnnnnnnnnnnnnnnnnnnnnnnnnnnnnnnnnnnnnnnnnnnnnnnnnnnnnnnnnnnnnnnnnnnnnnnnnnnnnnnnnnnnnnnnnnnnnnnnnnnnnnnnnnnnnnnnnnnnnnnnnnnnnnnnnnnnnnnnnnnnnnnnnnnnnnnnnnnnnnnnnnnnnnnnnnnnnnnnnnnnnnnnnnnnnnnnnnnnnnnnnnnnnnnnnnnnnnnnnnnnnnnnnnnnnnnnnnnnnnnnnnnnnnnnnnnnnnnnnnnnnnnnnnnnnnnnnnnnnnnnnnnnnnnnnnnnnnnnnnnnnnnnnnnnnnnnnnnnnnnnnnnnnnnnnnnnnnnnnnnnnnnnnnnnnnnnnnnnnnnnnnnnnnnnnnnnnnnnnnnnnnnnnnnnnnnnnnnnnnnnnnnnnnnnnnnnnnnnnnnnnnnnnnnnnnnnnnnnnnnnnnnnnnnnnnnnnnnnnnnnnnngtcaaagatacaatctgaaagcaattcacaacaactggtaagaatgtgctctggtatgctaggttgtgtgcattatgtcaaagatacaatctgaaccgagcgaagcgagttcggtgcagccaacgcaattcacgacccattgaggtagccaccgatagcaccgagggttgtgtgcaatatgtcaaagatagaatgtgagactttatggcctgttgggctcaaacagcgatgtgcttccaaagttgctatggtagccggagaatggattattccagaagtttgttccatagggtggcaatccttgtgaccattggaactgagccgaaacgctggccttttcgctaatcttatagctaacacctaccgataggcttttgtagtcgttgtttactccatagggcactactagagagccacctctgccataggttccattgccaaaaaagttcatgcgatcgtttaagaagtaagtggcaccagtatatccagccactggttctgctacctgcaacacttccgaatcgccaaagccattggcgttgttgtgggcaacataggcccctacaaatacttctaccttattagagggctgaaaggatacgctaggggataggtaggtagtgaagagattacgtccgctcccaaatgtcgaaaaggaggatccaacctctaggctaacctttgcatctttcagcaatgatggctttagtggattgccggcaggtcgttcggatgaagaaatataggaggatggaagcttggcaggttcggctatgccttgatgcgttgaatctacgatgtagagcgatgggaggtcctttatgagttgaccaaatcccgaaagggttatggcgagcaatgcagcaaggagcgatatttttctcatggtaaaatgggtattacaaacagcaatcaaacatacaataattatgcctaataatacatacgattgcggtgcgaattcctgtccaatagcattatgttctttagcattgtatgttttttgaaatggcttttggggtatatttgcggcctgaatctttgggattaaaagttaaaaatatttatatatgcgtcagccaataaagtttgtttcggccgaggaggctgttaaggtcattaagtccggcgatcggattcatattcatagcgtagcacttgcaccgcaaaagcttatcaaggctatgtgcgaaaggggcaaagcgggtgagtttaggggtgttaaaattcagcaccttcacaccgaaggtcctgcaccttacgcaagcaaggagtatgaaggaatcttctttcttgagtcgttctttgttggtcataacgtgcgcaaggatacccaagcaggatacgccgattatattcctgtgttcctacacgaaacccaacgtcttattcgcgaaaacgtgcttcacgtaaacgtggctatggtgcaggtttctcctcccgataagcacggatatgtttcgcttggcacctccgtcgattgcactctcgctgccatagagtgtgcagatacggttattgctgtcattaatcccaatgtgccccgcgcatttggtgatgccatgatccctatggacatgatcgacatcttctgtgaggataattctccgcttattgaggctgcccctgccgatcccgatcctattgaattggccattggagcttacgttgccggcttggtggatgatggcgcaaccctgcaaatggggattggtgcaattcctaatgcggtgcttggtatgctgggaaaccataaaaaccttggtattcacaccgaaatgttttccgatggtctattaccattggtcgaaaagggcgtagtgaatggtgccgagaagatgattgatcgcggtaagattgtatctactttccttatgggttcaaagaagctttacgacttcatcgacgataatccaggtgtgctaatgatggatgtgaactataccaatagcgttgaaatgatcagcaagaatcctaaggttacctccattaactcggctcttcaggttgaccttaccggtcaggtttgtgccgattctcttggaacggtattctattcgggtgttggtggtcagattgacttccttcgcggtgcgtcatgctcacgcggtggtaagccaattattgctatgccttcggtaaccaataaggggttatcgaaaattgctccggtgcttaatctaggtgctggtgtggttactactcgtgccaacatgcattggtttgttaccgagtatggcgcaattaacctttatggcaagagtctgcaagagcgggcccgccttattatcagcatttcacaccccgatcatagggaggctttggataaggctgcatttgagcgctttggtcctcacttccactacataggttagtccaacggaatattatataaaagaaacgccgagcattttgctcggcgtttcttttttagcgttacttagaagtgtatgattcgtctcgataatgcggccaaatacttttcatctatggcgtgtcttttaacgtttaacgattcacccgaatagccctctgtattccagctgttttctgaagtttgctcaataggtttccgagttggtttgtgtgttcaatgagcactttaagtatgccaacaaaactatttcccttggattctatggaaatagcgcgcatgttgagtttcatctccttcgagacaatctccgagatcctattaacgatccctagctcgtcgtagcccacaattttaatggttacttgaaaagctcccgattctgtttgctcgcgccatttggccttcataatgcggtatccgtacttatctctaagcctatcggcgttggggcaggtgtttcggtgaatcttaattccttcaccaatggtaacaaatccaaatacctcatcaccaggaattgggttacagcatttggccaggcgatagtctacattatccaatcgctcatcaatgataaggtaatcatcaaatttagtaactctgtgctcaacaactcgcttttgaggttcggcttgttctggttgcttgtcacccagcagtacaagcttaatatccgaaagctcaattttttcatgaaagatggatgaatagagaactgttgcatccttaagtttatagtgtttaatgagcaacgagacggtggtatcgtccaaagtcattttccagtttttcagacgacgagcgagcatctccttgccaagatctgcaacctgcatctcattctccttgaggctctgcttgatctttgattttgccttggaggttacaacaaagtttagccaatcctttttaggtttctgattcttagaggtaatgatctctaccaggtctccgtttttgagttcctctcggatcgttgcattcttttggttaaccttggcccccatacagtggtatcccacttggctgtgaatatcaaaggcaaaatcgagcaccgtggcgccaaccgggagtttctttaagtcgccggtaggggtaaagatgaaaatctcttggctgtgtaggtttagcttaaaggagttcaccatctcctcgggcgagatgtcgggagtctcgataatatcgcgaatttgcgaaagccattcatcgataccagcctcctgcctaatgcccttatatcgccagtgagccgctaggccacgctcggcaatctcatccatgcgtttggagcggatttgcacctccacccaacggccatcggggcctacaacggtggtgtgcagcgattcatagcctgtagactttggcactgaaacccaatcgcgcaatcggctggggttgggaatatacttatcggtaaccgtggaatacactctccaacattcggtcttctctttatcctttggtgtatctaggataatgcgaatggcaaatacgtcataaatcttttcgaaaggaacattttgtttctgtatcttcttccaaatggaatataccgattttgttcgtccttttatttcgaagttgagaccctgaaggttcagcttctcttcgataggttccatgaactcccgaataaacttattacgggctactgtagtgtttcgaagtttctttattatgctcttgtaagcctcgttttcggtaaacttcatggagaggtcttccatctcactcttcaccttgtagagacctagtttatgggctaatggggcgtagaggttaaacgtctctcttgcttttgatgcctgttgttcttttgtaaagtgattaagcgaccgcataatttcaagtctgtcggccagcttaatcaggattacacgtatatcttccgaaatggagatgatcaggtttcggtaattctcgctttggtcggcatcctttgaatggttaatctcagcaatacggttcaatccggcaacaatggccgaaacatctttgccgaatcgttgctctatctcggctagggtaagcccaccgaaccgtgtggtgtcgtgaaggagcgctgcaatcactgatgtggccccaagaccaatctcctcaagcacaattcgagctacggccacagggtgaaataggtatggctcacccgacgatcgacgcatatccttgtggacctccgctgccaatttgtaggcctcctttatgcgctgaatgtccttattgtcaaggatatgcatgccggatttaagcagtgctttaaatcggtaaataacctgtttgtgctctctgggtctttcttcgggcgtcattagttttgcaagtgagatataggcaaagataaaatcttcaacaaaacaattggctttttgattggaaaaagataacagtttgggcaataagggaaagtgatttatgctgaagaatatgtgctataacgatttcggaaccaataaaatattttacttttgtcgcagttttggttctccgccattggcggagcgaagagggaatcgggtgtaaatcctgaacagtttccgctgctgtaaactccatcaaaaccttttgctatcaaaaaaagccactgtcgagctagtttcaagacgggaaggccagcaaagggggagtaagtcagaagacctgccaataacatttcgcatttatagctttcggataaagggctcagtgtaattcgtttacattctcttgctttttctttttattccgcaggttatagatgattgaatcttaaacgattttaatcatttgtaacgcatgttgttgagtatttttcttgttggagtcttagctctccccagcgatatccctcctgtgacaagcacaattgaggataccatcacccttaaagaagtggtgattagctccaagttgaagcgcttttctgctggtctctccgtaaaaataatttcgcccatagatattaagcaaagccggagcttgctcctttccgatatgcttgccagtcagcccggccttgtggtaaatagttatggtcctggagccacttcttctatttctcttcggggtttgaatgcctcgcataccgctgtgctttggaatggtgttaaccttcaaagtagcatgaattccggcgttaactttggcaatatccctactttctttgtcgatcaaattgccgtgcagcaaggtggcaacggcgcactctttggcagtggtgccataggcggcgtaatccacctcgataaccagctggcctttggcaatggaaatagcggagagctatttcagtcggtgggcagctacgggttgtcgtattccgctattaagcatacctatggtggcgaaaagtttgccatttcatcgcggctattttacagtgaggctcaaaacaactacgagtttaggaacacaactaaaatgggtaagcccattgtgaaccagaccaatgccaactatcgtaaggcaggcatcatggaaaccgcctcattcctcgtttcgccagccgacaggcttgttgtggcgctttgggcgcaggatggttataacgcttatccagctatgatgagcacggcatcgagcaatcagaatgattacagcagcttttttcgggcaacatcgcaatggcgcgccaatagaacgagctatgattttaatattaaggctgctctcttcaacgattggcaggcttaccggaatattccggtggagcgatcgaatcaccactcaaccaacggacaggtggaaggagagttcatctatcgaatgtcgcagagccacgtgcttgaagcaggtataaatacggcctatgagcgcgttcgttctaccaattattctgaacctaaggaacggttaagaccagcagccacgctgggttatcggtttagaactgaggatggcggtatcgaagcctttgcaggtgcgcgcgaggagataattgatggagagtctacacccattacctg

SEQ ID NO: 1117 - DNA, 24536 bp, synthetic construct
  source 1..24536: mol_type = other DNA
  misc_feature 1..24536: note = Synthetic
ctgtttccgcaacccggcaagggaatggtggacggaacccagaagcgtcaggcttttcctcttagccctaaacagccgatcactgcctggggactgataggagcgggcatccgtgcatacgactatatggatggtgtgcacaaccgttacggtgtgcacacggttatcctggaagtggacagcgtggaagtgttccgcagtgtggtggatcgcttctcggagaacgagaaccgcatgattaactcgtggacatacgggcaatatatgaaatcgttcatcgaaccgggaaatacattgcggatgttgcatgcttcaaatgataaccggggactgattgatatcaacgaagagcgtccgtaccgctttgtctacaccttgaaggatgccctgggaaacacttcgaaagtacgcttcaccgtgcatggaaagcgggcggagatagctcctgtggaacatcgggagaagtacatcttccgctgggataaggtgaactatctgcaggaacccggtctgtcgctggtgattcctcgcgggatgctgtatgacgacgcgtacctgaattatgtcgtgcgtgcagatagcggggacgttgcctttacttatcagttgaatgacacgcgcatccctttacatggtcgttgcgagttgagcatcggcttgcgtcgccaccctctggaagataggtcgaaatactatgtagcaggcgtgaactcccggggcgggaagtatagcataggtggcaagtacgaggacggtttcatgaagacgaccatccgggagttgggtacgtataccgttgctatcgataccgtgcctcctgaaatcactccgctgaacccgcaacagtggggacgcacgggacgcattacgttcaaggcgaaggataaagaaaccggcataagcagttatcgcggcaccatcgacgggaagtatgccttgtttggtaaacctaattccatcagtgggaatctggtctatgagattgaccctaaacgggtggaacggggtaagcatgtggtggaaatcaccgtgacggatggttgcggcaaccgggcaacagaacagtttacgttcgtctggtaaacaagtctgtatatatgtgacacatgaattaataatttaaatagctaaagtatgaaaagcaaaagactgactctttccgtcttatttgtgactgttgcagtagtgaatgcactggcttgtaccaaccttattgttggtaagaatgcctccacggacggttctacaatcgtttcttattctgccgactcttacgggttgttcggcgagttatatcattatcctgcgggcatacataagaaaggtaccctgatggatgtgcatgagtgggacaccggcaagtatctgggacagattgagcaggcacgccagacgtacaacgtcatcggcaatatcaacgaattccagcttaccattgctgaaaccactttcggaggtcgtccggaactggtagataccaccggtatcatcgactacggaagcttgatttatctcggtctgcaacgtgcccgtaccgcccgtgaagctatcaaggtgatgactgaccttgtacaggaatatggctattacagcagtggcgagtctttcactatcgctgatccgaacgagatctggattatggagatgattggcaaaggccccggtgtgcgtggtgccgtgtgggtggctgtgcgcatccctgatgattgcatctcggcacatgccaaccagtcgcgcatccaccagttcgatatgaatgataagaacaactgtatgtattcttccgatgtcatctcttttgcccgcgaaaaaggttacttcaacggtgtgaacaaggatttcagctttgctgatgcatacgctcctctggatttcggtgcacgccgttactgcgaagcccgcgtatggagttacttcaatatgtttaccgaccgtggtgaggaattccttccttatatagaaggtaaaaccaatcagcccatgcctctctatttgaaagccaaccgcaaaatttccgtacaggatgtgaagaatgccatgcgcgaccattacgaaggtactccgctggatatcagcaaagattttggtgccggtccttatcacaccccttaccgtctttctccgctgtccttcaaggtgaacgaccaggaatatttcaacgaacgtcccatctctacccagcagtcaggtttcgttttcgtatctcagatgcgctctaccatgcccgatgctatcggtggcgtgctgtggttcggtacggatgatgccaacatgactgttttcacccctgtatattgctgtactgataaagtgcctgtatgctactctcgtgtagatggtgccgactatatcaccttctcctggaattcttctttctggattttcaactgggtggcgaacatggtttatccccgctacgacctgatgattggcgatgtacgtgcaagccagtcggagatggaaactactttcaatgatgcacaggaaggaatcgaatcggctgcatccaaactctattccaaagatcctgcccaggcaaaagcattcctgactaactatacgaatatgaccgcgcagagtacgctcgatacctggaaacgtctcggcgaattccttatcgtaaaatacaatgacggtgtggtgaaacgtatgaaagacggtaagtttgaacgtaatgctatcggtcaaccggcaggtgtgatacgtcccggatatccgaaagagtttctggaagaatacgtgaaacaaaccggtgatcgctataagatgccggagtaacaccctgttgcaggctttgtagatttcgcaggaacaataagaagcctgtgaaatctgtacaaagcagtgtaaatctttaatggaaaagtaggatatttgaacttattcgcctacatttgtgtcttacaactaatagatatattttaacctctaaaataacaataattgtatggaaaatcaggaacttatcaagcaggtaactgagaaagcccagatgtggctcaccccggcatacgatgccgaaactcaggctgaagtaaaacgcatgttggaaaacgaagataaaactgagttgatagattgtttctataaggatttggaattcggtacgggtggcctgcgcggcatcatgggtgctggaaccaatcgcatgaatatctataccgtaggcgctgcaacacaggggctttccaactatctgaataagtgtttcaaggacaaagagcagatttccgtagtggtaggttatgactgccgtaacaatagcgacaaattcgctaaaatctctgccgacatcttctctgcaaacggcatcaaagtatatcttttcgatgatttgcgtcctacaccggaagtttcattcgctatccgtcacttcggatgccagagcggtatcaatatcactgccagccacaatccgagagaatataacggttacaaggcttattgggatgatggtgctcaagtacttgctccgcacgataccgctatcatcgatgaagtaaacaaggtgactgttgccgacatcaaatttgaaggtaacaaagacctgattcagatcattggtgctgatgtagataaggtttatctggatatggttcattctatttctatagatccggaagttatcaagcgtcagaaagatctcagcatagtttatactcctctgcatggtgcaggtcgtgtgcttattccttcttctctgaaagaatggggatttgagaatgtaaattgcgtacccgaacagatggtgaaggacggtaatttcccgactgtggtatctccgaaccctgaaaatgctgaggcgctttctatggctatcgcattggcgaagaaacttgatgccgacatcgtaatggcgagcgatccggatgctgaccgtgtgggtatggcttgcaaagatgataagggcgagtgggtgcttatcaatggtaaccagacttgtctgatcttcttgtattacatcatcaagaaccgtattgcaatgggcaagatgcagcccaacgacttcatcgtgaagaccattgtaacgactgaactgattaaggctgtcgctgataagaataagattgaaatgcgtgattgctacaccggtttcaaatggattgcacgtgaaattcgtttgagcgaaggcaagcagcaatatattggtggtggtgaagaaagttacggcttcctggcagaagattttgttcgggataaagatgccgtttctgcctgttcattgttggctgagatctgtgcctgggctaaggatcagggcaagacgctgtatgatgtgctgatggatatctatgtagagtatggtttctctaaagaaacgactgtaaacgtagtgaaacccggtaagagcggtgcggatgaaatcaaagccatgatggataacttccgtgctaacccgccgaaagaaatcggaggttcacctgtcaaattgatcaaggattataagacattgaagatgatcgatgctcaaggaaatgctgttgatctggatatgccggagacttcaaatgttcttcagtatttcacggaagatggtacaaagatttctgttcgtccgtcgggtacagaaccgaaaatcaagttctatatcgaggtgaagggcgaaatgggttgcccgaaatgctacgccagtgcggatgcagaagcagaagaaaaggtggtggctgttcgtaagtcactcggtatctaaagataaactgctgtaaggcagaaggaaaggtgtaatcctgcgaagggttgcaccttttttgttttttgccgggcagtgtgtgctttctttccggattaaggttcttttactttctttaagtcattcctctaatcattctctgttaaatgccgttctataagcaacatctaaacctaaactaaaatagttatgaaagatcttgttgccggcattaagtatgatgccgctaaagtgattgaacaggccgtagggccaagtaaagaattctgcatgggttacatgaaccccggtactccgaatggtcagggatacatctctaccatgaaactctcagtgggcacagtcgatgtaaaagaccttgacgtagttaccgaaaacattgtttcgtatgaccgttgcgaaaagaacgatgcctatatcggacaaatcaatatgctgaccgtatcttctttctgtggtcagaacggtgctgtatggggatacgacctcgctgtacacgaagatattgctacaggtaaggagaaatccatgtacatgcaggaacaaccggatggaaaacccgctattcccgtatataatgcccgcccgttgctggaagcaagcgaacgtcttttcggacgtgagggccagcgacgcttcccacccatgccgggtgcacatgtcatctgcgccaacaaggatgtgacagcccgcggacctgtgtgggtatggtcggccattggcatcgctatcctgaaaaatcgtagtgacggctcttgcctcttcatcgaggatgccaacacgtatggcgatgatagtactaccgaagccgaaatcataggtttcctggaaggctcactccgtaaagtaaccaacagcattgtgctgtgtggacaagaccagtcggtagagtacgaccgcatttacgtaggctacaagtacactttcgtagaaccgaatcaagtgggttgcgcgttgacttgcgccccgtacatttatctggctcagaatgccattcccgaaggaatgaaagctgccgacctaaaaggcatgcctatcgacgagtgggaaaagaagctgggacttgagcacctgacaatgattgaataataagacctaacctagactttacctatataaatatttttatcatggatgaaatgaaagggacacgttatcccattttcggatttgtaacaggtggtacaggcgcttttaatgacggtattccacctcagccttatgaaacctttgcctatgacctcgccttgcacgaagccggaattgaaaactttaatgtaattccttacacctctgttatgccgcccgaaatacgtggcaacctggtgaccattaccccggagatgaatcagaaattccattatctgcctttccgtcccgacattaaagaccagtttcatcatggagcagtgctggaagtgattgtcgccggatcgggtgccaactatgtcgaacataaagcaattgctaccggcgtgggcatcgtatgggcaaagaagaacggtaagtttgtgggaggttttgctgccgagtatgtgcagtattacgactcaaagattgatgatgaaatagcgggtgcagaagcacgcatgtggttgaataagtcgttgaatcatgaactctccatgcgtggcatggaacaggacggtgataaggagttattccataatttcatcaatataccttccgataatccgtttgcatactgtctgacggctatcggtttcctgaactttggttatgcatcattagctaaataagtgatatggcggatacttcaaagaaattaggattgggcggactcgtcgctatcgtcttcggttccatgattggtggaggtattttcaatatctcgcaaaacatggcacaaggagcggggttaggggccactcttatctcctgggtcatttcgggagtgggagtattgtttcttgtgctcaacttcaaggtgttggccgatgcccgtcctgatctcaatgcaggtatctatcagtacgcaaaagagggttttggcaattatgtgggatttaacattgcctggggatactggctgtgtgcagctatgggtaacgtggcgtttgctgtgatgctcaatgactcgttcggtgagtttctccctgtgctgcttcatcatggctggcagacggtggtgtttggatcgttcttcatttgggccatgtatttcattgtggcaagaggtgtgaaagctgctgctgctctgaatacaatagtcactatcgtgaagttcgcggcgttgatattaattgtcattatcctctttattttctttaaaataggcgcgctgagttttgatttctggggacatacgcctgacttgggatccataggagcacaggtgaagagtaccatgcttgtcaccctttggtgtttcatcggtgtggagggtgccgtggtgatgtctgcccatgcccgcaacagtaaagatgtgggtaaggcgggtgttatcggctttctgctggcgttggtgctttatgcattaatcagcgttttgtcctatggtatcatgcaccagcctgaactggcaaagttggatgacccgtccgtggcatacgtgctgaaacatgcggtgggcgactgggcttatacctttgtggtgctcagtgtcatagtctctgttattggtggttggattgcctggacgttgatgtgtgcgcaagtaccctatacggctgctcaggtaaagatattgccgaagtcattcctacgtgagaataagaagtcgacacctatttatgccttgctgatatccagtatcatcatgcaggtgtttatggtgatggttgctatggcaaagtcggtttacgatgccgctatcgacattaccggtgtcatgatccttcccgcttatctgttctgcggaatctatctggtgaaagccagctttatgaaaggggaactgagcacaacagatccgaagaagattggtcaataccgctttatcggtatcgtgtcttctttattctgcctttggttgctctatgcaggtggattgttgcttttgcttgtgacgtccattttctatttggtgggtatctatttctatgtagtggcacgcaaacagaaccgggcgcagggggaaccaatcttctctcatgctgaacgttggctggcactggccattgcggtttgctccgtaatagcggtgatactgttgattgagggaaaggtgggactctgatcatttaaaattgaagaattaagagttaaaagttgtcggctgccgggaggcagttgccgatagagataaaatacagattgcggttgcacgcgattggttgatgtgaatgagagtcgtttcattcgtagttgttcgtttgttgagtgcgtgtcctccgcaatctgttcttatttcatttatctctctccttttaactttttaattcttctttttgatttagccaccagtctatcattttccgtgcgatacttagtttacgtggtatttccggaaggttctctttggagtagaaagcaccggcactgagttcgtctttctgtagtttgatttctccgtcttcataatcggcaatgaaacctaccattaatccgctgggatagggccaaggctgatttccgaaataagtgatgtttttcacttttaatcccgtttcttccattacttcccgttctacacattgttccagcgtttctccgggttcaaggaatcccgctaccagtccgtagaatgttccgcggaagttgcgtgcatgcaccagcaaaagttcttctccacggcgtatcagtacgatgatagcggtagaaatggatggatatatttcgtaggcacacgaagggcactttttcatgatagctgtttgttgttccgtaggcgtgccacataccggacaaaagcgactgtgctgatcccaatacaatatctgataagcctttccggcagctttgtagtcatccagggtgatgtattcgtaagagcctcgcaggttgaccatgatccagtcttcagtttcctcaacaagttgttcgatgtcgaatgcgtgcaccatttcatccgtaggcagaaatacttcatgaatagtgctacctgtaccgggtttcaacggtggttccgtaccataaggtacactgtatttaatctctcctttttctgttctttcttttttcagcagcagttggtccttaaagaagacgaaccactgcgtagggttttgatctagttctttcattttccttcttcatttttgatgtatactacatttctgcctgttccgcgtcggcgcaggacgccttcagtgataaatgcattcaactcgttcatggcagttcgctctccgctaccggtcagcctgatgtattctctccgtgagacgcagatatttttatcgagaaatgtgagcaatgcttcttttttcttttcgatattgatgtctccctttgaaggacgggtaggtgactggatacgttctaaggtcatttgagttctcattttctttttgaacgccttgctagtgcgcagacacacatttttaaagacgattgattctgcacgtatctttttctccggtgtggcttctcgcagacatttcaaggaagtgctaaggaaaccgagttctcctaattctacgatattaccgtccgatagcaattcgcacaattcgtccgtaataccctgtagagctccttccaacagggcgtacggaaggtgttggagcatagctacttgtttcagaaactctttggtggtgtacgtttttttaggatagatacgggcgtgaagcgctttttctgctttttttcctttcggagcgggcgtttcgtaaagatcataatatgcactcataagcttttgagttaaagggttaatgatgttgtttttacgaagtgcataaatatattcttgttctttcagtaattaaattctttagttctgacgaattaatattgcattcgcatgaatttatttgtgcaacaagtataactctttcatgcaatatttgtatatgtttcgtgcaacaaatgttgcatgaaaaaatcacatcctttgcatgagaaaattttagcatgcaaaggtataaataatagtgaaacgatggagagttttcaggaaaagaattaataattgtgcatggtgttgaaagtgtagtaggggcaaggcataaaaaatcccccgttaaaggacgagggaacctaatgttttcacaacggaataatccttattgtgattttctttcattttagtacgacaaagataggaaataaaaatggtataatctatacttctgatatttattttttctacttttgtgaatatgaactttaaaacatgatattatgaaaaaagtaacactgggtttggatctgggaaccaatagtgtgggatggtctgtcataaattcgataattaccaaacaaagtgaaaaaatatggttagagatggctggcagtcgaataattcctatggatgctgctatattgggagactttgacaggggaaattccacttcacagacggcagaaagaactcgtctccgcgggataagacgtttgcgtgaaagatgtttgttgaggcgtgaacgattgcacaaagtattgcacatattagaatttttgccggaacattattctgagcagataagctgggataaacatccaggacaatttatgaatctgacagagcctaaattggcctggaagaggagtgaaactggaaaatatgaattcatctttcaggccgcttttaacgagatgctggctgattttgcacaacatcagccaacattagtggcaaatggtaaaaaagtgccttatgactggactatatattatttaagaaaaaaggctctgacagagaaaataactcaacaagaattagcgtggattttattaaatttcaatcagaaacgtggatattaccaactgagaggtgaagaggaagaagaaaaatccaataagcaggttgaatattatgctttgaaagtagtgtgtgtggaggcaacggacgagaaaaagggaaaagatacctggtataatgtacatttggaaaatggatggatttatcgtcggtcaagtaatgtcccattagattgggagggcaaaattaaggagtttattgtgacaacagatctgaatgaagatggaactcctaaagttgataaacaaggtgaggttaaacgttcgttccgtgccccaaaggaagatgattggacactgataaagaagaaaacagaagcggatgtggccgatagtcgtaagactgtgggctggtatatctacgatatattactgcaaaaacctcagcagaagataagaggaaagttagtacgtactatagaacgtaaattttataaagaagagctaaagcagatattagaaaaacagtctgttttccatactgaattgcaagaccgtgatttatataagaaatgtcttgaatgtttatatccgcaaaatgatgcacacaagcgcaacatcgctaatcgtgattttgtgtatatgtttacagaagatattcttttttatcagcgtccattgaagagtaagaaatcgttgattgacgattgcccttatgagaagaatgaatatgtggacaaggagactggtgaaataaagcatgcgtcattaaagtgtatagctaagtcgcatccattatttcaagagtttcgtttgtggcattttctatcgaatatcaggatttatcaaaaagaaaggcagcaaggagacagattgttgactgatgtggatgtgactagtgaatttttgaatacagaggaagattgtgtagctttatttgaatggttgaatgaacgtaaggaaattgaccagaagaattttctgaaatatcctcagtttaatctgaaaaataaagcagtcaactatcgttggaattatgtggaagataaaatgtatccttgcaatgaaacaagatatttaataaaatcccgattagacaaagcagatgtcttctccggagactttattttatctgcagaaaatgagatggctctgtggcatatactatattcagtcagtgataaagttgaattagagaaggctttagccacatttgcaactaagcatgctttagataaggtcgctttcgttgaaacctttaagaaagcgcctccatttgaaaaagagtatggagcttattctgccaaagctataaagaaactgttgccattgatgcgaatgggaaaatactggagtgcagatgctattgatgaaacgactagagagcgtatagacaaaatcgtaacgggcgaatatgatgaaaagattcataataaagttcgtgagaaatctatacatttgcagagtgttgatgacttcagaggtttacctttatggttggtttgttatgttgtatatgggcggcattctgaagtgaaggacatcgctaaatgggaaatgccatctgatatagacgcttatttgaaagcattcaagcagcattctttgcgtaatccgatagtagagcaaatcatagtggaaacactacgtgtggtccgtgatatttggaagcgtgtagggactattgatgaaattcatgtggagttagggcgcgaaatgaaaaatacagcaaaggatagggcaaaaatgacgatgcaagttttggaaaatgaaaatgctaatcttcgcatcaaggcattattgacggaatttgtgaatcccgaatataacattgaaaatgtgcgtccctattcaccaagtcagcaggagttgttacgtatttatgaagatggaatattaaattatgtagcggatatcccggaagatattgagaatttcctgaaaaaactgaaagacagtaaatctccttcaaaatcagaatttatgcgatataaactatggttggagcagaaatatcgttctccttatacaggagaaattattcctcttgccaaactgtttacaccggcttatgagatagaacatataattccccaatctcgtttctttgatgattcgttcagcaataaagtaatttgcgaatcagaagtgaataagttgaaagataaatacttgggatatgagtttataaaagagcatcatggacgaaaagtcgaattgaatttcggtaaagtcgttacgattttttctgttgaggcttatgaacagtttgtgaaggaacattattcgaaatcgagggctaagatgaaaaagctgctgatggatgatataccggaagagtttatcaaacgccagttaaatgatagccgttatattagtaaggtaattaaaactttactttccaatgttgttcgtgagaaagacaaggatggcgagtatgaacaggaagcaatctcaaagaatgtggtggtttgtacgggtagcgttacggatagattgaagaaggattggggattgaatgatgtttggaatagtattgtttcttcccgattcgaacgtttaaaccaattaaaagatacccaatgcttcggacactgggaatgtaaggatggaaaacgcttttttcagattgaactgccgctggaacttcaaaagggatttagtaaaaagcgtattgaccatcgtcatcatgcgatggatgctatcgttatagcttgtgcctcacgaaatcacattaactatttaaataatgagtcagcaaggaaggatgctgaaataactcggcgtgatttacaaagattattgtgtgataaatataagacggatgataatggaaactataaatggatgatcaagaaaccgtgggatacatttacacaagatgtgcaggctgttttgaatgatattgtggtaagctttaagcagaatattcgggtgataaacaagagtactaattattatcagtgttatgatgaaaaaggtaagaagacgttactagcacagactaaaggagataattgggcgataaggaagcctatgcataaagacacggtattcggtagagtgaatcttcgaaaagtaaaggaggtacgattgtctgtggctttggacactcctgaaatgattgtagataaaaaaatgaaagcgaagatattgcagctcttttcttataactatgataaaaaacgtattgagaagtattttaaagaaaatacagctctttggaaagatttgaatctgacaaaaatagctatttactattttacagataattcttcggaaccattggtagctgtgcgcaaagctttggatacaagttttacagagaaaaaaattattgaatccattacagatactggaattcagaaaatattattgaaacatttggagtctaaagaaggaaaagcggatttagctttttctcctgatggcattgacgaaatgaataggaatctggaatttctgaataatggtaaacctcatcaacctatttataaagtaagggtttacgaaccacgtggtaataaatatagtgtgggtgagacaggacagaaatcaactaaatttgtagaagcagctaagggtacgaatttattttttgctgtctatgctgtgggagatggaaagagagtgtatgaaacaattcctttgaatattgtaattgaacgtgaaaagcaaggctatactcctgttccggagaaaaatgaggctggaaataaattgttgttctggttgtcaccgaatgacttggtttatgtgcctacagaggaagaattggagcggggtaggattgaggaaccgatagataggaagaggatatataaagttgttagttttacaggaaatcgtttatatggagttccttatgcaattgcaaatatgatagttgacaaggtagaatatttctctttaaataaagttgagattacagatagtaaagaatcaattaaagagaaatgtattcctttaaaagtggataggttgggtaatataataaagattggaactttaaaatgagtatactttttgtgaaaaaaaacatttggtttggaatagaaaagagttctttgttgatgtaataggtctattgactgacagagtcaattttacagattgtaaaaaacagaatagaaaatggtaaatgttctggggacaacttgtccccaggtagaaataatcatagaagggttcttgctgttaatatcaaagctctatttagtaactccaattagttgatatttacaaacgaataatatgcatcaattgccatttgaagtagatgatgagtggtaatcattaaaatagaaatactatgattaaaaagacattttattttggaaatccggtttatttatctttaaaaaatgcgcagttagtgataaaattaccggaagtggtaaagaatggaattttaccagaaggatttaaacagaagtcagaagtgactaagccaatagaagatattggtgtagtggtgttggataataaacagataactattacttcgggagtattagaggctctgcttgaaaataattgtgctattattacttgtgatagtaaaagtatgcctgttggtttaatgcttcctttgtatggtaatacaactcaaaatgagcgttttcggcagcaattgaatgcttcacttccattaacaaaacaattatggcaacagactgtcaagcagaaaatagagaatcaagctgctgtattgcagagatgttcgggtgaagagataaagtgtatgaggatatgggcggccgatgtgaagagtggagacccagataacttggaagctcgtgccgcagcttattattggaaaaatttatttgaaatagagggctttacaagagatagagaaggtattccacctaataatttattgaattatggatatgctatattacgagctgttgtggcgcgtgggttggtggtgagtggacttctgcctacattgggtattcatcatcacaatcggtataatgcttattgtttggctgatgatataatggaaccttaccggccgtatgtggatgacttggtttatggtattgtgaagagtgggataggttatgaggtattgacaaaagagataaaagggcgacttttgtcaattccaacattggatgttgtcatttcgggcaagcgtagtcctttgatgatagcggtggggcaaacaactgcctctctttacaaatgctttagcggtgagttacgcagactatcatatcctgagatgtgatggaacgctttagtgaatatcgcattatgtgggtattagtattgtttgacatgcctactgatactaaaaaggataggaaggcatatgccgattttagaaaaaatctgcaaaaggatggttttactatgttccaattttctatttatgtacgtcactgcgcaagtagtgaaaatgcggatgtacatataaaaagagttaaatcttttttgccagagtttgggcagataggaatcatgtgtattacagataaacaatttggcaatattgaactttttaatggaaaaaaggctcaggatgcgggtgcgccaggacaacaattagagttgttttaaaattaaaatcccgccaattagcgggatttttagttgaaaacagcttgttttttataattctaatttgcaatgtaatggattgattattagattgtaatagggaatctgctgtttctaatggttcaaagatactaaaatgaaagcaaatcacaactcaacggcaacagtcgtaccggtgacggctgctgtttctaatggttcaaagatactaaaatgaaagcaaatcacaacggaaggtggcgaagaggtcgttttccatcggctgtttctaatggttcaaagatactaaaatgaaagcaaatcacaactgctgtaggcattgcatttctaacttcttcgctgtttctaatggttcaaagatactaaaatgaaagcaaatcacaactgacgggttcaactttgtaggaatcccagcgctgtttctaatggttcaaagatactaaaatgaaagcaaatcacaacacaagctggacggtaatatactaattacggctgtttctaatggttcaaagatactaaaatgaaagcaaatcacaactgacgggttcaactttgtaggaatcccagcgctgtttctaatggttcaaagatactaaaatgaaagcaaatcacaacattctttcagagtcttcatgactacttttagctgtttctaatggttcaaagatactaaaatgaaagcaaatcacaacgccttgtaactgttatccatttttgccgatgctgtttctaatggttcaaagatactaaaatgaaagcaaatcacaacttcgcttggcttggttggacggtgacgttgctgtttctaatggttcaaagatactaaaatgaaagcaaatcacaacacaagctggacggtaatatactaattacggctgtttctaatggttcaaagatactaaaatgaaagcaaatcacaacatgccgatgagtgggaggaataatgcccgcgctgtttctaatggttcaaagatactaaaatgaaagcaaatcacaactactattcataattgttgttgtggattatggctgtttctaatggttcaaagatactaaaatgaaagcaaatcacaacgcgcagagcggggcgtattcctgaacggcggctgtttctaatggttcaaagatactaaaatgaaagcaaatcacaacgatgcgtcgcacgagaacacaaggaaacgtgctgtttctaatggttcaaagatactaaaatgaaagcaaatcacaactactaaaggtacagaaacttacaacaactgctgttcctaatggttcaaagatactaaaacagaagcaaataaaagactaaatgagcgattatagtgaggattggtaaaactttttgtaagttatgagaacatagggtatattatattctaagctggtttttgtattatattctgttatcattacttgaaataaataattttaggggcgaaagctcagatgaaagatcatattttatttgttcttcgtcttttacttgatttttccttaaaagttatctgattgttttttggtatgcgattcttgctgtcccgttagatacatacacaactccgcaacggacaaacccgttccgcatgagcaagttttgcatgataatattgtctttatgtgtatccgcacgtaaactgggatattgcttggcgcaccaatttaaacaaatatcaccgatacctttataacttccatcagaggcaatgcggtggatgacgtaatagggctcatcattcaaccaagctccgtcttcgataagagcataaaacggatcgggactcggaacaaaacagaatgttccgacgatttttttatattcatcttcacatacatagcaatgtccgtcggtgatttctttggcaatcagttcacgctgtgggtagccgttgatccactggttaccgtttcctacagatgccataaagttgcgggcataatcgaatatctccatcaggcggtctaagtctgaaaactggctgggacgaatttgtatcatatatgtaaacctgttaagttgcttattccggaatacaaaagtacatgattattttgataaatgataatttatcggcgtgcatcccctaagcctgaaaggcttttatcttatagcccagggtaacaccctgggtaatggatgctcccacaatcttacgccctgtaagggcaaaagcccatgtgtgctgtaatgcccttacagggcgcaaagagaaacacatggcaatcccccagggcgttgccctgggctataagataaaaggctttcagcctaccaggtactatcacgtcaatgagtatgccgaaaggaaaccttgatccagcgctacgctggtaaattatcatttataaccccaatttttcaatcttcctatacaacgcgaatctcgtaatccccagatactctgccgcccgcgtcatatttccttcgctcaaccgcattgctttttccactgcctgccgttccaattgttccaggttaagcacctcttcctccttcttgggacggggagcagaagcctgaaacatgaaattatcgggacgtaacagcgagccatcacccagaataacggcacgttccattgtatgctgcaactcacgcacattgcccggccagggatatttcaacaacttggcttttgcttcacgtgtcagccctttcatttccttttgatatttccgggcatagcgttgcaggaaataatcggccaacaggagaatgtcattcccccgttcccgcaaaggcggaatatgcagttcaatcgtattgatgcgataaagcaagtcctgccggaaattaccttcttcgaccaaacggcgtatatccgcgttggttgcacaaatcagacgtacatcaataggcaccgcctgtgtacttcccaaacggctgatttgccgtttttcaatagccgtgagtagctttgcctgcataggcaatgaaagattacctatttcatccaaaaacaatgttccccctgtcgccacttccattcgtccggcttttgacttccgtgcatcagtaaatgctcctttctcataaccgaacaattcactctcaaacaattgttccgggatgcttccgaggtcaatcgttacaaacggccgtccgtaacggggcgaactgcgatacaacaaacgggctattacatcttttcctgttccattctcaccgagaatcaaaatattagcatccgtatcacgcaatttatccactgtcgaaaaaacgttctgcatcgcagctgactcaccgataatggcttcttccgtagcacttccggcactactcagcacttccacctgttctttcagcagattgatttcacaacgggaacgccgcaatttcataccggacgagagtgtcgcaagcaacttctctttctcccagggtttcggaataaaatccgtagcaccggccttgatggcacgcaccgctttatctgtgtccgcatacgccgtcataaaaataacaacagcctgggagtctatccgcagaatttgttccaaactctcgaaaccttcctgcccactgatggcatcacggctgaaattcatatccaacaatatgatatccggctggaaagttgtcataaaatgttcgatacggtcgggagttaccgccacttttatcttctcggcatagggttccagcaaaaggttgagggcaaagagcacgtcctcgttatcatccactattaatatctttcctaactgttccatagcaactctgtttttcagtaatccttttctatattatgtctataccaaacatatactttcccatagtctttcattacctaagttgcacaactcggtactaccaacatctacaacttaagactcccaagttgtgcaacttagtaatcgtttccctataagaaaacatcgctttggttataagcaaaggtatgtttgcctataagtaaaacaaaacttgcttatacccacggcaaagataagtaatatattgatgtgttgtgcgtgcgtatacgcactatttttgtgcggtatagcacacgaaacagcatttcacaatccagatatatcactaataaacaataccttacaactttggcataggatttgaaactcttttatcaaaaggaacatactatgtacaaaaatatacttttatcaataataacttgcggaactctggtaacagctaccgcccaggagcacactttggagctaactttgaaccaaacgatagaacgtgcccgccagcaatcgcctgatgcacaaacagcccggcacagtttccgttccgcctattggagttacaaatactatcgggccaactacttgcctgcattaaagctgacctccgacccggctttgaaccgtgccatcaacaaaatcacgatgagcgatggtagcgtaaaatttgtagagcagaatcttttaagtaccgacctcactctgagtctcacacaaaacatcccctggacaggaggtacactgtttgtagaaacatccgcccaacggcttgacctgtttagcgataacaccgtttcatggcagacatcccccataaatataggttacagccaggcacttttcggctacaatagtctgaaatggaatcgccgcatcgaaccgttgcgctatcgagaggctaagaaaacctacgtagaaaccctggaacttgttgctgcccgtgccacacaaaaattcttcgcccttgctacggcacaaagcaactacgaaattgcttctaccaactatgccaatgctgacaccttatatatatacgcgcaagggcgctataacatcggcaccatcaccgaaaacgaaatgctgcaactggaactgaataaactgactgaagagaccaaccgcatgaacgcacatatcgaggtagaagattgtatgcaggaactccgttcgtatctcggcattcaggaagacgtgttgataaaggtagaggtcaacgaccacgtacccagtcttcacattgacctgaatgctgccttgatgacagcaagagaaaacagtccggatatactgaatatgcaacgtcgtaagctggaaagtgagagcaacgtcgccaacgcccgcgccaatgccggattgaaagccgacctctatctccgtttcggactgacgcaaacgggaaacaaactgaaagatgcctatcacaaccctttagaccaacaatacgtcaccctcggcatcaatctgcctatattggattggggacggggaaaagggcaggttcgcgtagcccgttccaaccgtgacctgacctatactcaagtagaacaggacaaaacggactttgaattgaatgtccgcaagctggtacagcagttcaatctgcaatcgcaacgcgtacacattgccgcccgcaccgatgaaaccgcgcaacggcgtgccgacgtagcccggaggctttatattttaggcaaatctaccgtactcgaccttaatgcatccatcagcgaaaaagacgctgcaagacggaattatataaccgcattatataattattggagtttgtattacaccctccgcagcatcacactctacgattttgagctggacgcaccgctgacggaaacggaaaggatagaagcggtgatggatgagatgataagaaaatagaatcataaaccataccactatataaatcgaaaaaataaatagcattatggatattaaacttgaaaagaagccctggtacatccgctaccgttattatctggcaggaggcgttgtttttctcgctttccttatctacgtcatcatcctttccgccggtccgagcaagcttcgcatcgatcaggaaaatgtacaggttgcagaagtgaaaaacgataagttcatggaatatgtagatgtggaaggacttatccagcccattctcaccattaaaatcaatgcccgcgaggcaggaagcgtggaacgcatcataggcgaggagggaagtctgcttcaaaaaggagataccatccttatgcttgaaaaccccgaccttctgcgtagcatcgaagaccagcgcgatgattgggaaaaacagctgataacctatcaggagaaagaaatcgagatggaacagaaaagtctgaacctgcaacaacaaaccttgcagaccaactacgaactggatcgcctcaagaagagtttcgatctcgataaagaagaatacaaaatgggtatcaaaagcaaagcccaactggaagtttccgaagacgaatacaactataaagtaaaaaacgcacagttacagcgcgaaagtctgcgtcatgactccgccgtaaccgtaatccgtaaagacttgatccgcaatgaccgcgaacgcgaacgcaagaagtatgaacgtgcttgcgaacggctggaaaacttaattgtgaaagcccccgtcgccggacaactcagttttgtaaaagtgactccgggacaacaggtttcttccaacgaaagtattgcagaaatcaaggtattagatcaatataaaatccacacatctctcagcgaatattacatagaccgcattacgacgggacttcctgccacaatcaattatcagggacgcaaatatccgctccgcatcaccaaagtcgttcccgaagtgaaagaccgcacttttgatgttgatctggtatttaccggagagatgcccgacaatgtacgtgtcggaaagagtttccgtgtacagatagaactgggacaaccggaacaggcaatcgtcattccacgcggtaacttctaccaggccaccggcggacaatggatttataaactgaatgcctccaagaacaaagcaacacgcgttcctcttaatatcggacgccagaatccccaacaatatgagattacggacggtttacagccgggagattgggttattacgacgggatatgataactttggcgaagcggaagagttgatactgaaataagaacaaatacatgatacaacattatctaaaaatagcaaccagaaacctggtgaggtataaagcacagactttgattagtatcattggtctggcagtaggatttgccagctttgctttatccagtatgtgggtaaattatgagcagagctatgatgctttccatgatggagccgacagggtttatgtggcctctgtttcatccgtattttataccagtggtaattccattatcacttctccactgttggctcctcatctggtcaagacctttcccgaaatagaagcggctacctacaacaatttcacgacggaatttaacgacgaacagagcagacattggaagatgatatcagtggatagcgcttttatttcaatctttccgataacggtactggaaggcagcttgcagtttctgtacaatacagctgacgaagtagccatcagcgataaagctgcccgcttactttttggcgatgagtcccccataggcaaagaatatccatttaataaaaagctgattattactgccgtggtgcaagagtggaaaggacattcaaattatgacttcgatgttatatcaagacgtccaactccacaatatcaggaatggggttatgctgccggaacaaccttgtttcgcgtagttccaggcgctgacatcgatgctttgcggaagaaactggaaaacatggaagtcgacatggacggagatataaagaagtatcctgttcagattactccattgaccgaattgcattatacatatccccaatacaatacatttgtccgcatagagtatgttcgtcttttttgcctaatcagtttgctgatcgtattaggagcactgtccaactacctgattatatatctgatacgtattcgaatgcgacaacgcgaatgggcactccgtaaagtaaacggggcaacagaaaagagtctgattatcctgttgatgtccgaaattatactacttctgttcgcagcaatcctggtcggattgttgttggtggagatatgtctgcccacattcaagcagtggtcttatatttctgaggaaaataatttctttttctataaagagacacttatctatatgtcaattgcaatgggtatcgttttactctttgcttggggaacactgttggttcagcgccattttacattgcagtctgccatatcttccattttcacccaccgtttttccgctttttaccgccggacaggactttggcttcagttggtcatcagcattggttttatcttttgcacagcggtaatgatgaagcaactgcaccatctccgtacctcttctgacatgggagttgcccacccggatctggaatatgttgcctaccttcaaggtattccagacgatgaaaaggaaaactggataagactgatggaagagattccaggcattgacttccgggaagtttcaaacctacctttacccagttcttccaattcgatgtttactacatcagaatgggatgacaaacaaccgggtgataaagaaattgcaatcaatgactttcaggtttcaaagga

SEQ ID NO: 1118 - DNA, 24536 bp, synthetic construct
  source 1..24536: mol_type = other DNA
  misc_feature 1..24536: note = Synthetic
  variation 17774..20009: note = n is a, c, g, or t
aaagagtataagtttgatgtttttgatgactggactttagggggaatttacagggatgtaactttggagtcaatgccgtccacccgttggatagataatatggttgcgcagactttttttgataatcagtttgaggatgcagatttgaaactgcgtgtcatggtcggtgataaacagaagcggacagtgccgggtaattatccaactccgggcacaccatacgatcttcggtttacacttaccgataaagaggggcgggaagttaccaaacgccaattgacaataccggctcatgtatctacagaccgggaagtaagccagacattccgtattcagtcacctcatcattggaatgctgaaagtccctatctttataatctgtctgttgagcttattgaagatggacaggtgacacatacgcgtacggaaagaattggatttcgtcagatttcaacagtaggtggtgtttttagaatcaatgggcaggctgtgaaactgcgcggtgtaaaccggcatgacgaacacccggacgtagggcgtgctactacacgtgaacactggttgcaggatctgactcttatgaaagcggctaatatcaactatattcgcctgtctcactatactccggcgaaagggtttatcgaattgtgtgatgagatgggtatgtatgtaggtaatgaagtctcattaggaggtgccgggaatttgatgtatgatccttcttgttccggagctgctctgcaacgttcgtatgaaacggttgtgagagatatcaataatccgtcgattatttattggtcggttggcaatgaagatccgttgacttcattacatctggcatctgtgaaactggtaaaggcactggatcctacccgtcctgtcctattaccttggagagccgaggaatggctgccggaagaaattgatatgcttgctcctcattattggaagccgcaagaatatgaccggttggcagctcattctgaccgccctattatttccacagagtatactcacgcctatggtaatactggatttggcggattggaagcccgctggaaagcattaactaaacatccgtcagggacaggagctgcaatttggatgtgggcggatcaaggtatcaagactccggtacgtaatcctcaaaaaaagaataaggatgtacatgcaggagatgattatctgcgaattgattatgcaggatgggacggtattgtggattcttatcgtaatttcactcgtgactattgggaaacgaaggctgtatatgcccaggtttatcctagtgtagagaagatttcattcactcccggtcaggattccttgcgaatccctattcaaaatgattttgattttacgaatcttaatactgtaagaattgactggtctatccgcgaggatgcgaaggtattggcatccggtacgaattcaatcgacggacagcctcatgccgaatctacattcaagctgccgatggaagctttgaaaacagtacgtacaggaaaaaactattatgcatggttggtctttgtaaatgctaatggtgaagagattacgcgagatgctgtagagctttgtcctttggtggaacagactgaaacagttctgccttatggaaaaatattggttcatcagtctgaaactgtaacgattgaaataggtaatatacgttatatttttaattctcaaaccggccaattgacttctgcggaggcacagggaaaacaattgattacagctttgtatcctataatatggtgtccgcttgatccgtgcgagaaatctgcatttgggaaagagaatgtccgtaaggctgttgacttgaatcagtatacaatatctgtcaaggaatggaatgtagaaaataaatcggatgaagttgttattcgggcaaaagtggattatcacgtagattctgtcaatcattttaccgctacttatcgttattcaataggtgtgaacggacgtttggatgtaaattatgagattctgaccgatgtagctattcctcaagtgcccatagttgggatgacaattaaaactgcccctgaactcaaagaactgcattggttaggtcttggaccttacgatgcctatcctaataaaaaggcagctccgatacttggtgtttggggaggtgaagccggaagcccggaggtaaccggaattaaggcgacccgttggatggaacgtagtaattctgaatatggattccggataatgagtaatggctatatgaagcatgatgcttctcatcctgaaattatgcatattctgtcacatgtttttggacgccctgaaaaaggacgtcaggcggatgaatctgttccacaaatgcgaaccgatacaggagtaccgttcgttggcgggttcagtatcttgttgaacgctgatttgctgaaaaaataattaattcatatagtgagctgtataatagtgatttatgtttaagtaattgtaaggtttagattattaaagggagacgcaatggggacaaaaggggactggacggtttgtgtcttgttatatctttgcagagtcattcaaacaaaaggaatggcaacagtaaacctttatttttttaaccatttaaactttaacaattatggctttagagtatgtagtaacaaaaagagtgttcggttttgataaggacaaaaacgaaaagtatgtagcaaaatcggttcgttccggtaaggtgaattttgcaaagatgtgtcgcaaggtgagtcagctttgtggtgtccatcgtaaggtggtcgatttggtggtcagcggtctggtagataaaatggccgaggatattgacgatggaaagagcgttcagttgggtgagttcggtattttcagtcctgctatccgtgccaagagtgcggatgatgagaaagatgtttcgtcgaagtcgatcgtccaaagaaagattattttttatccgggaaaaatctttaaggatacgttggaagatatgagtatcacccgtcgtgtggagattgaaacggattatacggatggaagtagtaacggtggtaataatggtggcaatcctgattccggcgatgatggtaagggagataacggggaagcaccggatccggctgcatgatttagttagttttgttttaaaagtgtctttagagtagtagtgatgcacagagaatcgatttatgatcggtgatctgtgcatcttttcatatttatctaaacgtatacatttgggcccaaggtatatgaatgttctttttaatcataagtggggagggagagcatatttgtttttccatattctctcccatctgtttttccattcgttatcaaagaaggtacaccacctttaaagtaacatatttgacaatcttcaaatttcatgtaccgttgagactttgaatgagggaatgctcgttgatgggtaagattccttttaagacatcatcaactttcgcatgcccaatgatggttaggatgcagaagataatcaagagaaatcgttttttcataatgtatattaatcttgtatatattgttttgagatacaaaaaggcgaggtttttacaacataaacattgttacattattcttgtacgacaaacaacacatttccaacaatacctgaaggaacgagacgacttttttctgtatataacggtacagttgaccatgtatgacgttgattttcgggcaatgaggcatcaccgatgatgcgatttgccaatgaattacgtacctcaatacttattttattcttacccttgcgtaccaaatctgtaatatcgacctcccaaggagaagtccagacaaagccggcttcacgaccatttataagcacacgggctacacctttcagtccgggcaaacgcaacaacaagcattttccttgttgagattcggtgatggaaatatttttctcataagtagccagacctgagaagtatcgtatatcagggtttgaatttcccgtccaatcagttaattcattaaaaacaacaggcttgtccggcccaccgagcagagtgttgaatttcacagtccaagaaccggcaatcggcgtaacagtctcctgtcgctgcgtttggtataggggaagattgttggcgctctgtttacgtgccacaataaaacctgcttcattaggtagcagcctcaattttaattttagccccttatctgtcttcacagtcggtatgcgccaacgcatgccccgattggcatcccaccattctgcctgtgtgtaatctgttcgcaacacaatgttgtcagcaaacgggtcagctttactgtggttgcaaataaaatagtaatcagcatcattggtttgtcggtgagtgaagaatacgcggtttgtggcacttttacggcttttaagttctatatccggacgtatattgctggctttcaagacactgtccattgcattatcgctcatttcccggttgtcgtagacaggaagcccttgggatttccattgggcgataagccgttctgtctcggggcggatcacggcacttttttcgatggctagcagacgataggacataccgtttttggtgaatagttgccggttggcagtcgacagttggtgatgtagagcatctgttgtgcagacatcgaagtcataaccctcgggaataacaggtagtctgtgtgctaataatttcatcggtgcttcatccccagcatatactaatatatcaactacaggctgccccaatcgttgaatgaatgagttgcgtgcctgatagtcccagaatggacggctaaacggccacatcgtattgttacgattcagagcatattctatatgattatttgtattaccgggataacgatcgagccaaggttgcgattctgaggtacagactaccaactcatttacctgaaaggctgcagccatatctatctcatcctttacttcactaaatatatgagaataagaaaaggccgtaaacgcttctgccgaagcaattgttcgcccataaagatgagcagctgacgaagcctccttgatgtcatacgagccgtcatgattacgtgaccaaaattcaccctgtggacgttctactcgccctttagccattagattgtcagaacaaatattttgtccattacctgtcgcttgagctgtgaaatgtacaccagctttggtagccatctgttgtaaagtagtaagatatcggtcgctgataccatcggcaattgtccgacgaaggtcactaagaaatctctccgtttcggaaaccgatcctacaatatagccctgcattgcaggtaggaaaggaataatatcgtatccgttcttttgacggaatagttcgggaaaatcgtgtgtccagttctgcccgccggcctcatgactatccatacacacacctgtcggacggcaaccaatagtctgcaaggaatctaggatcagttgagcgtaactattccaatgcaactctgctgcctcaactgaaagtttatcacactccaaacccatcaaattgggacgtccgtgcttggtacgcgcccgtgttggtgcatacacaaaacgaacgacgagccagtctgagcctcggggtgcctgccaatcaagaaccccgtccgcattgagatggccgctgatatttaataaggcggaacggtttattatttcatctccctgatagtcgggagttttcgtctcgcggatgtattccgaagcgtatgccgcacgctcttcccagcgatcaatgacggcacgtgccgagagttccacgtttttcaacgtcaactccttgcgcttcttcccctttgctgtccagtcatgaaggttcagacgaaagtaacgtcccgtagtggcaggaaaggagatagtagcattcgggcgaagtgaatgcattcgataacagggacgaagtggacacaccgttgtccagtgttctccatccatcgacacttccagttctcccagattgggaagccgggtgaatccgtctccgcaaaaatcatcttgaggatcacaggggacatttatactgctctgcgcccctttactctcaccattcgaccagtaagaaagcgaacgggcggtaaagggttcatcgaatgttgccagcataacaactgcaggcttactggtggcaaaaccaccagacaggcatttaaccgtttggtaacagcttttctttataggaaaggccaatacggcaatgtcacgttcatttttatggtcaggtgataccagtttgccctgatagcgttcaccccctttcaccagtgtctccgcgctgtagactgcctgcattcccaactcaggtgtaatccatggaccgccacagacatagccgttgctaatattgatttcgaatgacagtccaagacgcttggcttcccgagcggcaaatttgagcatctcccaccactccttactcattgatttcaaactttcaggtacaccgggaccatattgttggtcgtaataaactacaccacccacgccagcctgtttataggcttcgaggtcggctttgattccttcgcgtgtggtgatattctcaccgtgaaaccaccatactttggttcttgtagaatcgggtacggcaacaaaagattgaaagatgttatctacattctgtgcccatgagcagatgctcgttgttataaaaaatactgtgaagataaaatgatgataatttttcattgtactcatgtttttatatttatagtgtactagttgtattcgtatttgtactacgaatgtcatttgatatttgttggcaaaataagcggttattctttatctttctatttaagactgtacatattcatgtccaatagtacattttttatggttggaagtgcgagtaagcaggtgcaatcagaaaatgtgattggcatagttatttgtggaataactgattttcttgctttatcttgatatgatatggacatattcaccgaaaatgaattaatttgtgtatttgattaataattaatgtattactacaaacatttgatgacttatgaatgatgaaagagggcgcaaaggagacaaaaggggactggacggtttgtgccttattatatctttgcagagtcattcaaacaaaacgaatgtcaacagtaaacctttatttttttaaccatttaaactttaacaattatggctttagagtatgtagtaacaaaacgtgtgttcggttttgacaaggacaaaaacgaaaagtatgtagcaaaatcggttcgttccggtaaggtgaattttgcaaaaatgtgtcgcaaggtgagtcagctttgtggtgtccatcgtaaggtggtcgatttggtggtcagcggtctggtcgataaaatggccgaggatattgacgacggaaagagcgttcagttgggtgagttcggtatttttagtcctactatccgtgccaagagtgcggatgatgagaaagatgtttcgtcgaagtcgatcgtccaaagaaagattattttttatccgggaaaaatctttaaggatacgttggaagatatgagtatcacccgtcgtgtggagattgaaacggattatacggatggaagtagtaacggtggtaataatggtggcaatcctgattccggcgatgatggtaagggagataacggggaagcaccggatccggctgcatgatttagttagttttgttttaaaagtgtctttagagtagtagtgatgcacagagaatcgatttatgatcggtgatctgtgcatcttttattgtatatatgtcagtaaagcatttcttaaaagaataaatgcgaacataaaacaatttgatttgttatttatagtaaatgggtctatatggagatgattttcttgcattatgatattaaacatctctttatttctattttttaaggtgtttatttgactatatgtcagttcaaacctttatatttgtatatgtaaagttaaccaaagaaaaaatcacttattattggctatgatgaaaaaggaaatcaaattcagtcttgtttatcgggatatgtggcaatcttccggtaagtatcaacctcgggttgaccagcttgtacgtatagctccattgattgttgagatgggctgttttacaagagttgaaacgaatggaggtgcttttgagcaagtgaatctattgtacggtgaaaatcctaataaagccgtccgtgcttttaccgcaccttttagagaagcgggcattcaaacgcatatgctcgatcgtggtttgaatgcgttgcgtatgtatccggttccggcggatgtgcgtaaattgatgtataaagtcaagcatgcacaaggagtggatatcacacgtatcttctgtggactgaatgagacgagaaacataattccctccattaaatatgctctggaagcgggtatgattccgcaggcaactctttgtatcacgtattctccggtgcataccgttgagtattatgcccgaattgccgatcagctgattgaggccgatgcacctgaaatttgtttgaaagacatggcaggtatcggtcgcccgggtatgttggggcaattggtcaggactatcaaggagaaacatccggatatattgattcaatatcatggtcatagtggaccgggattgtctatggcttctatccttgaggtttgcgagaatggtgcggatatcattgatgtagctatggagccgatgtcttggggcaaagtgcatccggacgtaatctcggtacaggcaatgttgaaagatttaggttttctggttccggatattaatatgaaagcatatatgaaggctcgtgcgatgacgcaggaattcatagatgactttctgggttacttcatggatcctaccaacaaatatatgtcttcgcttttattgaaatgtggtttgccgggtggtatgatgggttccatgatggcagacttgaaaggagtgcattccggtatcaatatgatattaaagagtaagaatgagccagaacttagtcttgacgatttgctggtaatgcttttcgacgaagtggaatatgtgtggcctaagttgggctatcctcctttggtgactcctttcagtcagtatgtgaagaatgttgcattgatgaatcttatgcaattggtaaaaggggaagagcgctggacaatgatagacaaccatacctgggatatgattctgggtaagagtggacgtctgccgggtacgcttgctccggagattatagagttggcgaaatctaaaggatatgaatttgtcgataccgacccgcagttgaattatccggatgctttggatgattatcgcaaggaaatggatgagaatggctgggagtatggagaggatgacgaagaacttttcgaattggccatgcacgatcgccagtatcgtgattataagtccggggttgccaaaaagcgttttgaggaagagttacaacatgctaaagatgcatccatggcaaagagtggttattccgaggaagatatcaagaagttgaaacgtgccaaggcagatccggttattgctcccgacaacgggcaggtgctttgggaagtttccgtggaaggaccgtccattgcgccattcatcggacgtaaatatcagcatgacgaagtcttttgttacctttctactccatggggagaatatgaaaagattctgaccggattcaccggacgggtggtggaaatatgtgcacagcaaggtgctaccgtacgtaagggagatgttatcggttatattctgcggagcgatatctttgcgtaatccttttataagagctagggcataagtggtacccaataaagaatttaaggctgtaatcttttacgaggttgcagctttctttttgcataaattcgatggactgtgcattttctttcaattaaaaaggcgaggcaaatgccccaccttacatgttttcacaacggaataatccttattgtgatttgcttcaaattagtagagcaaagatactaaaatattcttgtaatgatgcttatttataacaaaaaaatgatatatttgagagcttataataaaattggttacacatgaaaaggatattgggattagatttaggcactaacagtatagggtgggcactagtcgacagtgaagaacggaaaattttaggaatgggtagccggattattccgatggatcaaggcgtattggatacttttagcggagggaatccgatagaaactcaaacggcggcacggacggcctatcgtagtacacgccgattgcgtgaaagagtattattgcgccgcgcgcgtttgctccgtgtgttgaatgtgatgaattttctacccgaacattatgtttctcagatagattttgaaaagcgattagggcagtttcttgatggaacggaacccaaactagcttggagacaaaaggatgaagggaagtccgaatttattttccaacaatctttcaatgaaatgatagaagagtttaagaataatgggacgattggagagaatcaaaaaattccgtatgattggactatctattatttgcgtaagaaagcactttctcgaaagatagataaggaagaattagcttggatattattaaattttaatcagaaacggggatattatcaattaagaggggaagaagaggaagagaattctaataaattagtagaatattattcattgaaaatagtggatgtcatagccgatgagaaaccgaatggcaaaggtgatacatggtattctttacatttggaaaacggttgggtttatcgtcgtccaagcaagataccgttattgggttggaaaggtaaaatacgtgattttattgttactacagacttgaatgatgatgggacggttaaaaaagataaggaaggaatagaaaaacgctcttttcgtgcgccaagtgaaaatgattggactttgttgaaaaaaaagacagagaatgatatagaaaagtctcataaaacagtcggtacgtatgtctatgaggcattactgcaaaatcctatgcaaaaagttcgcggaaagctggtacggacaatcgaacgtaagttttacaaggatgagttgaaacaaatccttgagaaacaaaaagaatttcatccagagttgagagatgaagatttatacaatgactgtgtaagagagctatattgcagcaatgaaactcataaatttattttaagtaaaagagattttgttcatttactcttagacgatattctattttaccagagaccgttacgaagccaaaagtctgcgataagtgactgcacacttgaatttcaagcatacaaagataaaaatggaaataaggtcaaaggtcatctaaaggctacttcaaaatcgaatcctctttatcaggaatttcgtatatggcagtggttgtataatttgaaaatctatcggaaagaagatgataaagatgttacgttggagtttattacaggtattgaagataaagagttactatttgaatttctaaataatagaaaaaatattgagcagaagccattgcttgaatatttgataaaagcgaaagggctgaaaaaacaagtaaaggcagaggcatatcgttggaactatgttgaagataagacatatccttgcagtgaaacgaggacgatgatttctacacgtttggctaaagtagaaaatcttccggatgatttccttacaaaagaagtggaacaaagactttggcatattatttattctgttacagataagaatgagtttgaaaaagcattgaaaacttttgcgggaaagtataatttagatgttacttcttttgtggataattttaagaaatttcctccctttaaaaacgaatatgggtcgttttcagaaaaggccataaagaaactgttgccattgatgcgtttggggaaatattggaaatggagcgatattgacagttatactcaaaatagaatatctaaaataatcacaggtgaatatgatgaagaaattaaggacaaagttcgcgagaaggctattcatttgactaatgaaaacgattttcaaggtttgcaattgtggttggcccaatacattgtttatggaaggcattcagaagcggatattgcagggaagtggcattcgattgctgatttagaaaagtatctgaatgagtttaaacaacattctttacgtaatccgattgtagaacaaatagtcacggaaactttacgggtagtgaaggatatctggcaagaatatggacagggagttgaaaatttctttaatgagatccatatagagttgggacgtgatatgaagaataccgcagaagaaaggaaaagacttgctaatacgatcacagagaatgaaaataccaatctgagaatcaaggcactattaatggagctgaaaaacaattctgatggtaaattggaggttgagaatgttcgtccctattcgcctatgcaacaggatattctaaaaatatatgaagagtatgcaatcggtgctgagcttgataacgaaagggatgaaaaggtaaaggaagatataaaacaaataagcaaagccgcacaacctacaacggtagagttgcagcgttataaattatggttggaacagaaatactgttctccatatacaggtaaagtcataccgcttagtaaactatttaccgaagaatatcagattgagcatattattcccaaatcccgttattatgatgatagtttcagtaataaagtaatttgcgaagcggctgtaaataaattgaaagataagtatttgggatttgagtttataaaaaactaccatgggcagatagtagaaactggttttggacaaaaagtgactgtctttgatgaagaatcttatcagaattttgtaaagcagcattatgtacatagccgttccaagagaatgaaacttctgttggaagaaataccggaaaagatgatagagcgtcaaatgaatgatacgcgttatatcagtaagtttgtttttcctcttctttcaaatcttgtacgtgcagagaaagaagacgacggaataaattcaaaaaatgtattacccggaaatggtaaaattacaactatattaaaacaagattggggcttgaatgatgtctggaacgacttgattcttccccgttttgtgcggatgaatgagctcaaaaagactactgcattcactagctggaatggacaatatcaaaaatatctgcctgctgtcccactggaactatcaaaagggtttcaaaagaagcgcattgaccaccgtcaccatgcgatggatgctttggtcatagcttgtgctactcgtgaccatattaatctgttaaacaataaatatgcaaatacggataaggttcgatacgatttacaacggaagttgcgtttgtttgagcaagtgacatatattgatccggaaacaaagaaggaggtaacaaaaaatgtcccgaaagagtttaaaaagccatgggataacttcactattgatgcccgtaatgaattggagagcattattgttagctttaagcaaaatctgcgtataattaataaagcgaccaatgtatatacgaaatatgaaaacggtaaaaagataaaggtaaaccaaaaaggttctaattgggctattcgtaaacctctacataaagaaactgtgtttgctaaagtatcacttcgtaaaagaaaaaccgtacgtttgagtgaggctttaaaagattcggaaaagatagtagataaagggctaaaacaagaaataagacggcttacctgtcaatatggtaaatttgatgcgggtacaattctacgatattttaaagatcggaaatatgagtttgaaggagcagatgtatcaaaggtggaagtatattattttgatgaagagaatgcagcggtgcgaaagaatgtagatacatcttttacaaaaaaaattattcaggaatctgtaacagataccggaatacaaaaaatattgattaatcatttagcggcaaaaggggataaagctgaaatggcattttctcctgaaggtattgaagagatgaacaagaatatcgttcagctaaatggaggaaagtttcatcttccaatatttaaagtccgtgtttatgaaacaattggtaataaattccctgtcggtgtaaaaggaaacaagaaagataaatacgtggaagcggccaaagggaccaatctattctttgcgatatacgtggatgagaatggtgttcgttcttatgaaactatacctttaaatattgtgatagaacgtttaaagcagggattaaatgctgttccggaaagagataaaaaagaacataatctattattttatttatctcctaatgatttggtgtatgtacccacagatgacgaacgggaaaatgtttgtgcaattaattttggccaatttagtaatgagcaaaagaagagagtctataaaatggtaagttgcacaggttcagaatgtcattttctccctcactatgtagcaaactctatagtcaataaagttgaatattcgccattgaataagattggaaggagtttgactggagagatgattaaaaacgtttgtataaaattgaaagttgaccgattgggaaatataaaggggaggacttatgagcgataattacaacaccccaatactttctgatttctttctttacaaagatggaaatggagaagtgaaagttgaaatctatatttttaacgaaacggtctggttgacacaagacaagattgcacaattgtttggagtacagcgtcctgcagttacaaagcatttaaaaaatatctttgggagcggtgagttaattgagggttcagttagttccattatggaactaactgctgctgatggcaagaaatatcaaacgaagttatacaatcttgacgctattttatccgtaggttaccgtgtcaacagcattcaagctacacattttagaatttgggcaaatagcgtactgaaagaatatttgatcaagggctttgctatgaacgatgagcggctaaagaatccgcaaacgctattcggtaaagactatttcgaggagcaattggctcgtattcgtgatattcgtagcagtgagcggcgtttctatcagaagataactgatatttattcgcaatgcagtgccgactatgaagtgggtagtaatgtgacaaagaaattttttgcaactgtccaaaataagttacattgggcaatttccgggcagacagcggcagagattattgttgcccgtgtggatgcagataaaccaaatatgggattgactacctggaaaaatgcacctaacggaatgatacgtaaaccggatgtgtctatcgctaagaactatctcactgaaactgaaatggatgatttgaatcgcattgtttcgatgtatctggactatgcggagcgtcaagcaaaaaaagggcaagtaatgtatatgagggattgggtgaaaaagttagatgcattcttgcagtttaacgaagaggcagtgttgcagcatagcgggcgagtgagccatgaggttgccaaggctttggcggagcaggaatatgacaaattttatacaagacaacttcagaattacgaatcggattttgacaaacttttgaaaggaataagttatgattaagaaaacactttattttgggaatccggtctatttatcgctgcgaaacgcacagttggtcatcaaactgcctgacgtggaaaaagcaacaactttaccggaagcgttgaagaaacaggcggaagtgacgaaacctatagaagacattggaattgtcgtgttggataacaagcaaatcaccatcacttccggagtgttggaggctttgcttgaaaacacttgttccgtaatcacttgcgatagtaagagtatgccagttggactgatgcttcctctttatggaaatacaacacagaatgagcgttttcgtgaacaattggatgcgtcgttgccattgaaaaaacagctttggcaacaaactattcaagcgaagattaacaaccaagcgtctgtactaaaatgttgtatggatgaagaagtaaagtgtatgcgtgtttgggctgctgatgtgcgtagtggagatcctgataatttggaagcacgtgctgccgcatattattggaaatctttatttgctgatgttgacggtttcactcgagatcgggagggagttcctcccaataacttattaaattatggttatgctattcttcgtgcggtggtggcacgtggacttgtaataagtggattacttcccactttgggcatccatcatcacaatcgttacaatgcctattgcttggcagatgatattatggaaccttatcgtccttatgtggatgaattggtgtttagtctaacgcaagagtatggtaaggatgctgagttaacgaaagagattaaagcccgattgcttactattccaacattggaagtgataattggaggtaaacatagtccgttgatggttgctgtagggcaaactactgcttcactttataaatgctttggtggagaacttcgacgagttgtttatcctgaacgataatggaccgttttagtgaatatcgtattatgtgggtgcttgtactttttgatttgccgaccgagacgaaaaaagacaagaaggcttatgcggatttcagaaagaatttacagaaggatggctttacgatgtttcaattttccatttatgtgcgtcattgtgctagtagtgagaatgcagcagtacatataaaaagagttaaatcttttctgccggaacatggtcatgtcgggattatgtgtattacggataaacaatttggaaatatagagcttttttatggaaagaaagtgtatgatgtcaatacgccgggacagcagctggagttattctaaaaaagggaccctccatctgattgtttaaatagaaaactacgggatttctctcgtaggcctccatcttattattcaggttcctcctgatcgggaaagtgaatttgagtctattgtcgttcctaagcatcaatcccgtggtttatctattgaatgtcttgtcattttccattatcaccaataaagttagccatgctgcaacagagtggcaaaatcagcttttggaaagtttctatatgattgtccggatggcattgtattcaaagttagggaaaacagtaaagtgatcaacaagactgtttacctatgtgtaggtctgaataagaaaggcttgaaagaagtattgggtatgtggattggcaaaaatgagagtgccgctttttggatgggtgttttaacggatctcaaagcccgtggtgtagagggtattctgattacagttactgataacctgactgaatttacggaaaccatcaaaagtgtatttcctgcctttgctactcaaatatgtgtggtacaacaaattagaaactcctgtcgcaatgtcgtctgggaaaaaaagaggagttcactgccgatttaaagaacatctataatgcacttacgaaagaaacagctgagatggagttagataaccttgagcaaaaatgggtgggaaatatccatatgcgatacgctcgtggagaaataattgggaagaactgaccgtgttctttgatttccccgtcgagattaaaaagattatctataccactatctcattgaaaatctgaatgggaaaattagaaagtacactaaaaacaagctttcccaaatgatgatgccttgaaaaggtttgtctatttggtcattaacgaaatcgaaaaaatagtatcaacctatttggaaaacaaaatctcgcattaatgcgagattttattatggaaacagctttcttttttcttttctaattttctttgtaaatcattgaaatacattgtnnnnnnnnnnnnnnnnnnnnnnnnnnnnnnnnnnnnnnnnnnnnnnnnnnnnnnnnnnnnnnnnnnnnnnnnnnnnnnnnnnnnnnnnnnnnnnnnnnnnnnnnnnnnnnnnnnnnnnnnnnnnnnnnnnnnnnnnnnnnnnnnnnnnnnnnnnnnnnnnnnnnnnnnnnnnnnnnnnnnnnnnnnnnnnnnnnnnnnnnnnnnnnnnnnnnnnnnnnnnnnnnnnnnnnnnnnnnnnnnnnnnnnnnnnnnnnnnnnnnnnnnnnnnnnnnnnnnnnnnnnnnnnnnnnnnnnnnnnnnnnnnnnnnnnnnnnnnnnnnnnnnnnnnnnnnnnnnnnnnnnnnnnnnnnnnnnnnnnnnnnnnnnnnnnnnnnnnnnnnnnnnnnnnnnnnnnnnnnnnnnnnnnnnnnnnnnnnnnnnnnnnnnnnnnnnnnnnnnnnnnnnnnnnnnnnnnnnnnnnnnnnnnnnnnnnnnnnnnnnnnnnnnnnnnnnnnnnnnnnnnnnnnnnnnnnnnnnnnnnnnnnnnnnnnnnnnnnnnnnnnnnnnnnnnnnnnnnnnnnnnnnnnnnnnnnnnnnnnnnnnnnnnnnnnnnnnnnnnnnnnnnnnnnnnnnnnnnnnnnnnnnnnnnnnnnnnnnnnnnnnnnnnnnnnnnnnnnnnnnnnnnnnnnnnnnnnnnnnnnnnnnnnnnnnnnnnnnnnnnnnnnnnnnnnnnnnnnnnnnnnnnnnnnnnnnnnnnnnnnnnnnnnnnnnnnnnnnnnnnnnnnnnnnnnnnnnnnnnnnnnnnnnnnnnnnnnnnnnnnnnnnnnnnnnnnnnnnnnnnnnnnnnnnnnnnnnnnnnnnnnnnnnnnnnnnnnnnnnnnnnnnnnnnnnnnnnnnnnnnnnnnnnnnnnnnnnnnnnnnnnnnnnnnnnnnnnnnnnnnnnnnnnnnnnnnnnnnnnnnnnnnnnnnnnnnnnnnnnnnnnnnnnnnnnnnnnnnnnnnnnnnnnnnnnnnnnnnnnnnnnnnnnnnnnnnnnnnnnnnnnnnnnnnnnnnnnnnnnnnnnnnnnnnnnnnnnnnnnnnnnnnnnnnnnnnnnnnnnnnnnnnnnnnnnnnnnnnnnnnnnnnnnnnnnnnnnnnnnnnnnnnnnnnnnnnnnnnnnnnnnnnnnnnnnnnnnnnnnnnnnnnnnnnnnnnnnnnnnnnnnnnnnnnnnnnnnnnnnnnnnnnnnnnnnnnnnnnnnnnnnnnnnnnnnnnnnnnnnnnnnnnnnnnnnnnnnnnnnnnnnnnnnnnnnnnnnnnnnnnnnnnnnnnnnnnnnnnnnnnnnnnnnnnnnnnnnnnnnnnnnnnnnnnnnnnnnnnnnnnnnnnnnnnnnnnnnnnnnnnnnnnnnnnnnnnnnnnnnnnnnnnnnnnnnnnnnnnnnnnnnnnnnnnnnnnnnnnnnnnnnnnnnnnnnnnnnnnnnnnnnnnnnnnnnnnnnnnnnnnnnnnnnnnnnnnnnnnnnnnnnnnnnnnnnnnnnnnnnnnnnnnnnnnnnnnnnnnnnnnnnnnnnnnnnnnnnnnnnnnnnnnnnnnnnnnnnnnnnnnnnnnnnnnnnnnnnnnnnnnnnnnnnnnnnnnnnnnnnnnnnnnnnnnnnnnnnnnnnnnnnnnnnnnnnnnnnnnnnnnnnnnnnnnnnnnnnnnnnnnnnnnnnnnnnnnnnnnnnnnnnnnnnnnnnnnnnnnnnnnnnnnnnnnnnnnnnnnnnnnnnnnnnnnnnnnnnnnnnnnnnnnnnnnnnnnnnnnnnnnnnnnnnnnnnnnnnnnnnnnnnnnnnnnnnnnnnnnnnnnnnnnnnnnnnnnnnnnnnnnnnnnnnnnnnnnnnnnnnnnnnnnnnnnnnnnnnnnnnnnnnnnnnnnnnnnnnnnnnnnnnnnnnnnnnnnnnnnnnnnnnnnnnnnnnnnnnnnnnnnnnnnnnnnnnnnnnnnnnnnnnnnnnnnnnnnnnnnnnnnnnnnnnnnnnnnnnnnnnnnnnnnnnnnnnnnnnnnnnnnnnnnnnnnnnnnnnnnnnnnnnnnnnnnnnnnnnnnnnnnnnnnnnnnnnnnnnnnnnnnnnnnnnnnnnnnnnnnnnnnnnnnnnnnnnnnnnnnnnnnnnnnnnnnnnnnnnnnnnnnnnnnnnnnnnnnnnnnnnnnnnnnnnnnnnnnnnnnnnnnnnnnnnnnnnnnnnnnnnnnnnnnnnnnnnnnnnnnnnnnnnnnnnnnnnnnnnnnnnnnnnnnnnnnnnnnnnnntatttcattggaataggcgagagaaatcactaagatgatgtattgctatcctcccggcttccagaatcaaggagaggcatatcatttaggcatgacaccggaacaggaaatgctggtaaaaaccactcaaatctgacttgggtgtcccattgcggaaaacaggaaaactgggacctaccaaaaaattaagagaaaagctcacgtaaagtaaaactcttcttaatttataagaaagaggaaccatttactgaatatctctaaaaaatcccccaccaggcttgccggcaggggattctgtcattaatcaaattaagctctcgctattgaaatctagcaatttctagtcttttaattttgcgatgatgaagtcgcggttcaagcgagcgatgttgctgatagaaatattcttcggacattcagcttcacaagcacgagtgtttgtacagttaccgaatcccagttcgtccatctttgacaacatagcttttgcacgacgcaaagcttccggtttaccttgcggcagcaagttcaactggctaacttttgcagaaacgaacaacatagcagaaccattcttacatgcagctacacaagcaccgcaaccgatacaagaagcagcatccatagcttcgtcagcgataggttttgcgatcaggatagcgttagcatcctgcggagcacctgtgcgtacgctcacgtaaccaccagcttgcataatcttgtcataagctgtacggtctaccatcaagtccttgattacagggaaaccggccgaacgccaaggttcaacagtgatcgtatcaccatcctggaaacgacgcatatagatctgacaagtagtagcacctgttgcaggaccgtgcgggtgtccgttgatgtaaagagaacacataccgcagataccttcgcggcagtcatggtcgaatactaccggttcttttctttcgctgatgagctgttcgttcagaatatccagcatttcgaggaaggaagtatcgccagggatatctttcatttggtaggtttcaaaagcacctttagccttcggaccagcttggcgccataccttcagtgtaaatgatatatttttatccattttcttctaattcttttaaatgtttaacttcaccgattagctcttgtagttacgggtttgaaccttgatagcttcgtataccaacggctctttgtataataccggagctttttcatcgtcaccttgatattcccaacatgctacatagaagaagttttcgtcatcacgtttagcttctccttcttcagtctggtattcttcacggaagtgaccaccacaactttcgttacggttcaatgcatcgtaagcaacaagctcacccattgtgatgaagtcgtacagacggattgctttgtcaagctctacgttcataccttctttggaaccggggataaacagattcgtttcgaattccttgcggatttctttcagttcggcaatacctttcttcaagccttctgccgtacgtcccatacctacatattcccacataacatgacccagtttcttgtggatagaatcaacagattctttaccctggatgctcatgaacttgtcgatcttagcttgaactgccttttctgcttcagcaaattcaggaagatcagtagagaaacgaggaacagtgatttgatctgccagataattttggattgtataaggtaatacgaagtaaccgtcagccaaaccttgcatcaatgcagaagcaccgaggcggtttgcaccgtggtcggagaagttacattcaccgatagcgaacagacccttgatagtggtttgcagttcgtagtctacccagataccacccattgtatagtggatagccggataaatcatcatcggattataatattttacgccattaatttcttttgccaattctcccggattaacgtcagtgatttcttcatacatatcgaagaggttaccataacgttggagaacgatgtcgatacccaaacggttgatagcttcagagaagtcaaggaatacggctaaaccagtgttgtttacaccgaaacctgcgtcgcaacgttctttagcagcacggctggcaacgtcacgcggaaccaggttaccgaatgccggatagcggcgttccaagtaatagtcgcggtcttcttcaggaatatcacttcctttgatttcgcctttctgaagtttcacagcatcttctttctttttcggaacccagatacgaccgtcgttacggagagattcagacatcaaagtcagtttagactgcttgtcaccgtgtacagggatacaagtcgggtgaatctgaacgtaagcagggttagcaaatacagcacccttgcggtagcaagagatagcagctgtacagttacatcccatagcgttggtagacaggaaataagcattaccataaccaccggtagcgataactacagcgtgagcggcaaagcgttccagttcacctgttacaagatttttggcgatgataccgcgggcacgtccgtcaacgatgacaatgtcctgcatttcatagcgagtgtacagtttgacagtacctacgtttacctgacggctcaatgcagagtaagcacccagtaacaactgctgaccagtctggcctttagcgtagaaagtacgggatacctgtgcgccaccgaaagaacggttatccagcgtaccaccatattcgcgagcgaaaggaacaccttgcgctacacattggtcgatgatagcgttggatacttcagccaaacgatatacgtttgcttcacgggcacgatagtcgccacctttcactgtatcgtagaacagacggtaaaccgagtcaccatcattttgataattctttgcagcattgataccaccctgtgcagcgatagagtgtgcacgacggggagaatcctgaatacagaaattgaatactctgaaacccatttcaccaagtgaagcagcggcagaagcacctgccagacccgtacccacaacgatgatgtccaaacgacgtttattagcgggattcaccaatttctggtgagctttatagttggtccatttctcagccaccgggccttctggaatttttgaatctatcttgatcataatattatttacaatttaatcatttacaatttactatttagcaagcaccgccacaaatcagtgttttcacgaagaataccactactaccagtgcgaaaccgagtacaacaatcgtagaatagatgttagaaatgcatttccaacgattgatccatactttgttgttccatcccagtgattgcatagagctccagaaaccgtgagtcaggtggaaccacaaagcaaacagccaaacgaggtaaagaactacgtaaaccgggctagagaaagtctgctggatgtgataagcaccgttagcggcataagccagcgtcagtgtatcagcgtgcatgcccatgttgtgcatcagttccggcaactgcatttttgcccagaagttgaagaggtgcaaaccaagacctacgataacgatcagacccagcaccaacatgttttgagatgcccattctacagtttttggtttgtcaaccactgcatagcgttcgctaccacgcgctttgcgattctgcattgtcagccagaatgcgtagatgatgtgaatcacaaaaagagcggctagtcctgcggtagccactaacgcataccagtttgctcccaggaactcacaaatcatgttgtaaccatcagccgagatgattgcaaccaagttcatcgccatgtgaaatgttagaaacaggacaagggcgataccggtaacgctcatcaccactttccttcctacagatgaattacttaaccacataaatgattgaatttaaattatttaattgttagaactaaaatttcgacgttttacacctcttacggactgcaaaaataggggaaatagattgattgagcaaggaattaaagaaataattctttaataatgaatcaatgtgctaatgtgtcaatatgccagccagtatgcacgcatggtgcaactgattggcatattggtattatgggactatttattgtatctttccgattttctcaccactggctgctttcttgcgtaaagcgcgtggggtatcgccaaaagagtttttgcagaagtgggcgaagtgagacagggagtcgaatccgtatttgttgcagatttcagtgattcgcattttggtgtgttgcaggtcttccagtattccttcccgtttcttttccagtatccattcatatacgggcatgccatacaagtttttgaaaaggcggcggaaggtagtggtcgtgtatcctcccagatgcgcaaattcttccacattctttacattactgtaattctgcatgacgaaatagtggaaactttccgtataagtgctgatgggatagaagaatgaacttagctggggcagaggatagaaattggtgatcaagaagacaagttccttacattttaagtcgatatacttgccgcaaggagtttcttcgttgaggaa

SEQ ID NO: 1119 - DNA, 24536 bp, synthetic construct
  misc_feature 1..24536: note = Synthetic
  source 1..24536: mol_type = other DNA
ctgattctgtcagaatcaaacgcgtttgccgtgagagcgatgatgggtatttccgcgtcaaactctcgtattttccgggttgcttccagtccgcccatgacaggcattttcatatccataaaaataaggtcgaacttctcgtcacgactcatctttacagcctcaactccattcagcgcacgaacaacatgataccccttaagaatctgtcgcaccagcaaataattactatcattatcttcagctaccaaaattttcagttcccgtgatttatccaaagaagaatgtttttccgaaaattgcgtgataaccggatcaccattctcctccatggatatggcacaaggcacccacgcccagaaagtcgagccgacaccgggagtagaagaacaccctatctctccccccgcaccctcgacgatagccttggaaatagccagtcccaacccggtcccctgcgcgaactcgttcaacttctggaaccgaccgaacaatctatcctgcaactcccgggggactccgacaccggaatcctcgacatacacccggatgcctcccctctcgatagagtatcccattttaatatatcccgaccgcgtacatttcacggcattggaaaggaaattcatccacacctgtttaagccggttcctgtccagaaatatccaacagtccggtccgggctccaataaaaattcgacatcaggattcgtgatcttctgcgaaatcatcatgtacaactcattacacaccttcgtcacgttgaaattctctctcctacgctcaagaacacccgattcaatcttggagagatcaagaatatcattaatcaatcgcaacaacaactcattattagaccggataacattcatgtactcctctttttccgccggatcgtcacaatccaccatcaacccggaaaacccgacaatggcattcaacggcgtacgtatctcgtgactcatgttagcaagaaaagccgatttaagccgatcggaaagttcggctttctctttcagttcctttaactcccgtgccacgttctccgatttcgtgttattaaacttgattccggtataacgaagtacacgccctcttttatccctttcgacctgcacgccggtcaccagcaaagtctgccactccttatcccacctcgtcttggagcggtatttaaaagcgaactctctatctaccccccggagcatacaatcgatattttcacgaacatgctctatatcatccgggtgggttacattcagatactcctcgggagtgattgccttttccgagaggaaatcatttaccggatcgttaaacgcccggaactgcttgctctcgacatcaaaatcccaataagacatcccgacagtcttaaaagtaagttctatcctgtaattccttcttctgagttcttcatccaactggtgaagtttggaaatattctgtctgaatcccgtgaatcgcacaatattaccctcttcgtcccgttcgaaaggaacacccgtaacactgaaatattgccatgtttcatcgtacttggtttgcatgcgacaagtaaaatcaatcgtaagatcttctccggacaacatcgactggatagcatcattgaaaacagaacaatcttccgggtggactacctccatgtattcggaaacagtcacaagcttatcactggcataatcattaatcgggtcattataggcttcaaacttccgtgtccgtatatcaaaatcccaatgaacaatactattgaattgcatcgccaactcccgcttcgcgagcaaatcctgtgttctctttaccatccgcactttatccgtcatatccatttgcgttccgacaatcaaccgctttccgaaatgctccatagacaatcgcatccggctctcgtaataacggtattgtccctcccgctcgtcatagaaacgcaccgttatctgcccttgttgaatttctttatctatcaatcgggaaaaaagttgcatcaacgggacatgatcctgaggatgcaatttcaccaataactcggcaagagtcacaccatcttccacgatagccttgccatataaagtaccgaataccttcttatccacatcatacacccaagacgacatattagccgtatccatcgccatctccatatccttcttgctctcttccgtgtgaaactcggcttccttcacggcagtaacatcattcgtgagtaatatatgccctataatacttcccttcttgttccgcaccgcgacaatccgcaccgcgtaaatcatggtatcccgatttttactcttgaaataggcattgctatttatcttgtcgaagtcatactcgaactccagttcaatctcctctcctccccggacttttgcctccaacacttcatccatataaggactattgaaaagattaaccgtaccgaccacggtattccggtcgtcaacaccatatatacgcaaggcactatcatttataaaacgcaatatcccccgtgcatcataaatctcaacccccatgggtaaatcaatacatacactttccgtgaacaaaaactgttcatccattaattcggacacttcctcttcaaaagacaaattaccatcctcccgagaaggcatttcacgttctttcattattcctctattttcgccggcacaacagatgtgctatatgtttacactcaaaattccttccatccccttacgacaagggcatctatcgtgcaaagatagaacaaaataggataaattcagtcaatcacgagtgataattatgaaagattaccatcaccaatttacaagacaattacccccatacaagatattccatttttagcacccgacttttctattttttatccttatctttgtcccgtcaattaaaacatattattcttcgatttatggatttcagcatcaatataaaagaaatattcaccgccttcatggtactctttgccattattgatatcacgggttccaccccaatcgtcatcggtcttaacagtaccgggaaaaaagtcaacgcagcccaagcgtcaggaatatctctggttatatttatcgctttcttttttgccggggacgggttattgagattattcaacatcgacataccttctttcgcactggcgggagcgttggtactcttcgtgcttgccatagaaatgactttcaacatcgaaatatttcaaaacgacggtcccgaaggagcaaccacattcatccccgtcgtgttcccgcttatcgccggggcaggagccttggcaacaaccttaaccctcaaagccgaatgtagccccttgagcatcatcatcgccatcatcctcaacatgctcgtcgtctacgtcgtcctgcgcaacgtctacctcgtggagcgcgtcttgggcaaaagcggtgtctacatcctgcgaaaattcttcggcatcatcctgcttgccatgtccgtgaagattttcacctccaatcttaatattctactggaatccctgcactaatcaaaaacaagaaatccctgtttccccgaaaaaacattacatttaacatcttttaatatcaaaatcggagaaaaagtgctccaatttatattttaatagaaaaaggaagctactaattcccgtgaaaacacgtctatcacaatgccgttcccttcgacgggacaaaaaatctacccgggtcaacaccttccaaaacaagcagatgaacttttttagcaatacctcccgcgtatccggtcaaactgccattacaaccgacaacacgatgacacggtataataatactgatcgggttatgccccacggcacctcccaccgcttgagccgacatattccgcacccccttttgccgggcaatttcttccgcgatatccttgtaagttatcactttaccgtaaggaatttcccttaatatttcccacacggcaagacgaaaaggcgtgctatccaaatgcaaatcgggagtgaaaccgggctccttaccgccgaaataacaatccaaccactcttttgtccgcacgaaaacaggcaaagacttctcttcatgctccgccgacaacgtatcggcaaagtatttctgaccgtcaaaccatagtcctgtcagactatcgccatcactggcaatcgttattccacccgcgggcgaaagatatttacaagtgtattgcatagcgttatagattaaaaaaacatctgatacttacaaaagtaaagattaattcttaacaaacaaatttctaattttttttccaatacttatcaccctttgtaacttttcactacctttaaacgtcccattaaaaaataataatcatgaaaaaaattacattcatcctcttcatgttctgcttcgccatcaccggagccatcgcgcaagaacaaatcacgatttcccgtttccaaggagaaaaaatcaccgggattgaagtccacggggcattcaaagttaccgccagacaaggcgaatccaccggggcatcggtcaccattcccgcccgactggaaaagcaactaaacttcacgctaaaacaggacgggatactactcattacctttgaaggtaaaatcaaaggaaaaaacaacgataaattcaccgccgaagtcaacctgtctgcgttagaaaatgtcgaattgaccggagcctcctccctcactttaacgggagaaatcaccgcgaacaacttcaaggcgaaaattgtcggcgcttccgccatgaagtcaaccgaccccatccgcgtaaatcaagaagcagaaatacacttggcaggagcgtcaaaaatatccggtgaactcaccgcccccgtgatagctttcagaatatcgggagccagcaacctcaccctcgcgggcaaaagcacggaaggcaacattgaagtaaacggagcctctcgcgcgaaccttgacaacttccggatcgacaatgccaccatcgaagcctcaggctcctcccacgtcaacatcaacgtcgtgaaaggactcagcgccaaagcctccggggtatcctcgatcacgtactccggcaacccgaaaatcataaaactcgatgccacgggagtatccaaaataaagaaagacaattaagtcgttactccgggtgacacacgcacaccgaatcggaaacatccttcccgtcggcacccgccgcaaacacgtaaacgacaagctcgtccgcctcgacatttctcgggaaatccacgttcgtgccgatcgcctctccccgtgtacccaattccaccacgcggcaacgcttgttccgtacaccagccaccacgccataaattttatcatccaagaaacaatcgatcaactcgagttgctcccccggggaggtgaaatgcaccttccggttctccgcgtccacctcggcactaaccgatggcggcaccaattgcccggctgccacccgcaatttccggtaatcaatctcgccacggaactcccgtccggctttcttgcgcacactgatcggtttctccgggtcaaccctctccacttccacggcattcgtcacgttcgcgctcacgaacccgttgaacccctccggatagccgtttcccccgggaaatcctaaccgaatggcgaccatcaaccatcgttttctttctgtcgtcgtggcgaaggctatcgactgccgtttctgcacctccccgttcggcttacgcttcaaccccgcactcttgcaatagttcttcccgttcttccgcacgtagccaatcacgttcccgtatttcccccgtatttttcctaccggattcacaaattctgccatactctttctattttaaaatttttcctgtcaaatataaatatttcctaccaaaactatgccaagattaggcaaatacatacattaatttatcactaatcccgtatgaattccggtttaatcccgtataaaacgctattagttccctattaaaacgctattaaaaccctatatagtaatagcgttttaatagcttattatttggattactaaaatattttaagtactattgcaccggaattgatacggaattaatacttaaatcatataggttatggataagacttcaccaatacttcttgctctacttgccaacggtcccgtcagaatggacggggtgacactctaccgccacgggaatggcgtgcggacgtgtaaatccaaacggggacccaagaaatcccgctcggaaggggaagaacagtcttccaaccaattcaccgaagttcggaagatgtggcgggtgtaccgacgcaccacgggagggctacccgtgtggaaaatctgggcaaaggaaactcatgccgccaaaagcgactcggctttccactccgtgaacggcgggtgtatccatccgggcgagggagtgtgggcgttcccgacattccgtttctccatgggaaccttggaagccccggtgattaccgatgtagcacgagatggctggacggttactctccgctgggaaaatgacgccgaccgaccgaaagcaagcgcctcggatcaagtgtacctcgggtatttctacaacacgcaaccccgttccccgcaaatgattacctgccataacgcgcaccgcggtgacggggaggtaaccatggaaatccccgcggcaggacaaccggacggaacgccactgcatctatatttgttcttcggcaacgagaacccggatcgcttttcaccgagcgaatacgcgggcatctagctgtttttgccccggtaatttgcagacaggtaatcgagaagaatttggacttggttgcgacgcgagtattgttttatcttgtcccaatctcgcggaagcacctccttattcttccatatctgataacatttcatgatcatatttttaatcccctctttatcggcgtcgtcaacgataaacccggcttttgtttcggcaagtagcggggcaaccacatcgttagggtcgtacaaagctaaaataggtttattcgtggcaagataatcgaacaatttaccggaatacactcctttccgcccggagctatgcaccatcacgagagtatcaacctcggtcgtggatatcctgatcgcttcttcatgaggcacagccttacattgaatcacgttcgacgatatcctgccgggtacatcaacatgcctgtgatttccaactattttaatccgactgttttcgggtagtcttccctcctcgattaattcggaaaaggcgttaaacagattatccggaatagccattccataaaacctacctatatagcccatcgtgaattgggattgaaaattcacttcatgacactcctcgtaatcatatccgtttctcacttccaaaaaccgctcgtgtgaacacatcgtcttaaaatcatcaataaggggcttcgacacggacaataccaaatctgccttctcgagtattttacgttcataaaacgagagccgtttcgcgtatattttggaatagacaggatgttttgacatttcgtcacgcatgtcagcaacccaaaagaatttgtatcctctctttaacaatttcatcacgagtgcgtgaggagtcaaaggtccgaaagaactcaataccacatcgaaatcattcctttgaaataattcttctatttttttatatgccttggcacgccaaatacagggtcccttcaaaaatattcttgcttctaaagccctaaccactcgtcttggagtccattttttatttaactgtatttgtttaagcaaatacgccggagtcatcatcggatctttaatatagtaaacttcacagccattccacaaggcggtttcatcacattctccctcggtcacgaccgttaccgaatgccccgcttcatgaaaatatttagcgaacgagttaattcgaaaagaggcaattcgattgtaaggataaaaatgctttgtgataattagaatattcatagtcaatttcattttcatggattcgttcgcagggatgacaccaacggtttcaacagcctcacgtaattaatccccgcgatatatgaaagaggcagatagacaacaaccgatatcaaaaatcccgagagaagaaccgggaaatcacgggtaactcccgttaaatttaccgcacaactccctaaaaaacacgagaagacagacacgaatagaattttggacatggatttccatggcatcaatcccgaaagcccggtgttcaggagccgtgccgtacttaccattaaaaccacaagacaaaagaccgtggttgccgttgcaatgatagcaatcgcagacaaagacggaaaaaaggtaacgcaaagaaaatcaagccctagcaatagtaccgccgtgaccaagtgggcgttggcaaatatcttgcctttgcctaacgcgaacattatcggtccgtacggcacgatacgcaccaaatttactatcgtgacaatccggaataaaccggcagcttcacgataagcggtcccgtataacactcccattatttccggggcaaaaatgcaacaatagacggtaaacggatatattaccgacgcagacttgagcaccacgtttttccaaaggaccagatattgcccgctaccggaaccgtcctttgtcatccgggaaaattccggtaataaaataccggaaacgacaccaatcattatccccgctaccggaagttccttgtaaccgttcgcgaacatagcgaattcttccaccccaaagtaacggctcacgaaaaattggctcgcggaaccaatgacgaatccatacaagctcgaagaaaacaccggcatcgagaatcgcaatatatccgcgattgtcaaatccgttcttccccgtgttacatttttaaagggcaatgacaagagtctcgtaccaacgagaaaggagccaaaagaagcgagcaccaacccgataactgccccgggaaccccggtattgaaaacaatcacgggtatcacggaacaaagtacgctgaaagcgcgactcaacagcacgtacaccagcacaacacgtgccctcccgtacacggtcaatacgcgctcgacgcccaatacctgcatcaatagcaagggagttatggcaaaatatttcaaattatcggttagcaacgggttgccaagtaattcggctatccatgatgcccccgtgaacaaggtgactgaaaaaacggaagaaagtccccagaataacacgccgagtttgcgaatcaccgcctgcccttcttctaccgggacacgtgcaagaaagtaagaatacgcaccgggaagcccgaaggaaaaaatcatcaacaaagtcgagtaaatataaatcacctgacgatacgtgccatactcgacagcagtcatatatcggctaaggatagccgatatgaccaatgtcatgcataatgacaaggcattagccagcgccaaccataacgcttgcgccgttctactgttatccgccacgaaactcctacacatcatgtttcaattcacgagcatgtatacagttataaactacagtatctaaatgttttacaatatcccttcacatacaatcaacataaagttgcatggttgaagaacaaacatacaaacgtaataaattatccgagatatgcaaaaaatatgaagttgcatggttgaataataaatatataatgtaacaaattatccgagatatacaaaaacatggcgcatgtaccgacattttaggtatctttgtcttattgtcacaaaaaaataaacggatttccaaggagaaaaggagttgttcgagggactggcgatagaggcgttggaaaaggattgggtgcgcagaccggtgttacatctcgatctgaatatcgggaaataagattctccggacagcttggataaaatcttgaacgaggctctgataaaaaagagaaaggacaagaaaattattcttatccctgccctaaatgttttcacaacggaataatccttattgtgatttgcttaaattagtatcacaaacatagaaaaaataaacgagatgccataggatttttaaagaaatatttatagttttggagaaattcaaacagtatggtcatggggaaaaaaattttaggactggatttaggaactaacagtatcggctgggctataataaacggtaatattgataacgaaaacaaagtacaattagaggaaatagaagccgccggcagtcgcattattccgatggatgccgccatattgggggacttcaataaaggaaattcaacatcacaaaccgctgaacgtacccgctatagaggcgtacgccgtttacgagagaggcatttattaagacgtgaacgtttacaccgtgttttagatttactgggatttttacctgaacattacacgaatcatttggatcgtcacgggaaattctcaacaggcattgaatgtaaacttccgtggaaaccggatgaaaacggaatacatgaatttattttcaaagattctttcaatgaaatgttatttgattttgccacccatgcacctgaattagtcgcgggcaataaaaaagttccttatgattggacgctatactatttgcgcaaaaaggctctaacacaaaaaatcaagaaagaggaactggcatggatactactaaattttaaccaaaaacgaggctactatcaactccggggagaagaagaaaaagaaaattcctctaaactggaagaattttacgcgcttaaagtcgtaaaagtagaagacagcggagaaaaaaaaggaaaagactcgtggtataacattcatctggagaatggcatgatatatcgccggacaagtgccactcctttagagtgggaaggcaaaataaaagaattcatcgtaacaacagatatagacgcggagggaaaccctaaaaaagacaaagaagggaatataaaaagatcttttagagcaccgaaagaagaggattggacgctttcaaaaaaaagaaccgaggctgatatcgagaagagtggtgaaaccgtgggcagatatatttacgataccttgttacagaatccttctcaaaaaatacgcgggaaactgatacacacgatcgagcgtaaatattacagggatgaacttcaacagatactgaaggcacaaatcaaatttcacccggaattacagaacaaagaattatatactacctgtattcaagaactttatcccaacaacgaggcacatcgcaataatattgccgcaagagattttattcaccttttcatgaatgacattatcttttatcaacgcccgttgaaaagtaaaaagtcgctcattgaaaattgcccgtacgagcagaatactttcgttgacacggaaacaggagaaatcaagacctccccgatcaagtgtatcgccaaatcccacccgttattccaagaatttcgcctgtggcaatttatctccaacatccgtatttaccagaaagaaggcgaaaatgcaggggttgatatagatgtcacccgacaattattgcccacagaagaagattacgccgaattgttctcgtggttaaatgacaaaaaagagatcgaccaaaagaattttttgaaatatccggcatttcacttgaaaaacaaagccgccaattacagatggaattatgtcgaagaaaaaacttatccttgcaatgaaacccatgcccaaatcttggcttatctcgggaaagcacacgtagctcccaccttcctcacgagggaaaaagaagaagccttgtggcatattttatactcggtggaggataaacaagaaattgaaaaagctcttcggtcgtttgcccgtaaaaataatttgaatgccgaattcgcggacgtatttaaaaagttccctcctttcaaaaaagaatacggagcctattcagccaaagctatcaagaaattacttcccttgatgcgaagcggaaagtactggaacgaaactgctattgatgcccaaaccaagactcgaattgacaaaataattgccggagagtacgacgacaatatacgaaaccgggttcgggagaaagcgattaacctaacctccatcaatgacttccattcgttgcccacgtggctggcgtgttatatcgtttacgatcgtcactcggaaatgaaagatatcacccggtggaagactcccgcggatatagacgattacttgcaatcattcaagcaacattcattgcgtaatccgagcgtggaacaagtgatcacggagacattacgcacggttcgagatatttggaaacaagcaggtcggattgatgaaattcacgtcgagcttggacgagagatgaagaatccgtccggcaagcgtgccgacataacacgacagattttggaaaatgaaaacacgaacttacgcgtcaaaatgttgttgacggagtttatgaatccggaattcgagattgaaaatgttcgtccttattctccaagccaacaagatattttgcgtatttacgaggataccgtgttaaatagtactcccgaattaccggaagatatttcttccatattggacaaattcaaacaaggtgacacgaaaaggtacccctcccgttctgaaatcttacgttacaagctgtggttggaacaaaaatatgtatccccgtatacaggtgaggtaataccacttggcaaattgttcactcccgcttatgaaatagaacatatcatcccgcaagcacgttattttgatgattcgttcagcaacaaggtgatttgtgaagcggaagtgaataaattaaaaagtaattgcttggggtacgagtttatcaaaaaacatcccggggaaaaggtgttcctcggttccgggaaaacggttgaaattttctccgttgaagcctacgagcgtttcgcgcgtgaacactattcgcgtaaccgtggtaaaatgaagaaactgctcatggaggatattcccgagcaattcattgcccgccaattgaatgacagccgctatatcagtaaagtagtaacatctttgctctcgaatatcgtgcgggaagaaggagaagaagaggctctttccaaaaatgtcattgtttgcacaggcggcgttacagaccgactgaagaaggattggggggttaatgatgtttggaacaaaattattctaccccgttttgttcggttgaatgaaataacgggatgctctcgatttacatccgtgagcgcaaacgggcatattattccttcaatccccctcgaattgcagaaaggtttcaataaaaagcgtatcgaccatcgccaccacgctatggatgctatcgtcatcgcgtgcgcgaatcgtaatatcgtgaattacctgaataatcagtcggcaagcaacaaagcaaaggtttcccgtcacgacttgcaatcgttactctgtaccaaatataaaactgacgataaaggtaattataaatggattctcaacaagccttgggaaacattcacgcaagatatgcagacggcattgcaaaacatcattgtcagtttcaagcagaatctgcgtgtcataaataaaacgacaaatcactacctgcattacgaaaacgggaagaaagtatataccagtcagatgaagggaacaagttgggctatccgcaaaccgatgcataaagaaaccgttttcggagaagtgaatctgcgcaaaataaaaacgatttcactgaaggaggctatcaagcaaccgcaagcgatcgtggaaaaagacttaaaaaagaaattaatagccatgctcgaactaggttatgatagcgggaagataaagaagtattttgaagacaatcgtgatgtctggcaagacattaatctttcaaagattgaagtttattatttcacgcgagaaacaaaggacaggtattttgccactcgcaaaccattggatacgacatttacccgaaagaaaataatagaagaaataacggatacaagtattcagaaaatcctgctccgccatttagaggaaaataatgatgatcccaatttagcgttttcgcctgacgggattgatgccatgaatcgggatataaagcggcttaacgacgggacgcaccatcaacctatttataaagtaagatggtacgagaaagctgataaatttgccgtcggacaatcgggaaataaaagttcaaaattcgtggaagccgctaaaggtaccaatctattcttcgcgatctatgaaacggaaagtgttgatcccaaaaccggcacgcttgcacgcaaaagaacgtacgcaacaatcccgttaaatacggttattgaacgacaaaagaaaggattggcgcccgctcccgaggatgcaaatggggatagcccgaaatatgttctttcgcccaatgatttagtgtatttacccacggcgaaggaggtgagtgatggaaagattcatttcccgatagagcgagaacgaatatataaaacggtgtcatccactggataccagtgtttctttatcaaagcggaagttgcaaaaagcattgtagataaagttgaattttctcccatgaataaaatggaacgagcaatcactcgagaaaaggaaatgataaaagaaacctgtcttcctattaaaatagatcgtctgggaaatattataaaaataggagactttaaaccggaatagccatgcaagaggaaaataaaagtcaaattcttctttatcaaacagaagatggaacagccaaaatagaagtgatcctttccgaggacacggtttggctgagtattgatcaaatggcggaattatttcaacgcaataaatccacgatatccagacatataaaaaacgtattggagagtggcgaattaaaaacagaggcagttgttgcaaaaaatgcaacaactgcctctgacttgaaaacatatcaagtttcttattacaaccttgatatgattatcagcgtggggtatcgggtaaattcccaccggggcgtacaattccgtatatgggctacgcaagtgttgaaagaatatttagtaaaaggattcgcactcaatgacgatttgttgaagagagcgggaggaggcaattattttgatgaattgctcgcccgtattcgtgacatccgttcatcggaaaaactattctaccgaaaagttcttgaaatttatgcactcagcatagattatgacccacgtacggaaatgacccgatcgttttttgccacgatacagaacaagatgcatttctcggttcacggacacacagcagctgaaattatttatagccgagcagacgcggagaaagatttcatgggcttgaccacgtggacaggaatgataccaaaacgaagtgacgcagagtacgccaaaaattatctgaccgaagaagaactggatatcttgaaccgagtcgttagcctctttctcgatttcgcagaattgcaagctaaaagtcatacacccatgtacatgaaagactggatgcaaaaactggatgattttcttaaactttccgggaaggaactattgacacacgccggaagcatctcggcagaaatagcaaaactgaaagctgataccgaatacgacaaattcaagcaacgaacggatacgcaattatctcccgtggagatacattttatcgagaactttgaaagagagaggaaaaatctaaaacaataaagggtactcacaaaaatatttacatcatgatcaagaaaactctctattttggcaatcccgtatatctttctttacgaaacgggcaactagtcatcaaattgcccgaagttgaaaaaagcacatctcttcccgaaactctaaaaaaacaagcagaaacaacccgggctatcgaggatataggcattgtaatactggacaacaaacaaatcaccattacatccggagtcattgaagctttactggaaaacaattgcgcgcttatcacttgcgacagtaaaagtatgcctgtaggtcttatgttgccactttatggtaatacaacacaaaatgaacgtttccgtgaacaattagacgcctctgtacctctaaagaaacagctttggcaacaaaccattcaaaccaaaataaataatcaagcaaccgtattaagcctttgcactcacgaggaaataaaatgtatgcgtgtttgggcaaataacgtacgaagcggcgacccggacaatttagaagctcgagccgcggcatattactggaaattattatttagcaacataaaaggattcactcgcgaacgtgaaggtattcctcccaacaatctattgaattacggttatgcaatcttacgtgccatcgtggcacgaggacttgtcacaagcggcttgttgccgactctagggattcatcatcataatcgctataacgcttattgccttgctgatgatgtcatggaaccctaccgaccttacgtggacgaactggtatttcaattaacgaacgcacacgatatacctattgagttaacaaaagaattaaaagcatctttgctcacgatcccaactttagaagttgttattaatggtagacgtagccctctaatggtagctgtaggccaaacaacagcttcactttataaatgtttttgcggggaaagccgtaaaatagtttatcccgaacgatagtagcatggatcgtttcagtgaatatcgtattatgtggatacttgttttcttcgacttgccaacagatactaaaaaagataaaagagcatatttcgatttccggaaaaatttacaacgggatggttttactatgtttcaattttctatctatatccgccattgcgctagcatggaaaatgcagaagtccatattaaaagagtgaaatcctttcttcctgaatttggaaaagtaggaattatgtgcatcacagataaacaatttggaagtattgaattattttatggacataaaccacaagcacccgattctcccggtcaacaattggaattattttaaaacaataaatcccacttttatgtgagatttattgtaaggattctatcccttttttctttcctattttaagatataaatctttgttattcagccaataacaaagattgagctgtttccaataggtcaaagatactaatttgtaagcaaatcacaacattaaaaagtttcttcccgactacgataaagctgtttccaataggtcaaagatactaatttgtaagcaaatcacaacgtactcttgtcaggcatattattcaattcagctgtttccaataggtcaaagatactaatttgtaagcaaatcacaactgttctttgcggacgccctttggagagaaagctgtttccaataggtcaaagatactaatttgtaagcaaatcacaactggctcatctacttcttatcagcgtcgccagctgtttccaataggtcaaagatactaatttgtaagcaaatcacaacgataatcaataataacgactggatagtatgctgtttccaataggtcaaagatactaatttgtaagcaaatcacaaccgactacttgcaattatcgaaacaccggcgctgtttccaataggtcaaagatactaatttgtaagcaaatcacaacagggtcatgcaggtagatgctaacgagtatgctgtttccaataggtcaaagatactaatttgtaagcaaatcacaacactcatggtcgtaatattgaaaatccttatgctgtttccaataggtcaaagatactaatttgtaagcaaatcacaacaagaagaagaagacggttgttccgtggcagctgtttccaataggtcaaagatactaatttgtaagcaaatcacaactggaagagcgagatatcctccgattttacgctgtttccaataggtcaaagatactaatttgtaagcaaatcacaactcctcacctaacgctattttccccaagggtgctgtttccaataggtcaaagatactaatttgtaagcaaatcacaacaccgcaattaaaggacatttatattgcacgctgtttccaataggtcaaagatactaatttgtaagcaaatcacaacttgatgttgcatgacaagaaaaacgattggctgtttccaataggtcaaagatactaatttgtaagcaaatcacaactcaaccagacatgtgtcttactgtgtctgagctgtttccaataggtcaaagatactaatttgtaagcaaatcacaactatatatgaaagaaagagttaaacaacggggctgtttccaataggtcaaagatactaatttgtaagcaaatcacaacagtcatgcaggtagatgctaacgaatatcggctgtttccaataggtcaaagatactaatttgtaagcaaatcacaacggttcccgtactcctctagcggagtataagctgtttccaataggtcaaagatactaatttgtaagcaaatcacaactgcttctgagaatgagaaggcacgtcgatagctgtttccaataggtcaaagatactaatttgtaagcaaatcacaacaagaatttatcaccggaggaaaagatggtgctgtttccaataggtcaaagatactaatttgtaagcaaatcacaactccgagagtatgaccaagttcgagttaatgctgtttccaataggtcaaagatactaatttgtaagcaaatcacaacacaaaaacagagagaaaggtaaaaattttggctgtttccaataggtcaaagatactaatttgtaagcaaatcacaacgccgacttatcattcattgtcacggacacggttgtttccaataggtcaaagatactaatttatatgtaaatcacaatacacaacaatatggctacaatctaagatcaagataaatctcaatgctaaaactcgcaataacgagagatagaccgtgctcctaacgaaataaatcttttccccattcattagtaatattaaaaaatacgtattattttcgcggcgttatggttctcgtgtaagatattctacaatcttacgtgggattaatagggaatcaggtgcaaatcctgaacagatccactgctgtaagtttcgtaacaacttctccggcactcacgatccactgtctattttaaggatgggaaggacgccgggaaggaaacaagtcagaagacctgccatacacaacattgtttaacgttcaaggggaaggaagaacgtgaacgccgatagcttaacaattgtcgaccgtgtacgtcaagcctttttctgactaaaagggaatttatgttcatgaaaaagtggtttcattttctgacaatcgtatggattagcatgacgttagcgtcgtgcgacaaaccggggatgccttatcccgacggggtgctgggcgacggggatattgaggctctcgtgctgaacgaggggttgattaacacaaacgccggggcgatatcggtgatatacaaagacagtaccgtggtagtggatgcctttcaagacgtgaaccatcgcccaatgggtgacgtggcacaatccatcacgctgattaacggaaagtatttcgtggcgatgaataactcgaagaaaatcgaggtggtcaatcccgtgacgttcaaatccgagggaacgatactctacacgcaggcgggttacccgcgacagatagtgcctatctcggaaacagaagccgtcgtgtccgacttgaaccgacaactggtgcgtattcgcacggtagccccttacgggaagccgctggaatatatttcaatcccgagatgggtggaatatctggtcgtggcggaaaataaagtgttcggcatgacgcagggaggtttgtacgtgttcgatgccaacaacatcaataaagagtacgcccgggttatcaaggatatatacaacgaggagtacacgaagacgtgccggatgctgatagacaaagacggcataatctggggattgatgcaccagaaaaggagcggtgtcgtgacaggcgtcacgctgaaaggcgtagacccgaaacgggaaaaagtagttaaatcgtacaccctccccatcggcgactcgagctcacagacaccgggcgagattatcggctatatcaattacaaccgcacggatatcgacccgacgggaacatggatatacttcaacgtgaaaacccgtgcgacagaagaaaacgccaagggcgaaaaagaacagcagagcgtgtaccggatgaacgtgacgacgggtgaattcgaacattattacgacctgccgggcgtgggtatgatgtacgggttcgcggttagccccgaaggcgacgtttacctgtgcgattgtttggattacacggcacaaagaggttatatccgtcattatctgaaagacgggagaagggtaagccacaaagtgggtgtttatcccgggcaagtgtatttccccggaagtcaacgttaaaatgcagaatatgttcaaaaaaataacgataggattatgtgcctgtttcacgctgggcagcgggatgcaggcagaggcacagcggcgggattcggtggcgatgcacgggactctcgacacggtgcaggtggtgagccggcgtatccaacacgccaacgaggcaaatgccggggcgaaggttagccgcatagacccggaaatcatgcaagcgaataaaacccgttcgttggcggaattactgacggactacacggctatttatatcaagagcctcgggatgggagccttgtcgaccgcctccttccgtggagccagtccctcgcaaacacgggtgaactggaacggcatcaatatcacgccgccgatgtcgggaacgttcgatttctcgcaaatcccggttttcttcacggacaatatcaacttgtattacgggagcagccacgtgaagaacgggacgggagccatcgggggaagtatcaacctattcaccgacccggattggcgaaagggagtaagcgggaaagtgctgggcgagtacggttcctacggcacgtacaccacgggggcacaagtaaacacgggcggagagaaatcaagtttcaaaacccgcctgtattaccagcactcggataacaactatacttatttgaacaagattctgaccaacgtccccttccgcgagaaacgacaggatgccgattacacgcaatgggcagcaatgcaagaaggttatttccggttgtcgcgctacacccggttgacggcagtagcatggtatcaagagggcgaacggatgttgccccccgcgcttggggtggtgaaccaatcacacgagaaacaacgggaaacgaatttccgggcatacacgggactggatttcacccggggtatacacgccctgcacgtgaaagcggcatggctgtactaccggcagaagtacgacaaatggtacgccggggggatgtttgaccccgagggtactaaaaatcaatcgcaaacgtggcaaggcattgcagactacacgtgtaccccgcaagaaaacctcgtgctggggacaagcctgacttactcgcacgatttgatacgagtgagcagttacattgatatcgactcgtcgaaatacacactgggcgacgtggattatgatatcccggtggtagaaccgccattccgccatcaccgtaacgtactgtcgtggcaggcatcggcgttgtggaccccggtggaatggatgatattgaacgggcagtatatgttcgagcaaaacgatagccagggagtatccacgtggtcggcgggcgtggtatttaacctgtgggaaaaagagttgcaggtaaaagggaatatggcttacaattatcggttcccaagcatgaacgacctctattggcgaccgggaggcaacccggaggtgaagccggaagacgggtactcgtatgacgcttccgtggcttaccggaaacacttgtaccgggggttatcgctggacgcggaggtatcgggctacttgatgtatatcgacaactggatactgtggttgcccaaggacgggaatcaatgggtgtggacgccgcagaatcaccgcaacgtgcgctcggaaggcgtggaactgtacgggaagctgacatacgagatgggggatttaaaggtgaacgcatccggcaattacagttggtcgcaatcccgtacccgcaagaaacagcacgaggacgacggctcgtacatgaagcagattccttacgtgccgagattcaaatggaacgtgcgggttgccgccgattaccggggagcctttttctcgtggcaagtgacttacatcgggcgacgctttatcacgaccgaccaagcatacgctacagacccctattcggtacacaatatattggcgggctaccgtcacgagttccgtaacggcatgagcctcaccccgcaggtacgggtggacaatctactggacatttattacgaatccacgcagtactacccgatgccgttgcgtaactgcctcgtgtcgctgatgtgggaattttagaggaagaataaacaagttatttaatattacatgatgaaaattaaaattatgaagaagttttatttagcacttttgcttttgggaatatttgtaggattcttgagttcttgtagtgatgatgacgataactggacacccgtaccaccgaccgtaaccatcgaaagcgagaatggcagtttttcgacgctcccgatggaatctatcgtactgaaagccaaagttgacaacccgtcagaaacaagcttggcttggtttgtaaacgggcaaaaagtggcaacagattctatttataccttcacggcagaaagtattggtaattataatgtttctgttatagcatgcactacaaatagccgcaatcatgcttccacttcaattgaagttcacgggaaatacaagtatggtacttttatcataaacgaatcaaccatgggcagtcccgggaatttaattttcattaatcctaaaggagaggtgacagataacgcctattaccttgaaaacggaggtgacttgggaaagcaaagccaagatctattcatcaaaaacaataaaatgtatattctttcacaaaacgggggtgatgacggaggctttttaaccatcctcaatgcagaaacattgaaaagggagcgaaaatttcaggaagaacttaacggacaggtgagtatgcctagccacgtggcagtactaggagatgatgacatttacctacgtgacaataatggaataaaaagatttcaaccatcaagtggaaccgtcactcttattgaaggcacaaagggtgctcggaaaaatacaatggctgttgctgacgggaaagtttttgccacagtaaaaaacacggttgtcgtaattgaagcaggtaaagatgcaattagcaatacgattgaatttgacgggaatgtttccggtgtaattaaagcatccgacgggaatctttgggtttccgatgcatccggaaaaatcactaaagttgacccgaaaacatacgccaaactaggaagcagcactgtatcagaggaagcaaaaagccttctgaacccatcatacgcagcagcccccagcattacagccaaaggggacacgctatacatgagtgcccttaaatcaacaatttaccgtcatattttcagcacgggagaaacgaaattaatggtggatgcccaaacgatggtcgacaacgtcggtatcatttacaacacgtgcgctgttcacccgattaccggagaagtttatctaaattccataaaaggatacggccaagactacaagattaataacatcagtgtattcaactttagcggggatgaaccagaattaagtgcaaattacgaaaatcacacggcattccccgccggcacattcttcacttataattttgaataaacggttcatgaaaaagaatttactttatatattagctattctggctatcgcgggaatgtggagttcctgtagcgataatgatggcggagaagatgaaccggagatgcctcttaccgcaccggaggtgtctgtacagaacttgagcttgaaaaatgctattcttccctcgaaaacggtaagattaagagcgaatatcatcaacaccacacgtgctgacttgcaatggttcgtggatgggaaggcaacatcaacagacacgatatacgaattctcgtccgccacagagggagagtataaaatcaaggtgacggcatccaacatcttgggcgaggcatcggatagcacgtatatcacggtacaagacggtttcaaaatctcggacgtcacgaactggacgggcgaaggcgattgccgttcggtgctggcgatacaatgggtaaaaccggaggtggaggatttattgcacccggcagacgaggatgtctttttccgggcgtggggatacaagtggaataaaccgcaaaaagggaagatatcccccacgggatttgacatgattaaagccattgccaagagtgatccctgcttgttcgtcatcgtttcgaacgatgccctagggactactatcaagggattcggttatgacggcaacggtgacgggaaaatctcgattgaaagcgatgatttcgtgcacaacgaaagagaatacaaggggatttctttgacagaaacgaatttcgcggatggtaacatatacgtgcaaaagcaagaggataacattgatgacgtcagggttaccagcgagggcgactggtggatgggcggctggtacgtggcttatgcatcctactggttgg

SEQ ID NO: 1120 - DNA, 24533 bp, synthetic construct
  source 1..24533: mol_type = other DNA
  misc_feature 1..24533: note = Synthetic
ctgggtatcatgcgggtagtgaattcaccggtataactaatcttgctgactcctgcttttccttttttggtagtcactacaataactcccgccatggcacgtgcaccatagatggaagtggcggaaccatcctttaatatttgaaagctttcaatatcatcagagtttaaaccggcaatggcagaactgattagcgtttctgcatcacctgaagataaatcatccggacctacgtcaatagcatcttccatgattactccgtctaccacccataatggctttgaactaccatagatggaagttgctccacggacacggatttttggcgcagttccgaaagttcccgatacattctgtactgatacaccggctgcgcgtccctccaatccacggctgatatcaggaaggccgtccagtttcacgttttctgctgtcaattggttggtagctccggtaaataatcttttgtccatcttttgcatacccgttactactacttcagacagcgtttgtacatctggcatcaaggttacactcatgcttggggccggagtaagatcctgcggtttcatacctatataggagaattgcagaacggacttattagatacgttttctatagaaaactttccgtccatgtctgttaatacgccggatttgcttcctttgataagaaccgttgctccgataagaggttggttgtcatcgcctgaaataactaccccttttacattgaacacttttgcctgtttggagggacctttaggtgttatagtgacaaattgatcttcaatgtgatattctaatggcttattactaaggataacatcgagtgtctgttccaggctcttgtcttttacagaaccggaaacggtgaacttcttcacatcgtcgtacgtaaagaggattttgtatccggatatcttttccaagcgttttagtacggacggcagacgttcgttactaaattcaattgtgattttcttttgtggttgcgtctgggctcctacttggtagggcaaaaagtataatacgcatagaaaacacacaataaataggttccaattttttctcatacgtttgtttttaataacactatttggatatgtttataatactagtgcgtatgagttgaaaaaatggataccccttttgcgaattattttttaataaaagtgataaattgctattatctgtatgaatctgtaatatttatgcaatagaaagttaatctatagtgagcgtattgccttgcaaggtgactgtcacttttttcattctattaagtaatgagatcgtatgttccaggtctttcgtacgatcggatataaagtgcattttgtactccatcgcttctttatttctgaattctatgtttacattgtaccaacgtcccagattctgcatgatatctttcaatgtgacatcatcaaaatagaaatagccgtctttccaataaacataagagtccagatctacttctgccagaacgaaattgccgtcagattgaagatgtgcatcttcgcccgggtagagtctggtatatgctcctcctttggtattgctgacttctactttcccgttaatgagtactacgtgagtatcttcgggggtatagctgcgtatattaaattcggtaccgagaacacgggtctgtactgtcttggtttttacgatgaaaggccgcttcggatctttggttactttaaaataagcctcaccctccaaagtgacaatacgttcgttgccaataaaagctgtaggatagacaaagttactattagcattgagccagacttccgtgccgtcacatagcactactttgaagctttcaccgcgagggacggtaagtacgtgtgtttgtgtagttgttgaaatgatctgtctgtagtccagttctttcttctccgattttgagatgactttctggtgcagggcttgattggttgattgcggttcgtctaatacaatcttttctccgttatctttttgcagagtgatatgttgaggggcagcatcagcagtaaatacagtgattggttcaagagtaggggtcgtcagggtattgataagatagtaagttccaaataagacggcaatcatggcggctattcccatacttactttccagaagttggaacgcattcttgtcgtgtattgttttttcttgaatcgttctagctccatctctatattgggtagttccattccgcttttttgttgtaggaagaggctactatccatgatgtcgcgacaagcctgcagggtttcttcatctttaagcatttcctgcagttgttcgacgtttatttctgaagagctctccataatgtcgagtgccttctctacagatttatctgtattatctatattgtcaatatctttattcatcactgtttgactgtatcatacttatttatattacgtttaatcataaaataaagacacctgctttatgatttttttgcacattcttcgcgtatcacctgcaatgctttcacaatatgcttcctgactgcactgacactaatatttaactcctctgccacttcctgatattttttacgttgaatatagcattcttcaagaatatgtttggtatgtggagtcagtttttccatagccttgctgatatgcatcattctttcgtcctgctcctgatactccgtctcaacataacttttggtcagttcggaatagatttgtacgtactgttcatgtgtgctctgatgtcgcagaaagtcaatacttttgttgcggacatagacatatagataagatttagctgtggctttatctattttagcataattggcccaaataaattcgaaggcgtcgctgacgatatccttactagcctccatattattaatcaaatgaaatgcgtaataataaagttgaggatagtactctttaaaaagaaaatcaaaatcggccttatcttccacgtgctttaaaagtgttgaatagtaaataaatcgcgttgcaaataaacaaataataattgagaaaagcaaaatggcttttattttatatttatcgtatctttgtggcatcatattttttgaatcaatattcatgtagaaccagggaagtaataatggagagtgttttaattacaggtgcaagtggttttataggaagtttcatcgtggaggaagcgttgaaacgaaagtttggtgtgtgggccggaattcgccccacgagtagcaagaggtatttaaagaaccggaaaattcactttctggaattggattttgcacatcctaatgagcttcgtgcccaactctccgggcataaaggtacttacagcaaatttgattatatcattcattgcgccggtgtgacaaagtgttctgataaaaagacctttgattatgtgaattatcttcagactaaatattttatagacacgctgaaggaattgaatatggttccgaagcagtttatatatattagcacgttgagcgtattcggacctgtacgcgagaaggattatactccgataagcggagaagatgctccgatgcctaatacggcttatggattgagtaaattgaaagcggaattatatattcagagtattcccggttttccttatgtcatttatcgtcctacgggagtttatggtccccgtgagtcagactatttcttgatggccaagtccattcagaagcatgttgacttttcggtaggttttcgacgtcaggacttgacttttgtttatgtgaaggacattgtgcaggcgatttttctgggaatggagaaaaaagtggttcaaaaggcgtatttcttgacagatgggaaaatctataaaagtcgtgccttttcggatctgatacaaaaagaattgggtaatccgtttgttcttcacttgaaatgtccattaattgtgctaaaagttatatctttgttcgctgaattcattgctacacgttccgggaggagcagtaccctgaattcggataaatataagataatgaaacaacgcaactggcaatgcgacatatccccggtgatgaaagaacttgggtatgtacccgaatatgatttggaaaagggagttcgtgaaaccattgcctggtataaaaatgaaggatggctttagacttatttaagcgcgtagaaacccggaaagggttgtttgctgtggaaaagattacactgatttataatctgttgacttccatattgattctgttcctgtttcagcgaatggatcatccatggcacatgttgctggatagggctatgatcgcggcgatgacttttttgttgatgtatctttatcgtcttgccccctgtaagttttcagcgtttgtgcgcattgttatccagatgagtctattgtcttactggtatccggatactttcgagttcaatcgcttctttccgaatttagaccatatatttgcaactgccgaggagtttattttcaatggtcagcctgctatctggttttgccatacatttccgcaccttattgtcagtgaggcatttaatatgggatatttcttttattatcctatgatgctgattgtggcgttgttttatttcatttataagtttgagtggttcgaaaagatgtcttttgttctcgtcacttctttctttatctattatctgatttatatattcgttcctgttgcagggcctcaattctatttccctgccatcgggattgataatgtatctaaaggtttttttcctgctatcggtgactatttcaatcataatcaggaattacttcccggaccgggttatcagcatggattcttttatagcttagtggaaggttcgcagcaggtaggcgaacgtcctacggcagcattccccagttcgcacgtcggtatttctactattttgatgattatggcatggcgtggcagtaagaaattgtttgcttgtctgatacctttctatatgttgctttgcggggctaccgtatatattcaggcgcattatgtgattgatgccattgtaggatttttctctgcattcctattgtatgtggttgtgacctggatgtttaagaagtggtttgcacaaccgatgtttaagtagaaaataggaatatacttctgtattttgaaacaggtaatctccatccgcaggagtcagagtttgcggatgaagattatgatctatggtggattaaacttccggattctctttacgttgggaagtgatttcttcaaatatgcggaaaagctcttcctttgtttctgcccgtaacatggcaatacgcgtattacggaaattaggtattcctttgaataatggactggcagccaaatgacggcgtacgtgcagaatacctctgcgctcatcaagtagatttacactgtcgaccacttcctggcgaagaacttccatgcaccagtcgaaacttagcggtggtaattcttcaccagtctccagatagtgtttcacttctttgaatatccatggacgaccaaagctggcacgaccaatcatgacagcatctactccataacggtcaaaacactctttgcagcgtttaggcgtcgtcacgtcaccattaccgataataggaatatgcatccgtggattattcttcacttcgcctattaatgtccagtctgcttctccggtgtacatttgtgcacgggtgcggccatgtatagtcagtgcagcaatgccgcaatcctgtagctgttctgctaattctacaattactttgttgttagcatcccatcccagacgggtcttgaccgttacggggattttcaccgcatctactactgcacgggtgatctccagcatcttagggatattctgtaacatacccgctcctgctccttttccggctactctttttaccgggcatccgaaattgatatccagaatatcaggttgtgcctgttccacaatcttggcagcttccaccatcgtttccgtatctttcccgtatatctggatggcaaccggacgttcggcatcactgatacttagtttctgcgcagtcttgctgacagcacgaatcagtgcatcgctcgacacaaattcggtgtataccatatctgctccgaacctcttgcacatcaggcggaaagccggatcagtcacatcctccatgggagcaagtaagatgggatatttacccagatctatttggcctatcttcatatatgaatctgatatttactgtttatgattgaagtaacttcttgttttcgctgcaaaaatacggaaaaaagcctacctttgtacgcattcatttgcttaactgatacaaataagtatatattctatgagtcttagtttgaaagattttgaaataatggctcctgtcggttcgcgcgaatctcttgctgcggctattcaggcaggtgccgattctatctatttcggtatagaaaacctgaacatgcgtgcccgttcagccaatacgtttacgattgatgatttgcgggaaattgcccgtacgtgtgatgaacacgggatgaaaagttatttgacggtcaacacgattatctatgataaagatattccattgatgcataccattgttgatgcagccaaggaagccggaatctctgctgtgattgcagctgatgtggcggtgatgaattatgcccgtcagatagggcaggaggtacacctctccactcaactgaacatctccaatgcagaggctttaaaattctacgcacaatttgcagatgtggtagtattggcccgtgagttgaatctggagcaggtagccgaaatctatcgccagattcaggaagaacatatttgtggtccgaacggtgaacagattcgcattgaaatgttctgtcacggtgcgctttgtatggctgtatcgggtaaatgttacctctctttacatgagatgaaccattctgccaaccgtggcgcttgtatgcaggtatgccgccgttcctatactgtccgtgacaaagagacggatgtggaactggatattgataacgaatatatcatgtcaccgaaagatttgaagaccatccactttatgaataagatgttggatgccggtgtgcgtgtattcaaaattgaaggccgtgcccgtggacctgaatatgtacgtacagtggtagaatgttacaaagaggctatcaaggcttatctggaaggaacatttaccgatgaaaagattgcagcttgggacgaacgtctgaaaactgtattcaaccgcggcttttgggatggctattacttgggacaacgtttaggcgaatggaccagaaactatggctcggcagctacggaacgtaagatatatgtaggtaagggtatcaaatacttctctaacatcggagtttctgaattcctggtagaggctgcggaagtcagtgtaggcgataaacttctcattaccggaccgaccacaggtgctctattcatgactttggaagaagctcgtgttgacttggaatctgtacagactgtgaagaaaggtcagcgcttctccatgaaatcagataagatacgccccagtgacaagctgtataaactggtatcaaccgaagaactgaagaagttcaaaggactcgatattgagcaaaaaagaggctaactgctatttctcaacttttaattctcaatttaaatgaactatatctatgaattggaaatgaaggtgcgtgattacgagtgcgaccttcaagggattgttaataatgcgaactatcagcattatctggaacatacccgccatgagtttctgacgtcggtaggcatcagttttgctgcactccacgaacagggggtcgatccggtagtggcacgcattaatatggcattcaaaacgccgttgaaaagcggagacgagtttgtctctaaactctatatgaagaaggaaggtatcaaatatgtattctatcaggatattttccgtaagagtgataataaagtagtagtgaaatccactgttgaaacggtatgtgtggtaaacggacgtttgagtgacagcgaattattcgatagcgtctttgccccttacctgaaatgagcagttccgaggaagaacagatttatagtatcgccctgacaatggtgcccggtatcgggcacataggggcgaaacatctgatagacgggatgaataatgctgttgatgtcttccgtctgcgtaaagaaataccggaacgtattcctgaagtgagtcaacgggtggtagatgcgttggattgtccgcaagctgtgatccgtgccgaacaggaatatgaatttatccgaaagaaccggatttcctgcctgactttccatgatgaggcttatccttcccgtttgcgggaatgtgaagatgctcctatcgtccttttctttaaaggaaataccgatttgaattccctgcatataataaatatggtaggcacccgtaatgccactgattatggtacccggatttgcgcctctttcttacgcgatctgaagacattttgtcctgatgtgttggtagtcagcgggcttgcttatgggatcgatatccatgcacatcgtgaagcgctggtcaatgacctgcctacggtaggtgttcttgctcacggtctggatcgcatttacccttatgtccatcgaaaaacagccattgatatgctcgaaaagggaggactattgactgaatttctgtccggtacgaatcccgacaagcataattttgtcagtcgtaaccgcattgtcgcaggtatgtgtgatgctacggttgtcattgaatcggcagaaaaaggaggctcattaatcactgctgaacttgctgaaagctatcatcgcgattgttttgcttttcccggccggataaatgatgaatattcaaaggggtgtaatcggttgattagagataataaggcttccttactattatcggctgaagatcttgtacaggcaatgggatggaatataccgattacttcttccgaaaaagtaaatgtgcaacgtagtctttttctcgacttgtccgaagaagaacagaagattgtctctatcctggagaaacaggggaatttacagattaattctctggtagtagaagcagatattcccgtacataagataaatgctattctttttgaactggaaatgaaaggagtagttcgtgtattggcaggaggaatgtatcagttattgaattaactcgtatagactaacctcatatatggatataaaaaaaggagcaacgccttgctccaacctttgttaaccttaaatctaatactatgaaaaaaatcacatgacaaatgtatgtctttgcaaactaacctccaaataattctgttgtatttgtttctcttttaaattctttcactgattttcactgttatcgcacacggcacacttttaatggctaaaatagaatgcttttaggataagtaatagggaggaaagtaagtcttcctgaatactattgcagcttctaggaaaattagaaaataaggtctgaatataagtattttcttggtttaaaaggaacgctccgttggtttaaaaccaaggcatcgttcctttaaaaccaacgaggtgttccttttaaagggaaatgtgaacctgtatattgctgtgtagtgtatagaattattttttcataatagccatggttgattttttgctgcccaattcgatgactgtcaatgaatgcttttatgagaatgctataacactgatgcttgtcgctacggggcataagtcctatataataaaggaaagcgttatgacgactcttttggaaaaaatcaacagaaattcccataatatagaaggaggtagtgtgattcattcgaaaaacttggcgttgaaagatggcataacatatatgccgatataggatgtttttgtttgtagtagtacaaaaaaaggcgaggcaaatgccccaccctgaatgttttcacaacggaataatccttattgtgatttgctttaaattagtatggcaaagatagtaaattattttgttataatgtctaatttgtgggaaaatattaatatatttgatgaattataataaggttgggtaaatatgaaaagaatattgggattagacttgggaaccaacagtattggttgggcactgatcgacagcgaagagcagagaattttaggaatgggtagtcggattattccgatggatcagggtgtgttggatactttcagtggggggaatccgatagagactcaaacagctgcgcgaacagcctatcgtggcatacgtcgattgcgcgaaagagcattattacgtcgcgagcgtctgatccgtgttttgaatatgatgaagtttttacctgaacattatgcttctcaaatagactttgaaaaacgattaggacaattttttgatgaaaaggagcccaagctagcttggaaacaaaatgatgaagggagatccgagtttatcttccaacagtctttcaatgaaatgatagaagagtttaagaacagtggggtggttggagaagataaaaaaatcccatacgattggactatctattatttgcgtaagaaagctctttcccaagagatagagaaggaagaactagcttggattttattaaatttcaatcagaaacgaggatactatcaattaagaggggaagaagaggaagagaatcctaacaaattagtagaatattattcattgaagatagtggatgtcatagccgatgagaagccgaatagtaaaggtgatacatggtattctttacatttagaaaacggttggatttatcgtcgttccagtaagattccattatttgaatggaaagataaaacacgtgactttattgttacaacagatttgaacgatgacggaacggttaaaaaagataaggaaggaacagaaaaacggtcttttcgtgcgccaagcgaaaatgattgggcattgttgaaaaagaagacggagagtgatatcgaaaagtctcataaaacagttggtacgtatgtctatgagacattactgcaaaatcctatgcaaaaagttcgtggaaagcttgtaaggacgatcgaacgtaagttttacaaggatgagctgaaacaaattcttgagaaacaaaaagagtttcatcccgaattgagagatgaagatttatacaacgactgtgtaagagagttatatcggagcaatgagacacaccaatttattttaagtaaaagagattttgttcatttattcttaaacgatattttattttatcagagaccattacggagtcagaagtctgcgataggtgattgcatacttgaatttaaaacatacaaagataaagatggaaatgaaattaaagagtatctgaaggtcatttcaaaatccaatcctctctatcaggaattccgtatatggcaatggctgtacaatttgaagatatatcggaaggaagatgacgaagatgttacttcgcaatttattgcaaacattgaagataaagaacagctatttgatttcttgaataataggaaaaatatagagcagaaacctttacttgaatatttgataaaagcaaaaggtctgaaaaaacaagtaaagacggaggcatatcgatggaattatgttgaagataagatatatccttgcggtgaaacaaagacgatgatttctacacgtttggctaaagtagaaaatattccagatgatttccttacaaaagaaatagaacaaaaactttggcatatcatttattctgttacggataaaaatgagtttgagaaagcattgagaacttttgcagaaaagtatgatttagatattactccttttgtggataatttcaaaaaaattcctccctttaaaaatgaatatgggtcgttctctgaaaaagcaataaagaaactgttacctttgatgcgtttgggaaaatattgggaatggaatgatattgataataatacccaaaatagaatatcccaaataatcacaggtgagtatgatgaagaaattaaggatatagttcgtgaaaagtccattgctctaactcatgaaaacgattttcaaggtttgcagttatggttggctcaatatattatttatgggcgacattcagaagctgatattgcaggaaaatggcattcggtcgctgatttagaaaagtatttgaatgagtttaaacagcattccttacgtaatccgattgtagaacaaataatcacggaaactttacgggtagtgaaaggtatttggcaaaaatacggacagggagcggaaaacttttttagtgaaatccatgttgagcttggacgtgatatgaagaacactgctgacgaaaggaaaaaaatagccaatgttgtaacagaaaatgagaataccaatttgcgaatcaaagcattattaatggaattaaagaataattctgatggcaaattggaggttgaaaatgttcgaccctattcgcccatgcaacaggatattctgaaaatatatgaagagtatgcaattagcactgggcttgataacgaaaaggatgaaaaggtaaaggaagatataaagaaaataagcagggttgcacaacctacaacgatagaactacaacgctataaactatggctggagcaaaaatattgttctccatatacgggcaaagtcatcccgttagggaagctctttaccgaagaatatcagattgagcatatcattccaaaatctcgttactatgatgatagtttcagtaacaaagtaatttgtgaggccgctgtaaataaattaaaggataagtgtttaggattggagttcataaaaaacttccatgggcagattgtggaaacaggctttggacaaaaagtaactatctttgatgaagaatcgtatctgaattttgtaaatctgcattatgcccataatcgttccaagagaacaaagcttctattggaagaaatacctgaaaagatgatagaacgtcaaatgaatgatacgcgttatatcagcaaatttgttctccctcttctgtcaagtcttgtacgtgcagaaaaagatgacgatggaataaattcaaaaaatatacttcctggaaatggcaagattacaactatattgaaacaagattgggggttgaatgatgtttggaatgacttgattcttcctcgttttgtgcgaatgaatgagttgacaaggactaccgcattcaccagttggaatgaacaatatcaaaaatatctgcctactgttccattagatttatcaaaagggtttcaaaagaagcgtattgaccatcgacaccatgcaatggatgctttggtaatagcctgtgctactcgtgaccatatcaatctgttaaacaataaacatgcaaatacggatacagttcgatatgatttacaacggaaattacgactgtttgagcgagtgacatatattgatccgcaaacaaagaaaaatgtaacaaaagatgttccgaaagagtttaaaaagccatgggataatttcactgttgatgctcgtaatgaattggaaagaattattgttagctttaaacaaaacctgcgtataattaataaagcgaccaatatatatacgaaatatgaaaacggtaaaaagataaaggtaaaccagaaaggtcttaattgggctattcgtaaacctctgcacaaagaaactgtatttgcaaaagtatcacttcgtaaaagaaaaatcgtacgtttgagtgaggctctaaaagattgggaaaagatagttgataaaaagctaaaacaagaaataaaacggcttacctgtcaatatggtaaatttgatgtggatacaatcttgcgatattttaaagatcggaagtaccagtttggagaagtagatgtatcaaaagtagaagtatattattttgatgaagagaatgcggcagtgcgaaaaaatgtggatacatcttttacggagaagtttattcaagaatctgtaacagacactggcatacaaaaaatcttgcttaatcatttagcgacaaaagggaacaaggttgaaattgcgttctctcctgaaggtattgaggaaatgaacaagaatatcgttcagcttaatgaagggaagttgcatcttccaatatttaaagttcgtgtttatgaaacaattggtaataaattctctgttggagtaaaaggaaacaagaaagacaaatatgtggaagcggcaaagggaaccaatctgttctttgctatatatgtagatgaaaatggtattcgctcttatgaaactatacctttaaatatcgtaatagaacgtttaaaacaaggattaagtgtggttccggaaaaaaacaggaaggaacatagtctattattttatttatctcctaatgatttggtatatgtacctatagaagatgaacgagaaaacattcatgctgttaatttggaccaacttaataatgagcaacggaagagaatttataaaatggtaagttgtacaggttcagaatgtcattttgttccttattatgtagcaagtcctataataaacaaagttgaatattcgccattgaataagattggaaggagtctgactggagagatgattaaagacgtttgtataaaattgaaagttgatcgattaggaaatattaaaggtatatccggtttatgaataaaaagaataacaccccaatcccttctgatttctttctttacaaagacagtaatggagaagtgaaagtcgaaatctatatctttaatgaaacggtttggctgacacaggataagattgcgcaattgtttggagtggatagaagcgtggtgacaaaacatttgaagaatatctttcaaacggctgaattgcaggaggattcagttagtgcaaaaattgcactaactgccgctgatggtaagaagtatcagacgaagctatacaatcttgatgctatcttatccgtaggctaccgtgtcaacagcattcaggccacacattttagaatctgggcgaacagcgtactgaaagaatatttgattaagggttttgccatgaacgacgagcgattgaaaaatccgcaaacactattcggcaaagattatttcgaggagcaattggcccgcattcgtgacattcgtagcagtgagcgtcgtttttatcagaagataactgatatttattcgcaatgtagtgccgattatgaagctggcagcgaggtgacaaagaagttttttgcaactgttcagaataagttgcattgggcaatttccggacagacggcagcggagataattgttgctcgtgtggatgcagagaaacctaatatgggattgactacttggaaaaatgcgcctaacgggatgatacgtaaaccggatgtatccatcgcaaagaactatctcaatgaaactgaaatggatgatttgaatcgtattgtttcgatgtatttggattatgcagaacgtcaagcgaaaaaagggcaggtgatgtatatgaaagattgggtgaagaagctagatgcattcttgcaatttaacgaagaagcggtattgcaacatagtggactggtgagccatgaggtcgccaaagcattggcggaacaagaatatgacaagtttcatgctaggcaacttcggaattacgaatcggactttgataaacttttgaaaggaatgaattatgattaagaaaacactttatttcggaaatccggtttatctatcgttgcgcaatgcgcagttagttattaaactgcctgatgtggaaaaagcaacggccttaccggaagcattgaaaaagcaggcggaagtaacaaaacctatggaagacattggcattgtagtgttggataacaagcaaatcaccatcacttccggtgtgttggaggctttgcttgaaaacacttgctccataatcacttgcgatagtaagagtatgccagttggactgatgcttcctctttatggaaatacaacgcagaatgagcgttttcgtgaacaattggacgcttcgttgccattgaagaagcaactttggcaacaaaccattcaggcgaagattaacaaccaagcatctgtgctcaaagattgtatgaatgaagaagtaaagtgtatgcgcgtgtgggcagctgatgtacgtagtggcgaccctgacaatttggaagcacgtgctgctgcatattattggaaatctttatttgcagatgttgacggttttacgcgagatcgtgaggggatttctccaaataacctattaaactacggatatgcaattcttcgtgcagtggtagcacgtgggttggtaataagtgggttgcttcctactttgggtatccatcatcataatcgatacaatgcttattgcttggcggatgatattatggaaccttatcgtccttatgtggatgaattagtatttagcttaatacaggagtatggaaagggtgtggagctaacgaaagaggtgaaaacacgattgcttattattccgacattggaagtgataattggaggtaaacgcagtccgttgatgattgctgtggggcaaactactgcctcactttataaatgtttcaatggagagcttcgtcgagttgcctatcccgaacggtaatggatcgtcttagtgaatatcgtataatgtgggtgctcgttctttttgatttgccaactgaaacgaagaaggaaaagaaggcttatgcggatttcagaaagaatctgcaaaaagatggttttacgatgtttcagttttccatttatgtgcgtcactgtgctagtagcgagaatgcaacagtacatataaaaagagttaaatctttccttccggagcttgggcatgtcggagtcatgtgtattacggataaacaatttggggatatagaacttttctatggaaagaaggcacagagtgtcaatacaccagggcagcaattggaattgttttagaacacaaaatctcgcattaatgcgagattttgtgttggaaacagtctccttttttcttttctaactttctttataacccattgaattacattctgttatgcggaatcggttgtttccaatggctcaaagatactaatttgaaagcaaatcacaaccgcaacggcacgttacgcgtagagccaatagttgtttccaatggctcaaagatactaatttgaaagcaaatcacaaccgaatccggtgatttgccctaacagttcctgttgtttccaatggctcaaagatactaatttgaaagcaaatcacaactccctgtctccataacctcgcgttgaactggttgtttccaatggctcaaagatactaatttgaaagcaaatcacaacgctagtcccggtcgttatgcctaattttttgttgtttccaatggctcaaagatactaatttgaaagcaaatcacaacatgaaggcgctagacttcttggatatgccgttgtttccaatggctcaaagatactaatttgaaagcaaatcacaacgtctctttccatgcttctgaaaatttaaatgttgtttccaatggctcaaagatactaatttgaaagcaaatcacaacccatgttgagggcttgacggtctctttcctgttgtttccaatggctcaaagatactaatttgaaagcaaatcacaacatctttgcatcatttacacttggtctgaaagttgtttccaatggctcaaagatactaatttgaaagcaaatcacaacgtatttaggtctgtactttcttatcaaatagttgtttccaatggctcaaagatactaatttgaaagcaaatcacaacctcatgagccgcacaccgtagtcgataaagttgtttccaatggctcaaagatactaatttgaaagcaaatcacaaccaacgattatcgtgccgttatccgaagagggttgtttccaatggctcaaagatactaatttgaaagcaaatcacaacgagaatgtatttagtcggaaagatcaccgtgttgtttccaatggctcaaagatactaatttgaaagcaaatcacaactcttcgcgttgaggaagtaacaaccctcgagttgtttccaatggctcaaagatactaatttgaaagcaaatcacaacaacgtgatcgcggttaactgattagtcgcggttgtttccaatggctcaaagatactaatttgaaagcaaatcacaacttgtttcatctgttggtatgagaaaagaaagttgtttccaatggctcaaagatactaatttgaaagcaaatcacaacctaccccttcatttataacaaaatattcatgttgtttccaatggctcaaagatactaatttaaaagtaaatcataatccattcatgtatctctttttaatataaatatgttatttcttgtgattcaaagattgccatttttgtataagtatttttaagtttccttttgtgagcattagacttaattatagtgttaaatattaggaatgctcaatctgtttcaattgcttagtaattaggctaataaaggtgggtatttctttatattaacgatgaaatcccaaatgacttgacaaacgctttttgatgttgtatatttgtataacgaaagaaacaatgaaacgacaaattaaaactttaaaaacgaaatgagacgaatcttatcttttgctgtattagctgcattgtacttccccggatgtacgaccagtaaaaatgcagtgcgttgtctaagccgatggattaaagactgtaacccgttgaccaaagaacttgtaccgaccggttatatgccgtataatcatcgttatctgacgatgaaacagtataagattataacaaaacatctaggagatccttatgaggattagggtatagacgacccgataaaaagcttgaggctgcaaccttttataggatttgcagccttttttgttgcataaattcaatgtatccccttctgaaagctacattcgggtttttaataaacttggataccgtttctaataaactccttgagaatttattagaaactcaaaagtcgtttatacagaaaagataaacttttttcggtgtactgaaatgagaaatatacgaaatccttgtgtgtttggttaataatcactacattattaaagacagtctcatttcatctttatttgtgtaaccttgaatgggtagatgtttcttcttgtaattctttattttaattgaaacttatcatacaatcatatatgattgtgagtatatgaatgtgaatatgttactttggagaataaattatgtctggcaaatcaagaatcttaaatgagagagatcagtcataaaatatttagcaaagtaataacaataaaaaaatgatgaaatggatactcttaaattgcattcacactttgaaaatttgctgtatgtgggaagaagcgtgctcactaatacaagtagccgcattcaaagattatttttttaatgactccactaatgtaacatcttatattaattattgcaatagtacttttgaatatgataaacttcgtgatagatggattatgcctgatggttatcttaccctttttataccgaatgatgactttgaaaagcgatttgcattcgtgcaaactttagtatgaataaacttcgtgaagcctttggattcttaaggggatatatctgaacattagacaaattgatttgttatttattatagttggaagaatatagacgttgtttgctttcattatgatgtaaaacatctctattcatccattttttaaaggttgtttttgactatatgtcaaaacaaacctttatatttgtatatgtgaagttaaccaaagaaaaaaatcacttattattggctatgatgaaaaaggaaatcaaattcagtcttgtttatcgggatatgtggcaatcttccggtaagtatcaacctcgggttgaccagcttgtacgtatagctccattgattgttgagatgggctgttttacaagagttgaaacgaatggaggtgcttttgagcaagtgaatctattgtacggcgaaaatcctaataaagccgtccgtgcttttaccgcaccttttagagaagcgggcattcaaacgcatatgctcgatcgtggtttgaatgcattgcgtatgtatccggttccggcagatgtgcgtaaattgatgtataaagtcaagcatgcacaaggggtggatatcacccgtatcttctgtggactgaatgagacgagaaacataattccctccattaaatatgctttggaagcgggtatgattccgcaggcgactctttgcatcacatattctccggtgcataccgttgagtattatgcccgaattgccgatcaactgattgaggccggtgcacctgaaatatgtttgaaagacatggcaggtatcggtcgcccgggtatgttggggcaactggtcaggactatcaaggaaaaacatccggatgtattgatacaatatcatggtcatagcggaccgggattgtctatggcatctatcctcgaggtttgcgagaatggtgcggatattattgatgtggctatggagcccatgtcttggggtaaagtgcatccggacgtgatctcggtacaggcaatgttgaaagatttaggttttcaggttcctgatattaatatgaaagcatatatgaaggctcgtgcgatgacgcaggaattcatagatgactttttgggttacttcatggatcctaccaacaaatatatgtcttcgcttttattgaaatgtggtttgcctggtggcatgatgggttctatgatggcagatttgaaaggggtacattccggtatcaatatgatattacggagtaagaacgaacctgaacttagtcttgacgatctgctggtaatgcttttcgacgaagtggaatatgtgtggcctaagttgggttatcctcctttggtaactcctttcagtcagtatgtgaagaatgttgcattgatgaatcttatgcaattggtaaaaggggaagagcgctggacaatgatagacaaccatacctgggatatgattctgggtaagagtggacggctgccgggtacgcttgctccagagattatagaattagcgaagtctaaaggatatgagtttgtcgatactgatccgcagttgaattatccggatgctttggatgattatcgcaaggaaatggatgagaatggctgggagtatggagaggatgacgaagaactttttgaactggctatgcacgatcgtcagtatcgcgattataagtccggtgttgccaagaaacgttttgaggatgaattacaacatgctaaggatgcatccatggcaaagagtggttattccgaggaagatatcaagaagttgaaacgtgccaaggcagatccggttattgctcccgacaacgggcaggtactttgggaagtttccgtagagggaccatccattgcgccattcatcggacgtaaatatcagcatgacgaagtcttttgctacctttctactccatggggagaatatgaaaagattctgaccggatttaccggacgtgtggtggaaatatgtgcacaacaaggcgctaccgtacgtaagggagatgttatcggttatattctgcggagcgatatctttgcgtgagatttctatgagcgttagactataggttactttataaaaaggtcaggctgcaatctgtgatgaggttgcagccttctttgtttgtagacattcaatgtaaaagttacaggaaggcttttagctgttagaatttcaatggctatccattgataagttagattgttgaacatggaaaatacgcattttatgaaaaaaataattctttgatatatcctgttgataactagcaatattctcttccgataataattgattccaaacgatgaaaggagacataaaggagacaaaaggggaccggacgttttacggttgatatacctttgcagagtcattcaaacaaagagaatgacaaacagataacctttatttttttaaccaattaaactttaacaattatgggtttagagtacgtagtaacaaaaagagtgttcggttttgacaaggacaaaaacgaaaagtatgtggcaaaatcggttcgttccggtaaggtgaattttgcaaagatgtgtcggaaagtaagtgagctttgtggtgtccatcgtaaggtggtagatttggtcgtcagtggtctggtggataagatggcggaggatattgatgatggaaagagcgtgcagatgggtgagtttggtatcttcactcctactatccgtgctaagagtacggatgacgaaaaggaggtctcatccaagtcgatcgttcagagaaagatcttattctatccgggaaaaatcttcaaaaatacgctggaagatatgagtattacccgccgtgcggaaattgaaacggattatacagacggaagtagtaatggggggaataatgggggtaaccctgattcgggcgatgatggcaacggggaagcaccggacccggctgcataattggactggactttgtattaaaacaagcctttaactagtgaatgcacagagaatcgattcttaatcggtaatctgtgcattttttttatatctttacttctactatttcttatgatgcaaacgataatctttaggagccatttccattcgttttataaattccttgtagaaatgagatctattcataaatccacttcgatacataatctcttcaatagtaagtgaagtggtaacaagaagtttggcagcaaaattgattcgttgttctttaatgaaattctttggtggagacagattcagttgttcgaatttacgatataaattgcggatgctgatttgtaagctgctggcaagttcctggggggtaaattcattattactgatgttttctgcgataattcgaatcgctttttccataagctctttatcttcgcggtcgaccaactgtcccgatataaattcaaaggcactggctgatgtcgagtaataagtttccagattcttgcttttttccagaagtttggttacgacagtttttaggtagttgacatcaaaaggtttggttatgtatatatccgcacccgaattgacacctgctaccttatcattattatcatttttggccgaaagaataatgatgggaatatgcattaaatgctgattctgctttatttgtctggtcaatgtaattccgtcgattccaggcatcataatatcagtaatgacaaggacggggctatatttctttaatactttcatcccctcttctgcattctcggcagttaaaacggtatattcttcgcggaatatgtcttttatcatccataaaatatctttgttgtcatcaatgacaaggatggaaggtagagaagataagatagcaagatcgttgtcttctgtgaaactgtttgccgagtttatggactctacggaatgtttcttctcctcttccggagattctttcgcatgactgtctacttccagataaggcagtgtcacagtgaagcaagtatagtcattttcaatgctttctacctcaatagttcctttgagtagctcggccatgctataagcaatggccaatcccaatccgttgcgggcagataactcattcactgaattctctgttatgttatctaatatagtatatctattgaaaatattggaaatgtctttttccggtattccctttccggtattgtagaccgaaaagattagcttactttctgctatatacattctgatacgtatagtgccgcggggcggagtatatttgaaggcattcgagagcaggttgttggcgattttaacgaagcaactttcgtcgctattccatatcagggtattgtcgaattcggcctcaaactcaatatggttcctttcggaaatatcagtgaaagattccatcatttctttgacaattattccaagaggcaactgtttaatcacacatatcttgttaccggtttccatccgtcggaagtctataatttcttgtataagcccattgagccgttcggtattcgatttgattaaattagcatatttcttaatggatgaagatgcctccttactatcgattattctgatgcaaggaccgtatataagcgataggggagtacagaattcatgcgtgatattagtaaagaatcgcaatttactttcatacatctcttctttatatttttcggttaactgacgagctacggcaaccttgcgctgtttatatttcctctttaaaaagagatagactatccaaatacctcctccgatgagcattacgtatatgatttgggcataaatggagctataccatggaggaagaatttgtatggctattgattgagttgggatgtcggtgcctaaaccgtcattgtacttgacatgaagtatatattctcccggactgatattggtgaattgtgcttcatttgattgtgcgtgcatccagacattactgaaattttcgagtttatacgaataggtcccattttcaccgttaatgaaatccatagccacaaattgaatagtgaaaaagttctggcggtgcttcaacactaactgattacctttcgattcttgtttctcaaagtcacttatattgtattgcttattgaatatcctcaagccggtaaagtatatttcgggctgatattttttctgaaaatcatcccctttattaatcca

SEQ ID NO: 1121 - DNA, 24533 bp, synthetic construct
  source 1..24533: mol_type = other DNA
  misc_feature 1..24533: note = Synthetic
gaaacgtttaaccaggagtattcgttggctcacaccagctacacgccatgggatacgccgtgggattcgcagggtaatctgaaagacggaagccagggtcttcccgctactgcagaagaagccgtatcagccaatccggatgattactggtatagcgacggcggtacaaacttcgcctacgaccgtcatctgaactggggcaaaagccgctctaacggactggacgtgaatttaggtttcacctataagattttcgatttccttacttttgagtcaaacaacaagatcgggttctccaacaactacagcagtacttatactgacccgaaaagccgtggcggtgtaggaaccaacggaagctattacgatgcaaacagcaattcgcgctctgtttacaccaaccagctgttgcgcttcatgaaaacgttcggcgacaagcacgaggtgagcgcatacttgttctacgaatacgaagaataccgttattgggatttgacagctactgcctacaatatagcgcaaggtgctgaaatcatcagtgctggtgcagatgacccagccgcaagcggaaccaagtatgaaaacaagaatgcggcatacctgtttaacggaaactatacttacgacggcaaatacatgcttcaggccatggtgcgccgcgacggttccagccgtttcggtagcaacaagcgttggggtacattctggtcggtaggcggcggatggaacatccacaaagaagccttcatggaaaacgtgccctggatcaacgaactgcgtgcccgtgtttcttacggtatcaacggaaaccagccgggcggttcttacgactatctgaccaaggccagcattacgacccaatacgacaatcagatagccttgatgacaaactacttgggtaaccccgatctggaatgggaagaaaccggcaacctggacgtcggtctggatatacgtctgttcgaccgcctgaacattacgttggacggctatgtgaaaaagaccaagaacttgctttacctgcgccacctctcggctgtgagcggttttaaccgtcagacatccaacaacggaaagctggaaaacaaaggttttgaaatcacggtaactccggaaatcatcaagaccaaagacctctactgggacgttaccttcaacctgggttacaaccacaatgaaatcacctacatgcccgacggtgacgacttgagtttccaggctacggcagtgggctatccttacttgaactactacatgcgcgaatgggcgggtgtggacacgatgacaggcaagggcctgtggttcaaagtggacaagactaccggtgaaaagactgtgaccagcaactacaacgaagctacgcccgtgctgcttgacgcagtgcctattcctgacatcaacggtgctgttgcaaccagcctgacatggaagggcctctcgctgaacgccaactttactttcgcggccggtgccaagatttacaacagcatgcgtgccggagctttggaccgtgactgctcccgtccgagccaggtgccgatgaagctgcaagacggctggagccgctgggaaaaaccgggcgacatagccactcatccgcagctgatagccaacagcagtgctgacaattcaaatacgtctacccgttatctggagaatggtgactactttaagctgaaatctctcagcttgtcatacagcttgcccagcaaatggttgaaacctcttaaaatcaactcggcagcaatcaacttgaccggtgaaaaccttttcaccatcaccaagtattccggtcaggatcccgaagtcttgttctccagttcatacaatggaagtgccagcagtttcggctatcctaccgtacgccgttttacaattggcgtgaatgttaatttctaaacttgtacctttataataaacaacgatatgaacatcaaatatgcattaagttccttagggctggcaactgccttggcaggatgcagcgtggatacgaaattgtacgatggtatagcgcttgaaagtatagacgaacgtaacctcgtggaattgtcggaaggcagctaccgattgctgaagaatgacaatgggttgatagacaacggattccaattttttgccttgagaggtgatgatgtttgctggggaggaacatctacaggcggtacatttgacttttacgactacagccgcaacgttcaaagcacgctgaccgaatatggatgggagctgggataccgtatgataggcaactgcaaccagattattgatatggttgaagcgatgggcgacgcacgttcggaagacgaaaccgttatcatgggtgagaactattacctgcgcggtctgggttacttctatctggtgaactggtttgcgcagccttattccaacaatcccacacagaatcccggtcttcctttgaagctgacaagcgatgcggaggattatcctgacaaacgttctactgtagaggaaatctaccagcaggtggtgaaagacctgaaagctgccagcacctacatgacgttatctgatggcgctttgcctaaaaaccataatcacgccaccaaggaagctgcccaggcgcttctggcgcgcgtatatctctacatgggggatttggataatgcctatttaatggccgacagtgtcattcagtccggacgattcgaactgttgcagggagaagaatactacaactatccgcagcacgtgcccgaagacaattcggaaacgatttttgccgtacgccgtacacgtctgaaagacgacggcagctatagccggcaaggcggtctgttcttccgtatcaacaaccagggatgggaagaagtgtatgcctccaatccctacctggaactgctggaactgtatcgcgatgacgagggattcccaaaagacctgcgcagcaagttcatcaccaagcgttacgttgaagacggcacgaacaccgacatatacggtgtacatggcaatgaaaacggtacgtataacgactggacatttgtgtacagcagacgtgcatcagccagcagctccaactttgtgataaggcaaattagtgtaaccaagcaggatgacggcacatggaagatgggtgatgaggatgccaaatctttccagaacgctattatccaggaggaagactataacttgggctcacgctattatgtaaggggtacggacggcaccaagtatatcgggcgcatcgagccgagagtctacaatgccaacaccttgcgccagaaatcaaccgactatctggtgtatgccatcaacaagttctcttaccaggagcaatattatcatttgtggtcgccggttgtttcccgtctggccgaaatgtacctgatccgtgccgaatattatgcaagcaagaacatggtgcaggaagcgttggatgatgtgaacaggttgcgcagccgggcaggcatccctgaatggacgacaaccaacatgcagacggcagaagccggacaacccaaggatatcatgaaaatcgtggaagaagaacgcatgctggaactggcatgggaaggacatcgctcgctggacattttccgcaagaaaggcacgctggaccgcaagtatccgggcggacacacgcttacggtaggcgaccagttctgggaagttccctacaattcacctgcggtatgcgaatttatcccgcaaggacagttcgatcagtatccttatgatctggaacagaatccttaacctgagcaataattcatacaattctatttaatccgataaaaaaagagacaaatgaaaaaattatcatacttgatgctattctttctgtcggccttcctcttaggaggatgtgccgatacggagcaaccctatgtgggctacatcacgataaaacgtgccgtggtagaagccgcagccaattcaacggccaccattactgccgatacggatattgattctcccatcgaactgaagtctatcgactttggcgaaggggtggaagaatggtgtacggtagctttcaatggcagagacattacagtgaccgctacacaggccaataccggcgataattacagaaccgccacagtgaatgtgaagtgcggttattggcagacttcattcaccgttctgcagaaatacgaaggacaagaatacctgcaatatgactggaccggatggacagccacaggctctgacgtacaggaaaacgatggaggaggctatagctcgctgtttacggaagaccgcaccgagttctggcacagctattatggcgaacctacaccctgtccgcactggctgctcattgacatgcagaaggaattggaatgcagccggtttgccatcgggcgcagagaagctggaggaaataactatccttctgtaagacacatgaatatctatgtcagcacagacggagaaaactttgagcaggtaggcgaatttacctttgaactgccttggacagcaccggacggaactgttgttgaaggcaacagtccgctggttcctgccgaagaagtgataacgctggatgcccccgtaacggcgcgctatgtcagactggaaattacagcaaccaacaacgatactggcgtttgccaggttgcttattgcaaggtttacgaaaaactgtaaaagttcgctataatcaaagaaggaagggccgatgcatgatcggtccttttttcttatagacagacagcagccagccttcgcgtatcaggcaattcgataatagaggctaaaaaagtaggtactttcgtaaaaaagtagcatctttgcagtatgaattggattgaacacgtaaccgtactggaattattgataaaaggcttcatcgtgggggtggttgtttctgctcctttgggacctgtgggcgtgctttgtatccagcggactctgaacaaggggcgctggttcggtttcgtgaccgggctcggagctgcgctgagtgatatctgctatgctttgctgacggggtatggcatgagcttcatggatgagcttatcgtgaagcaccagattgttttgcagattgtggggagcatcatgcttttcgctttcggtatctatactttccgcagcaatccggtaaaggcattgcgtccttcttcgggcaagcgtgggacctatctccacaattttgttacggcttttttcgtgacgttctccaatccgctgatcatctttctgtttatcggactctttgcccgtttctcgtttgtgatgccgggaagtcctatcggcttccagctcgttggttatctggcgattattatcggtgcggtaagctggtggttcagcatcacttattttgtgaacaaggttcgtgcgcatttcaatgtgcggggcatatgggtgttaaaccgcattatcggcattgtggtggtgattgctgccattgtggggattgtgcttgcgataaacggaacatctttttcataaaacaatagtttatgtatatttctcaggaactgaaacagaagaacattgcggaatatctgttgtatatgtggcaggtggaggatctgataagggccaacggaggcgatatagacaggatccggaaaacggttgtggatccttatcccgtgtctgatgaacagaaacgcgcgctggaacagtggtacagcgatttgattcagatgatgcgcgatgaaggggtgatggataagggacatcttcagattaacaagaatgtcatcatctggctgacagacttgcatctgcgcctgttgcgctcgccgaaatttccgtattacagtgcggcttattacaaggctcttcctttcatcgttgaactgcgcgccaagggcgctgataaaggggagcccgaactggaaacatgttttgaagccatgtacggggtgcttctgctgaggcttcagaaaaaggaagtgagcgaggctacccagggggctatcaaagtgataagcgacctgctcgctatgctggccggatattatataaaggataaaaagggagaactggaacttgaataactgaataattggaagaacgaaatatggccaaccaacaaatagaaagaagaagaacatttgcgattatcgcacatccggatgccggtaaaacttcgctgacggaaaaactgctgctttttggcggacagatccaggtggcgggagcagtgaaatcgaacaaaatcagaaagacagctacgtcggactggatggatatcgaaaagcagcgtggtatctcggtaaccacttcggtgatggagtttgattatcgcgactataaggtgaatatccttgatacgccgggacatcaggactttgcggaagacacgtaccgcacgctgacagccgtagacagcgtaatcatcgtggtagacggagcgaaaggtgtggaaacgcagacgcgcaaactgatggaggtgtgccgtatgcgcaacacgccggtcattatatttgtgaacaagatggaccgtgaggcgaaagatccgttcgacttgctggacgaacttgagaacgaactggttatcaatgtgcgtccgctgacatggccgattgagagcggacctcgtttcagaggggtctacaatatttatgagaagaagctgaacctcttccagccttccaagcaggtggtgacggaaaaggtggaagtggatatccatacggaagatcttgacaatcatatcggttctccgctggccgagaaactccgtaacgagcttgagctgatagaaggagtgtatccggagtttaatgtcggcgactatctgaagggtgagcttgctcccgtatttttcggttcggctctgaacaacttcggagtgcaggaattgctggactgttttgtggagattgctccaagtccgcgtcccgtacaggcggaagagcgcgtcgtgatgccggaagaacctaagtttacgggatttgtctttaaaataacggctaatattgacccgaaccaccgttcgtgcgtggctttctgcaaagtctgttcgggcaagttcacgcgcaatactccgtatcttcatgtgcgccacaacaagaccatgcgcttttcttctcctacgcagtttatggcacagcgcaagactacggttgacgaggcttgggcgggcgatatcatcggtcttccggacaacggggtgttcaagattggagatacgttgaccgaaggcgaaattctgcatttcaagggactgcccagcttctctcctgaaatgttcaagtacatcgagaatgcagatccgatgaagacaaaacagttgaacaaaggcattgaccagctgatggacgaaggtgtggcccagctttttgtgaatcagttcaacgggcgcaagattatcgggacggtgggccagttgcagtttgaggtcatccagtatcgtctggagaacgaatataacgccaaatgccgttgggagccggtcagcctgtacaaagcatgttggattgagagcgacgatccggccgaactggaagccttcaagaagcgcaagtttcagtatatggcaaaagaccgcgagggacgtgacgtgttcctggccgatagcaactatgtgcttcagatggctcagaacgacttcaagcacatcaggttccatttcacgagcgagttttaaacttagaatattatgggtatcttgaacgctattttaggaaatgcttcctcgctggaccccgaatctctgaaaagggaatacggcgagcttctttgtgaaggcgaattcattgaacaggctttcgtgatcattcgtgacaaatgggtgtttaccaataaacgtctgattattcaggacgtacagggggtgaccgggaagaaacgtgaataccattctattccttaccgttcgattgagcgtttttcgatagaaacgtcgggaacctttgacgatgattgtgagatgaagctgtgggtgagaggttgtgcagaaccttttgagcaggagttcagccggggtacagacataaaaaggatacagcgcgagctggcaaaatatgtgctgtgatgacagctttaaaatgaaacttcggcggtaacagctgcttgttttatgtgaagtggaggcgcagtcttgcttgagacaagttgctgcgcctctattgtattgtgtgcggtcagattctgtttgctttccgctttctgaaccatacgacgaaccacacagcggctattattgtacagatgattccgatcggataggctatctgcggtggaagcccgagtccttcgggggcaataacgatgtaggtgctgcacacgcttgtcatgaacagggcaggaatgagcgtaagccaataatttttcttggcttgcaccatccatacggtaatcgcccacagggtgaatacggccagcgtctggttgcaccacgcgaagtatctccagataatcttgaagccctccgcatcactgaaactgtacaccagcagtccgatggttaccagaaagatgggtatacaaataatcagtcgtttgcgtatgctccgttgctcgatgtggaaaaagtcggcgacaatcaggcgtgcggagcggagggctgtatctccgctggtaatcggtgcggccacaatgccgagaatagccagtatgcctccaaagccgcccagccattcgatcgagatgtcggtagcgacttttgcgcctgaataggcgattcctgtagctttgtcaacaatgccgttttcctggaagaaccaggtggcggccgcggcccagataagcgcaacgatgccttctgttaccatcgctccgtagaataccggacggcaatgtttttcgttagtgatgcaccgtgccatgagcggtgattgcgtggcatggaatccgctgatggctccgcaggcaatggaaatgaacatcatcgggaaaataggattcttttcgtattttgtgccgaacccgttccacatctcaggcaggtcggggcttttcacgtagagcatcaccagaatacctaccgccatgaacagaagggcggcagcaaagagcggataaatccgtccgataatctggtcgatgggaagcatggtagcaagcacataatacagaaaaatgacagccatccagaaatagacatcgaggtattccggagtcattcccgcaagaagttcagccggtccggaaacgaatactgcgcctaccagcaccatcagaatcatggtgaatatgcatgccactttctttgtgcgttgtcccagaaaacgtccgatttgttcgggaaggctttccccgtcgtgcctgagcgagagtgttccggagaggaaatcatgtacggctcctgcaaatattgttcctattacaatccatatataggaagccgtaccgaactgcgctcccatgatggcgccgaaaatcggtcccagtccggcgatgttgagaaactgaatcatgaagattttccatgtagggagcgggatatagtccactccgtcggctttggtgatggcgggagttttgcatttagagtcaggggagaagatgcggtcgatgaactttccgtaaatccaatatcctgccaaaagcaagatcaatgcgatgctgaatgtaatcatagttttatttttgacgttaaaacagcgcaaaaataataaatatgttacatgcttgttcttttttgtgtatgaattataattaaattctgagtttttatgggatagtgcaaaaaggtaatctgatattccatggttttgctcttttgatatgtcttgctgtctttgtgtaaaagagtcttggggtgttccttgttaaaactctgtttttgcgggggggtggaattgttgcagttttctttgtcgcaggtgtggaatagaataaagtaacaaacaaattaatggattgaattatgtttgtaagataaaaaaatcccccgttaaggtcgagggaaacctaatgttttcacaacggaataatccttattgtgatttgcttcaaattagtatggcaaatttaagaagaaaaataattttttccaatttttatggcgaatttttgtaactttgaaaagttgtctaaataattatccaaataatataccatgaaaaagatattaggccttgacgtggggaccaatagtattggttgggctgtgattaatgcgtctatagacgaagaggggaaagagcatctgaataaaattgaatgtgcaggctcgcgtataattccgatggacgcggctgtattgggtgattttgataaaggaaattcaaaatctcagacagctgaccgtacacaaagcagaggagtgcgccgtttatatgaacgggctcgcttgcggagggaaaggttgcatagagttttaaatgtattaggttttctgccttcgcattatgcttgctatatagaccgttatggaaagttcataaacagcgctgagcctaaattgccttggaggagagatgaaaaggaaaagcctgttttcatttttcaagattcgtttgatgaaatgttggctgatttccgtcgtagccaacctgatatgctgtctgatggccgtaggattccttatgattggacgatctattatttgcgtaagaaagctttgacgcagaaaatacggaaagaggagctggcttggattttacttaacttcaatcagaaaagaggctactaccaattgcgtgagaaaacggaaagcaagcagtcgtccaagacccgtcagtactttgatagccaggtggttgttgatattgttgacacaggtcagatttataaggaaatgaaagtgttggtggttgtattgaaggatggatcaaaagggaaaatattcaaaaaagagattcctgagtggattggtttgaagaaagatataatcgctacagtagatcttgataaagatggaaacgataaatatgatgagaatggcgatctttgttgccgtttcaaagttccgactgagcaagagtgggacgaagaatgggaactgataaaggcaaagactcagagtgaactgaatgcaacaggcaagacagtaggtgcctatatttatgatactttgctgcagatgcctagtcagaagatacgtggaaaactggtgcgtaccattgaaagggaatattataagagtgagttgcatcagattctggagaaacagaaagagtttcatgaggagtttcagaataaggatttgtttttagcctgtgtcaacgaactttatccgcaaaacgaggcccatcgcaatgagataagcggacgggatctggtttatctgtttattgaggatattttgttttaccagcgtccgctcaagagtaaaaaatcattgatatcagactgtccttatgaagaatatgttcatgctgatgaaaagactggtgaagagaaacatttcggtgtgaaatgtattgccaagtcgcatccattatatcaggaattccgtttgtggcagtttatttcaaatttacgtatatatcagagagaaaaggtcatagaaggtaaaaaatgttttgatgtagatgttacgtctgtatttttaaagactgaagatgactataccgatttgtttgactggctgaacaaacaaaagagcattaagcaggatgcttttcttaaatatgcagctttcggcttgaaaaagaatgaagcgaacaattatcggtggaactatgtggaggataaggtttatccatgcaatgaaacccatgcttttcttcttgaacggctgaataaggcaggcgtagcgtctgatttcctgaatagccgggaagaggagtttttatggcatattctgtattccatatcagacaaggaggaattggataaagctttgggtaaatttgcagcgaaatatggacttgatgtaaagtttgtggaagtatttcgtactgcccctccttttgaaaaagattacggtgcttattcagctaaggccatcaagaaactgctgcctttgatgaggatgggaaaatattgggacgaaaaatctattgatgagcatactcgtgaacgtatcggaaaacttgttttgggcgaatatgatggtgcaatacacatgcgtgtgagagaaaagtctatccatctgactgatgtttcttcgttcagagggcttccgctttggctggcatgttatgtggtttacaaccgtcattcagaatcccgtgatttgcagaaatggcaaacgccggcagatattgatggttacctgcgtaagttcaaacagcattcgttgcataatcccattgtggagcaagttattcttgaaacgttgcgcgttgtccgggatatatggaaacaagtcgggcatattgatgaaattcatgtagaactggggcgtgaaatgaaaaatcccaaagacaagcgcgccagaataactcgtcagatacaggaaaatgagaatacaaatcttcgtatcaaggcgatgcttgttgagtttatgaatccggagtttggaatagaaaatgtgcgcccttattctccaagccagcaggatttattgcggatatatgaggaaggagtgttaaatagcgtaaatgaactcccggatgaaatagctgacatcataaaaagatttacggatagtgatgtaaagaaacgtccttccagatctgaagtattgcgttataagctttggctggaacagaaataccgttcgccttatactggtgaaatgatacctttaggcaaattgtttactcctgcttatgaaatagaacacattatacctcaatcccgttattttgacgattcgttcagcaataaagtgatttgtgaggcggaagtcaataagctgaaagacaatttgctggggcatgaattcattgtcaagtttcatggagcaaaggtttcgttgtcaggaggaagtagcgtgaatgttttctctgtcagtgattacgagcagtttgtaaaagataattattcccgtaatcagacaaagttgaagaagcttatgatggatgatatacctgagcagttcattgcgcgacaactgaatgatagccgttatatcagtaagttggtcaaatcattgctgtctaatatagtgcgtgaagagaatgagcaggaagaaacctcaaagaacttgctcgtttgtacgggtggcgttactgaccggttgaagaaggattggggtatcaatgatgtgtggaataagattatacttcctcgcttccagcgcttgaatgaactgactgatacaactcgttttactgcgcttaatgcaagtggtcatgcgattccgtccatgccattagaattgcagaaagggtttaataagaaacgcatagaccaccgtcatcatgcgatggatgccattattatagcttgtgctggtcggaatattgtgagttatcttaataacgagtcggcgtgtaaaggtgctaagatttcccgttatgatttgcaacgtcttttgtgcgataagcagaaaacagatgagatggggaattatcgttggatgataaagaagccgtgggattcttttactcaggatgtctatgttgttttgcagaatataatcgttagttttaagcagaatctccgtgttatcaataagaccgttaattattgccagcattatgttgatggaaagaaaaaaatggtgaaacaagaaaaaggggatagctgggctataagaaaacctttgcataaggatactgtgtctggcgaggtaaatttgcgtgatataaagaccgtgactttgaaagatgcattgaagaatcttaacgttattgtggaaaaggatttaaagaagaaactgaaagaactgttagagatgcatctgtcagataaacagataaaacagtattttgaggtgcataaggaaacgtggagggatgttgacttgaaaaagataaaggtttattatttcacgaaagaaacaaaagaccgcttttttgctgttcgtacgttacttgatacaagttttaatcagaaaaagataatcggaaaagtgacggatacaggaatacagaagatattgctccgacatctggagattaatgaaaacgatgttgagcgggcattttcttccgagggaatagaacggatgaacaagaatatagtcatgcttaataacgggaaatggcatcagcctatttataaggtgcgtatttatgaaaaggctgataaatttgcagtaggtcagacagggaataaaagttcaaagttcgtagaggctgctaaaggaaccaatctgttctttgctgtttatgaaacagaacaaataaaccagggaacaggtgaggttgttcgtaaacgaaattatgcaacagttccgctgaatgtcgttattgatcgtcagaaacgcggattgccttctgctccggaagataagaatgggaatctgcctaaatttgtcttgtcacctaatgacttggtctatatacctactcaagaagaactggaaacagggcatgttgtttatccgttggataagaagaggatatataaaatggttagttgtacaggaaacagattgtatgtcattccatatgctgttgcaaatatgataattgataaaaaagaatattctcagttgaataaaatagaatttacagatgataaactctctatcaaggaattgtgttttcctttgaaaatagatcgtttaggtaatttaaaggctgagttatgataaagaaaacactttactttggtaatccggcttatttatcattgcgtaatgctcagttggttatcaaacttccggaagtagagaaaaatgcttctcttccggaagcgatgaaacgtcaatcggaaatatccaagccgatagaagatttgggagttgtagtgttggataacaaacagattaccgttacttccggtgcaatggaggctttgttggaaaacaattgtgcacttattacttgtgatagtaaaagtatgcctgttggactgatgctgcctttgtatggtaatactactcaaaacgaacgtttccgcaaacaattggatgcatccttgccgttgaagaagcagttgtggcagcaaaccatacagtctaaaatagcgaatcaggcaacagtgctctcggaatgcacaggtgaagaagcgaaatgtatgtatgcgtgggcaaatagcgtgcgtagtggggatcctgataatttggaagcacgtgcagcggcctactattggaaaaatttgttttcagatgtggaagggtttacccgtgagcgtgaaggaatcccacctaataatttgttaaactatgggtatgcgatcctgcgtgctgtggtggcgcgagggctagtggccagcggcttgctgcctactttaggaatacatcatcataatcgttataatgcttattgtttggcagatgacattatggaaccttatcgtccgtatgttgataaattggtgtttgacctttgtggccagtatggaacaaatgtttttctgtcaaaagaaataaaggttgcaatgctttccattcctacgattgaggtccgtattagcaggaaacgtagtccgctgatggtggcagtcgcccaaactacggcttctctttataaatgttttgctggagaattgcgtcgaattgtttatccggaatattgatggatcggtttagtgaatatcgggttatgtgggtattggtgctttttgatttgcctacggaaactaaaaaagataagaaagcgtatgctcttttccgaaagaatttgcagcgtgatggttttaccatgtttcagttttctatttacgtccggcattgtcccagtagtgagaacgcatctgtacatatcaagcgggtgaaatccttccttccggaatttggtcaagtaggcattctttgtattacagataaacaatttggacagatagagttgttttatggaaagaaaccacaaggggtaaagactccaggacaacagttagagttgttgaaaactaacttttttctttttctaaatctttctgtaatccattgaaaatcatgttgtaataaaagatcggttgttttcaatggttcaaagatactaatttgaaagcaaatcacaacgtgcagaatatgctcgtcagatgaagccttgttgttttcaatggttcaaagatactaatttgaaagcaaatcacaacatgaccttagcaattataaagctgaagtaggttgttttcaatggttcaaagatactaatttgaaagcaaatcacaacccgctcataaccccggacaggaaattattggttgttttcaatggttcaaagatactaatttgaaagcaaatcacaacaacggtacttatgtctattcagcatctacggttgttttcaatggttcaaagatactaatttgaaagcaaatcacaacaagtcagatgaatccaatacagtacatattgttgttttcaatggttcaaagatactaatttgaaagcaaatcacaacacctgcggtttcgcttttcttcggctcttcgttgttttcaatggttcaaagatactaatttgaaagcaaatcacaacgccctcaactccttggtttgcgtacattcgttgttttcaatggttcaaagatactaatttgaaagcaaatcacaacggctgatcggttattggatttgattttgagttgttttcaatggttcaaagatactaatttgaaagcaaatcacaaccagctctttctgtgccctatttacgacatagttgttttcaatggttcaaagatactaatttgaaagcaaatcacaaccagttgaattgcgagtgtgaagcttccatggttgttttcaatggttcaaagatactaatttgaaagcaaatcacaactacgcagcgtgaagctgctaacgagatagcgttgttttcaatggttcaaagatactaatttgaaagcaaatcacaactaatttctgtgtctttagttagtaatggcagttgttttcaatggttcaaagatactaatttgaaagcaaatcacaactgctaaatcgcataattctgtcacgtcttgttgttttcaatggttcaaagatactaatttgaaagcaaatcacaaccagtgaaacgtatttaggaaatgagggagtgttgttttcaatggttcaaagatactaatttgaaagcaaatcacaacaatcagtctttcctgctggttgaccctaggttgttttcaatggttcaaagatactaatttgaaagcaaatcacaaccaccactgtcccgtattcgccggaatccggttgttttcaatggttcaaagatactaatttgaaagcaaatcacaaccacttctattaatatgcgcccttatagcagttgttttcaatggttcaaagatgctaatttgaaagcaaatcacaacatattgttttcgcctcatgcaagcgaatttgttgttttcaatggttcaaagatactgatttgaaaattacaattcaagatttgccatatattaattagaaaaaggtattcttgattgtttcaataactttttttcggatagatataggtaatggagtttcgtgttatagttattgaagataaagaaaaaaggagtgtattgcaaaaaaatagaatgaaaagcattgtttgtagaaaaatgttgctatatttgccgttgagaaaacaatagtttatggctggatactgtctttatatcatcttgacgggaatggggcatatgccctttgccacatctgttaccgggatgacccctcgggggtaaggatagtatatataagcgtttctacgtgaaacgcgcttgcggatgcaggcatttcgattctttataaaataatcgtttcttattagtctttaattttgtcacggaaatatgctttccggatgacataaatataaaaatgagcgcatgaaagttttgaaattcggcggaacgtctgtgggttctgtcaacagcatgttaagtgttaagaaaatcgttgaagcggtagatgacaaagtgattgtggtggtttctgctttaggagggattacagataagctgatcaatacgtcgaagatggccgcggagggaaatgacgaatatgagaaggggcttaaagaaattgtgaaccgccatatagaaatggtatataccgtgattccagccggacgcggacgagaaattcttctcgacttggtgaacgagcttttgaacgaactgaaagatatttttcagggaatttatctgatacacgacctctcgccgaaaacatcggccaccattgtcagctacggcgagcgcctttcgtcgattattgtggcaaccctgatcaacggtgctgtgtggtatgattcccggaatttcatcaagacggaaaagaaacataacaagcacattcttgattcggaactgacaggcaggctggttcgtgaaacgtttgatgaaattcctgaagtcgctgttgttccaggatttatttctacggacaagacaaccggtgaagtgacgaatttgggaaggggaggctctgactatacggcctcaatcattgctgcagcgcttgatgcggacattctggaaatttggactgatgtggacggattcatgaccgctgatccgagagtcatcagctcagcctatcctattaaggaactgagctatgtggaggctatggaactttgtaatttcggagcgaaagtggtttatcccccaacaatttatcctgtctgccataaaaacattccgattctcattaaaaacacattcaatcccgaagctgcgggaacaatcatcaagcaagaggccgaccattcgtcgaaggccatcaaagggatttcttcgatcaacgacacgtgtctgattacgatgaccggactgggaatggttggcgttatcggtgtgaattaccgtatattcaaggcactggcagagaatggaatcagtgtgtttcttgtttcccaggcatcctcggaaaactccacttcgatcggtgtccggaatgaagatgcgtctttggcgtgtgaagtcttgaatgaagaatttgcgaaagagattgaaatgggagagatttctccgatgaaagctgaaagcggactggccacagtggctatcgtaggcgaaaacatgaagcatacgccagggattgcagggaaactgttcggaacgctgggacgtaacggcatcaacgttatagcatgtgcgcaaggggcttcggaaacgaacatatcgtttgtagttgacggaggctcgcttcgcaagtcgctgaatgtgatccatgactctttttttctttctgagtaccaggtcttgaatctgtttgtctgcggagttggtacggttggagggagtcttctggagcagatacacggacagcaggaaaggctgaaacaggaacggggattgaacttgaaggtcgtaggcattgccaacggacataaagcgttgtttacccgtgcgggaatcgatttgggcaacttccgccaggaactcgaagagaaaggaattccttcttcgcctcaggtgcttcacgatgaggttatcggaatgaatattttcaattcggtattcgttgactgtacggcaagcgaagacatcgctgcgctttacaaggattttctgaaacgtaacatatccgtggtggctgccaacaagatagctgcttcatcgtcttatgacgattatgccgaactgaaaaaaatagcgcgccagcgcggtgtgaagttcttgtttgaaaccaatgtgggagccggactgccggtgatcaatacaatcaacgatctgataaacagcggcgacaaaatcctgaagatcgaggccgtggtgagcggcacgctgaattacatatttaacgctctcagtgccgatatgccgttgagcgaaacaatccgcaaggcgagggatgagggatattcggagcctgatccgcgcatcgacctgagcgggaaggatgtgatacgcaaacttgtgattctggcgcgtgaggcgggataccgcatcgaacaggaggatgtggaaaagcatctgtttattcctgattcttttttcgaaggttctcttgatgatttctggcgcaatatacctcgtctggacgctgagttcgaggcccgcaggaagaagctggaagccgaaggcagacactggcgttttgtagcgcgtctggaagacggaaaaggaacggtttccctgcaggaggtggacagccgccatccgttctacaacctggagggaagcaacaacatcattttgcttacaactgaacgatacaatgaatatccgatgctgattcaaggatatggcgcaggagccagcgttactgcggccggcgtattcgccgatatcatgagcatcgctaacatttgaatgtcatgaaacatctgattattttaggcgacggtatggctgactgggcggtgccggaattgggaaataagacgctgctgcaatatgcggatactccgtatatggacaggctggcgcgtgagggacggacgggaatgctgaagacggtggccgacggttttcatccgggaagcgaagtagccaacatgtcggtaatgggatatgacttgcctgaagtgtacgaagggcgaggcgtgctcgaagcagccagtatcggcgttgaccttggtccggaggatatggccatgcggtgcaacatcgtctgcgtagaaggggatatgctgaagaatcattcggcgggacatatctcaacggaagaggcggatatactgatcaggtatttggatgagatgctggggaatgaccgtatccggttctataccggagtgcagtaccgtcatttgctggtggtgaagggaggcgacaagcgtttggcttgcgtgccgccgcatgacattccgttgcagcctttccgccccaatctggtaaaggcgctttgtcctgaagcgcaggaaacggcagatctgctgaatgcgctgattgtgaagtcgcaggagctgctggcaagtcatccgcttaacctgaagcggatgtcggagggaaaggatccggccaacagcatttggccctggagccctggataccgtccgagaatgaaacctttggccgagaaatacccggctgtccgtaagggatcggtgattacagcagttgatctgatccggggaatcggacgctatgcgggactgcgctgcatcgatgtggaaggcgctactggactttatacgacaaattacgaggggaaagcccaggccgctcttgatgcgctgaagacagacgatttcgtttatctgcatattgaggcgagcgatgaggccggccatgaaggggatgtgcctttgaagctgaagacgatagaatatctggacaggcgtgtggtagggccggtttgcaaggccttgaagagctggagcgagccggtggctgtcgctgtgcttcccgaccatcctacgccctgtgagttgcggacgcatacgaatgatccggttcctttcctcatttattatccgggcattgaagcggacggcgtgcagacttacgatgaagtggcttgcagggagggcagttacggctggctggaaaaagatgagtttatgaatctgtttatgaatataaaataatttgagatgagatattacagtacaaacaagcaggcccctgacgcgactttggaggaagctgtagtgaaaggccttgcttctgataaaggcttgttcatgccttatgaaatcaaaacgcttcctttgtcgttttatgaggaaattgaccggatgtcatttcaggaaatggcttacagagtggcagatgctttcttcggggaagatgttccagccggtgtattgaagcagatcgtgtacgatacgttgagttttgatgtgcctgcggtgcaggtgaaagacaatatttactcgcttgaacttttccatgggcctacgctggcttttaaggacgtgggcgcgcgcttcatggcccgtttgttgggctattttatccggaaggaaggcaaaaagcaggtgaatgtgctggtggctacttccggtgatacgggaagtgccgttgccaacggctttcttggagtggaaggcattcatgtgtatgtgctttatccgaaaggtaaagtgagcgaaatacaggagaaacagttcaccacgctgggacagaatatcacggcgctggaggtggacggtacgtttgacgactgccaggcgttggtgaagaatgcatttatggacaaagagctgaacggacacatgctgctcacttcggccaactcaatcaacgtggcgcgctttcttccgcaggcattctattatttttacgcctacgcccagctgaagcggcaaggcaagtctgagaatctggtggtgtgcgtgccgagtggaaacttcgggaatataaccgcagggctgttcggaaagcgtatgggactgcctgtaaagcgtttcattgcggcaaacaaccggaatgatatcttttatcagtacttgaagacaggggaatacaatccgcgcccgtcggtggctacgatagcaaatgccatggatgtgggcgatccgagcaacttcgcccgtatcattgatctgtataaaggcagtcacgaggctatttgtgcggatatcagcggtgcggcttatacggatgagcaaatacgcgaaaccgtgaagcgggcgtatgaagaaacgggctatctgctcgatccccatggggcatgcggctatcgcgcgctggaagaaggcttgaagccgggcgaaaccgggatcttccttgaaacggcccatcccgccaagttcctgcaaacggtggaaagcatcatcggcagagaagtagcgattccggagaagcttcaggcgtttatgagaggtacgaagcagagcatgcttatgagccgcgattttgcttcattcaaggattatctgatgaacgaatgacatcgtaaacagggaaatcagacttgttattcgataggtaaatggaacaattgcttaaaaagagtccccgcatagaggttgtggacgctttgcgtggatttgctgtgatggctatcatcttggttcataatctggaacatttcatctttccggtatatcctacagactctccggagtggctgaagattctggaccagggcgtttttaatggcgttttcagtctttttgccgggaaggcatatgctatttttgccttgcttttcggctttacgttttacatacagaccagcaaccagaaacggcaggggaaggatttcggctatcgcttcttgtggcgtctggttctgctggcaggattcgcgacgctgaatgccgccttctttccggccggcgatgtcctcctgttgttcgtcgttgtcggtatcgtgctgttccttacccgcaattggagtgacaaggcggtgctggtagcttctgtcatttttcttttgcagccggtagaatggtatcactacattgccagtctggtaaatcctgcgcatcagttgcctgatctgaaagtcggcgagatgtatgcggaggtggctgaatatacgaaagccggaaacattggcgacttcatccggggcaatgtaacgttggggcaaaaggccagtttgctttgggcggtcaatgcggggcgtttcttccagacggccggactgtttctgctcggtttctatatcggcaggaaacagctgtttgccgcttccgaaaagaatctgcatctgtggataaagatactgattgtgtctgcggttgcctttgcgcctttgtatacgttgaaagaactggtgatggaaagcagcccgattatccggcagagtgtggggacggcgtttgatatgtggcagaaacttgcttttacgctggttctgatagcgtcttttgtgctgctttatcagaataaaagattctgcggaaaagtgagcagcctgcgcttttacggcagaatgagtctgacaaactacatcacgcagtctattgtcggggcttttatctatttcccgttcggcttgtatcttgcgccttactgcggatacacggcaagtctgctggtcggaatctttactttcctgttgcaggtccggttttgcaaatggtggcttggaaggcataagcagggccctctggaatctatatggcataaatggacctggattggcgcaaacaagtgatgcgggcaggctgcaagcctgtgcctgtgtgcggcaggcttgcggtttggcgtgtgccggtcatggaagtcctttctggaattgcttgggcgaacatccggttgcagccttgaagtattttccgaaaaaagaggcgttggcaaaattaagcatatctcctacctgctgcaccgtatactttccgcttttgagcaatatcttggcttcgaggatgacatagtcctttatccattctccggcatggcgtccgctagtctggtaaattacctgcgagagatatttgggtgtcaggtacatggtttctgcataaaatgtgacgcttctttctttggtgtagcattgctgcaccagattcaggaatttctcgaacaggtattttgagcggctctttttgtagtccgttccgtttgtttccatcattttggcaagttcctgataggtgtctgccagaatgacgcgcatgtatcctttcagagcttcgcgcgtaaattcggtataaggttcctgtatccgttttcttattgtgcggtagatggtgagaagctcgttcatcttttcttccgaaacgttgatgacagcctgctgggtcatcttgttgcggaactgggacagaatggaagcgctgttttcttcgatgt

SEQ ID NO: 1122 - DNA, 24533 bp, synthetic construct
  source 1..24533: mol_type = other DNA
  misc_feature 1..24533: note = Synthetic
gttcttgctctgtgcgatgtttatgcccgacaagcagatattgatacccggatttgaaaatatgtcgttcacgatgattgaagctccggtttgcgtattgttcttcatactctgtggattgtgtacttccgtgatgtggggaggtatcttcaatcttgcagtggaaggtcttggcaagtatacggcagtcgcttccggtttcttcatggtgatggtatgcggtggcggaatattgccgttgattcaaggcgctgttgccgatgtggccggatatttgtcgagctattgggtattggcagcggctgtcggctacttgttgttctacgctcaaattggaagccgtgcgaagaaagcaaaagcataataattctggcttgcgataaaaaagtgagggcagctttttcaagctgccctcactttttattgttgccaattaaattgtttgttaatctcccaaataggatttcagcaatcggcttttctgtcctttgagtttgcggattgctttttctttgatttggcgcacacgttcgcgtgtcaaatcgaattttgcgccaatctcttccaatgtcatttcttggcatccgattccgaagaacatttttagaatctcacgttcgcgatcttgcaattggttgagagctctgtcgacttctttggaaagggattcttgattgagcgaataatcggccatcggagaatcttcgtttgtgagaacatccaacaagctgttgtcctcgccttctacaaaaggcgcgtccattgaaatgtggcgtccggacactttgagcgtatcggaaattttgtcgacaggaatatccaattggtttgccagttcttctgccgacggacgacgttcgttttcttgttcgaatttggagagggctttgctgattttgttcagcgagcctacctgattgagcggaaggcggacaattctcgattgttcggccaatgcttgcaaaatggattgacgtatccaccaaactgcgtaggagataaatttaaaacctctcgtttcgtcaaatttttgagctgctttgatgagccctaaattgccttcgttgatcaagtcaggaaggcttaatccttgattctgatactgttttgctaccgatacgacgaaccgcaaattggcacgtgtcaatttttccaatgcggcatggtcgccatttcgaatgcgttgagctaattcaacttcctcttcgactgatattaaatcttcccgtccaatttcttgtaaatacttgtctaacgatgcgctttcgcggtttgtaattgattttgtaatctttaattgtctcatttactatatcgaagtttttaaaaaagggtcgtttttgcctgcaaaggtaaaacatttttttcgatttagagctctcttgaattctaaaatcgacacatgtatattcttaaaatctgaaataaaacaaacgaatagcggctatggttcagccgctattcgttaatttttgaaaataggcgcgatgagcgtcaattttcttcctcgtagaggggaactgcgaagtagacgcgttttcctgtcggttgcaatcctttgatgatcatcaccttgtcggcatcttggctgcgcatgatttcatcgtagatgttttcgacgtcgtcttgcgaatcgacaggcatattgttgatttcaagtatgatcaacccttctttaattcctgcatttttgaaaatgccgtcggtgagacccgtcacttctactccgtggctgatatgcaatgcttcttttgtgtcgttgcttagtttcaagaaggcacatccgagggctgtgaagtcggtgcgtttgttgattgaagtgccgccttgggaatttttgaaaacgactgtcacagtcttcgctttattgttgcgatagaatttcacggtagccttgtcgcccggagagaatcggctgattgtctcttgcatgtcggcagtgccggagatgcgtgtgtcgttgatggctacgatgacatcgcctttttcgattcctgcttcttttgccgcgctttggtcttgcacttcagctacatagatgccttttgtcacttccgttatgttttctttttcgcaaagggagggcgtcaactctacgaacgagatgcccagcaatgcccgttgcactgtgccgtattggcgcaagtcggtgactacttttttgacgatggatgtcgggattgcaaatgcatatccgctataatcgcctgttcgggaatatattaatgtattgattccgaccaattcgcctcttgtgttgaccaatgcgccgccactgtttccttggttgaccacagcatctgtttggatgaaagattcaattcccatttgctggttatgggagattgaggacacatttcgcgctttcgcgctgacgatgccggctgtgacggtcgatgtgaatccaaacgggttgccgacagcaagaacccattcgccaactttcagttcgtcggagtctccgaatgtaatgaaagtgaggtcttttgcatcgattttcagcaatgcgaggtccgtgtttgaatcggtgccgatgatggtggcattgtattttttgttgtcgttaagcgtgacttccaatttttctgcaccttccacgacgtggttgttggtgacaatatatccgtcgttgctgatgattacgcccgaacccaatccgagaggctgtggctgcgcgtcgcgttgccggcgttgttgcctgctgccaaaatcaggaccgaaaaagaattcgaaaaacggatcgttgaagccttgcatcctgctttgtcgaggagttgcaaaactctggatgctgacaacgcagttgattgtattttctgctgcttttgtgaaatcgattggcgcagttgaactcgaaacggctgtccgaatgaagttttgactatcagcatagttgctctcgctatttccggcataggacggcattgaaatcaaagccgttgctgctaagatagttgcctgaaaagatattctatttttcttcataatagagatgttaaaaagttgtctaattagcaattctaatcgttaattttaacgattcacgcgtctaaattactgctattttttttagtatggcaacaataaacctcatatttaagtttaattaaacaatgaggtttggaatcgaggtcaaatgcaaactatttataatatgtgtagtcaatatttgtcggtaatgggggctgtttcggtaaagtctttcatttcgttgtattcagcccaatcgggatctttttcggcgtatatggacaggggcagcacgtcgaacaaacttaatgccttgttgaatgcgtattgaaaatgagccgtgtttcgtgcatagaaaatccagttgcgttcgcctccgccggtgtatatgccggtgacaacagcggattgttcttttttgaatgccgctaatatggcatcgtttacttttcccattagcaaggaatcttcgagtgttggcattccgttttcgagagcgtcgtatttccatgtgacttcgatgcgttcattgaattctttcgattccatggcttcttcgaggcctcttcgccccgtcacgattatttggtattttccgtcttcgctttctgtcggggttgtccaccaatcgtctccgaatttgaattttcttttcatatcttgatactgtaagcagtgcaaagatactgcaaattgcagacacttgaagcatttgcaaatgggattggagaaaatgaaaaagcgcagagaatttctccgcgccctttcatgaatgattattggattgcgttatccttcgattgctgcaattccgggaaggatcttgccttcgatggcttcgagcaatgcgccgccgccggtcgacacgtaggaaactttgtcggcaacgccgaatttgttgacgcatgcgacagagtcgccgccgccaaccaatgagaatgcgccattcttcgtggcttccacgatggcatcggcaatggcacgcgaaccggctgtgaagttgtcgaattcgaatacgccggcaggaccgttccatagaattgtttttgcatttttgattacttctgcgaatgctttccgcgtttcaggaccggcatcgagaccttcccatccatccggaatgttgttggcagggcagatttgcgtgttggcgtcgttgctgaagctgtcggcagctacgcagtctgtgccgagaacgaggttgatgcctttttcttttgcctttttgatgatgtcgagcgccaaatcgagtttgtcgtcttcgcaaatggaaacgccgatttttccgccttgcgcttttgcgaaagtataagtcattcctccgcacaaaatcagattgtcgactttgtccatgaggttttcgatgattcctattttggttgaaactttcgaaccgcccatgatggctgtgaacggacggcggatattgttaagcacgttgttgacggctgtcacttctttttccatcaaatagccgagcattttgttgtcggtgtcgaaatagtcggcaatgacggcagtagaagcatgtttgcgatgcgctgttccgaaagcgtcgttcacatagcaatcggcatagcttgccaatgtttttgcaaattctttttggcgtgctttcatttcttttttagcagcttcgtaagcggggtcttctttgtcgattcctaccggtttgccttcttcttccggatagaagcggaggttttcgagcaaaagcacttcgcccggtttcagtgcggcagcggcatcggctgcttttgcgcaatcgggagcaaatttcacttctgtgccaagggcagctgcaacagcatctttgatttgtccgagcgacattttcgggttgactttgcctttcggcttgcccatgtgcgacatgatgatcaagctgccgccgtctgccaagatttttttcaatgtagggagcgcgccgcgaatgcgggtgtcgtctgtgatttttccattttcatccaaaggcacgttgaaatcaacgcgcacgattgtctttttgccggcaaaattgtattcttctattttcatgttgttgaaaattaattagttgtcttaaatttattcgttccgttttcagcggtcaaagttatataaagattttcaataaaggaattttttctttattgaaattgtttatcggcatattccgcttgctgttaggattgcagacatttgcgtttgcaattcttttgatttttgcattgctatttctgcgaaatctttttctgaagatgcgtagatgatgccgcgagatgaattgaccagcaggccgcaatcggccgtcaatccatattttgcaacttcttccaaactgcctccttgcgcgcctacgccggggactaacaaaaatttgtcggggatgatgcggcggacgtcttcaaacagttgaccttgcgtggctccgacaacaaacatgaggttctcgttgttgccccatttcgatgctttgcgcattacgtgttcatacaaggggatgccgttgctgtcgttcatgaattgaaaatcgagcgagcctttgttggacgtgagcccgagcacgataacccatttgccttcatatccgaggaagggagcaacgctgtcttctcccatgtacggtgcaaccgtcacagcatcggcatcaaggctttcaaaaaagcaacgggcatacatggcagaggtgttcccgatgtctccgcgtttcgcgtcgatgatgacaaattggtcgggatagttgcttttgatatagcgaactgttttttccaatgctttccatccttcgacgcccatgctttcgtagaatgcgctgttgggcttataggcaacgcaataatcggcggtggcgtctatgatggctttgttgaaatcgaagatcgggtcgtcggattccgacaatacggattgtggcagtttttttatgtcggtgtcgagtccgacgcacaagaaagattttttccttttgatattttcgactaattctgtgcggttcatatatttggaaaatttatagttcgctttcctttaatttctcagcattttcggcgatgataagattgtcgatgcattcttggatgtcgccgtccatgaaggctggaaggttgtagatggtgtagttgatgcgatggtcggtgattcgtccttgcggataattgtaggtgcgaatttttgccgaccggtcgcctgtcgataccatcgttttgcgtcgagaagcaatatcgtcgatatatttttgatgttctttgtcgtaaatgaacgtgcgaagacgcgccaatgcccgttctttgtttttaggttggtcgcgagtttcggtgcattcgatcagaatttcttctgttatgccggtgtttgggttcttccaattgtaccgcaaacggacgccggattccactttgttcacgttttgtccgccggcgcctcccgaacggaatgtgtcccatttgatttcgccttcgttgatttccacgtcgaatggttcggcttccggcagcacggccacggatgcggccgacgtgtgtacgcgtccttgtgtttcggtggcaggcactcgctgcacgcgatgcacgccggattcgtatttgagtgtcccgtagactttctctccgcttacggagctgatgatttctttataacctccggcagcgccctcgctataactcatcacttccattttccatcctttcgattcgcaatattttgcgtacatgcggaacaagtcgcctgcaaagatggctgcttcgtcgcctcctgtgccgccgcgaatttcaagaatgacgtttttggagtcctccggatcttcagggattagcaacagcttgatttcttcttcaatttttgggagctcgttggtgtcggattccaattcctctttggccaattccctcaggtcgggatccgattcgttttcgagcacggcttttgcttcttcaacgttttgtagcatttttttgtatcgggaggtgacagccgtgagtttctccaaatctttgtattctttggttagctttacgaagcgtttcatgtcgccgatgaccgccggatcggtaatcagcaggctgacttcttgaaaacgggcatctatgccgtcaagtttttgaagtaatgtgttattgggttctgccatgtcttttctgtgaaatagttattgggtaagtacgtcgttatccaagcgattttagcgcatcggcaaattcttttgcaatcgagcggcaatcgccggcaatcgtgtcgatgttgtgttgcttcatctcgatgggggtgcctattgtggtgaatttttgcttttccaatagcgcgtcgattgtctttgtgccgactccggcccatgtgaaagaacttgcgcgggcgaatattttgttggtcacgccacgattgaccaatgctttcagcagcgattccatttcgggaaacaaggagccgttgtaggtgggagcggcgacaatcagaccgttgtagcggtagatgtcgcgcaggatgtaggacttgtcggaatgcgacacgtcgtggattctaatattttttattccgcagagggcaagttctcgcgctaatatttcaatgatgtcttctgtgttgccatacatgctgccgtaggctatgacgacgccttcttcgccgatgcctttgctaagacggtcgtagagtgcgaccacctctccggcttgcttgtgccacacgggcccgtgggtggagcaaatatagtcgatggctacgccttgcagctttgcaatggctttttgcacgggcatgccatatttgccgacaatgttggaatagtatcgtatcatttcggggaaatagagcgccgtgtccatttccttgtcgacgatgccgccgttcagtgcgccgaagcagccgaaggcgtcgccggagaacaagaccttgtcttcgatggcgtaggtcatcatcgtttccggccaatgcagcatgggcgtgaggaaaaatttcaaagtttttccgcccaagtcgatttcgtcgccgtcgccgatggcaattgtattgtcggatatgccgtagaagccattaagcatttccaaagtcttggcgttcccgacaatttgcatgtccggaaattcttttttcaaagagaaaattcctccggaatggtcgggttccatatggttgattatcaaatagtcaattttccggtcgggacaaattgcttttattttgctcaattgcttaaaggcatgcgaaacctcaactccgtcgatcaacgcggttttgcttgttcctttcactaaatatgagttgtacgaaactccgtagggcagaggccatagcgcttcgaatttttcagtggtgcggtcgtttgcgccgacataaaaaatattatctgtaatcattgaattttgcatctttttgtggatttggaaaatttatttttgtttgttccagagttgcttcattcgttctttcattttcgcttccgacggattttcgccggccgtccaaaatgtagtgtttttgcagctttcgggcatgtattcttgctcgacgaaattgccggcaaaagaatggggatatttgtagtcggctccgtagccgaggtctttcatcaattttgtcggcgcgttgcgcagatgtagcgggacgggctggttgccggtttgttccacatgcgcgagcgcggcatcgattgccatgtatgccgaattgcttttgggcgaggttgcaagataaatagcgcattcggagaggatgatgcggccttccggccatccgattttttgcaaggcatcgaaggtggcattggcgagcagtagcgcgttggggtttgccagcccgatgtcttctgccgccaagatcaccaatcttcgcgcgataaacgccggatcttctccccctgcaatcatgcgagccaaccaatatacggctgcatcgggattgctgccacgaattgatttgataaaagcggaaatgatgtcgtagtgcatttcgccgtttttgtcgtatgccatcgggttttgttgcagccgttcggttacgatgtcgttgcggatgacgattggcttgtcgtcggcagtcgattgaatcagcaagtcgataatgttgagcatcttccgagcgtcgccgccggcaaatcggaaaagcgcgtcggtttctacgatgttgacttttcgatttttcagtatttcgtcttttgcgacggccctgtttagaagctccgtgaggtcgtcgtcggagagtggttgcaacacgtagacctgtgcgcgtgacaacaaggggcggataatttcaaacgacggattttccgtcgtggcgcctatgagcgatacgatgcccatttccactgcgcccaacagcgagtcttgttgcgacttattgaatcgatgtatttcgtcgataaacaagatggggcggtgatggcaaaacatgccggaaacatcccttttgcacagcgcaagcacgtcgcgcacttcttttacgccggaatggactgccgacaaggtatagaacggggcttgcacttgcgcggctatgattttggcaagcgtcgttttgcctacgccgggaggtccccataggatgaatgatgaaatttgccctgattctatcattttccgaaggacgcaatctttcccgacaagatgtttttgtccgatgtagtcctctaaacttttagggcgaagtcgttctgctaatggttcaaacgtcattgtagccggcaccaattatccgaatgcaaaggtaatgaaagttggctgcaatgcaaagcgctttcacgatttgtatttgcattgtcgaagcgcgtttgtgttattggaaagagaaatgcaggccaatcgagaaacaaccgatcttactgattatgtcttgccgaggtgttgagattcgaaaagaagattttgttgaggtctcttaaaagagaagacgacatgcaaaatgcatgccgccttaattgtctacacaacggaataaaccttattgtgatttgcttcaaattctgttgcaaatataatgataaaagtacgaataacaaatttttttaggtaaagtagaaaatattttttatctttgaagatattaatcaaatgttttttatatgcgatatatattgggattagacttaggaacgaatagtgtaggctgggcagtcgtagaagctattatagacgaagatggaaaagagaaattggttaagattaattctcttggaagtaggataataccgatggatgcggcgacattgggtgattttaatgcaggtaaaacagtttcaaaaactaaaaataggacggaaagacgtcttatgcggagaattctccaacggaaagtgcttcgtcgtgaaaggttgcttcgggtgttgtcgttaatgaattttctgccaaagcattatgctcaatgtttggataggtatgggaaaataatttctgatcctgagcctaaattagcatgggtaaaagaagatggttgctatcgttttctttttcaagagtcgtttagtgaaatgttgtcagatttttatggaaaaaatccggaattgcgagcaagcggcaaaaggataccatatgattggacgatttattatttacgtaaaaaggcactgactcaaaaaatcacaaaagaagagttggcgtggattttgttgcattttaatcagaaacgcggttattatcaattgcgtgttgaagaagatcaacagtccaagtctaaacgtgaagactattatgaattaaaagttatttcggttgaagatacgggagagaaaaaaggcaaacggtctctctataaaattacatttgaaaatggttgggagtttgattattcaagtgttttatctccggattgggttggaaaaacaaaaagttttatagtgacgacggaacttgaaaaagatggaaaagaaaaaacagatgattcggggaaaattaaacggtcgtttcgagctcctaaagatgatgattgggaattattgaaaaagaaagctgaaagcggtattgaagagtcgcataaaaccgttggcacgtatatctatgatgctttgttgcaaaatccacaacaaaagattcgagcgaaattgataagtacgattgataggaaatattataaagacgaattgaatcgaatacttgaaaagcaaaaagaatttcatacagagttaaacgatagagaattatatgaggcttgtgtcgatgcgctttatccaaataatcttgcacatcgagatttattatataaacagtgtgattttactgatttattagtggaggatattttattttatcaacgtccgttgaaaagcaagaagtcgttgattgatgaatgtccttacgaatcacatgtctataaaaaggctggcaaaatagagcgtgtgccgttgaaatgcattgcgcggtcgcacccattatatcaggaattccgtttgtggcaatttatttctaatttgcggatttatcaacgtcaaaaagaagtaaatggaaaattggaggtagatgcagatgtcacgagtcaattccttaaatcggaaagtgattatgtcgtattatatgaatggctaaattcgcaaaaagaaattaagcaaaatgcgcttttgaaacatttgaggttgaaaagtgcggaatatcgatggaactatgtggaagacaaggcatatccttgcaatgcaactcatgcgctgctgatcgaacgattgggaaaagcaggggtaaaatcatcgtttttgaatggagaaacagaagaatctttatggcatttattgtattcaatctcggacttgaccgaattgaaaaaagcgttgcaggcttttgcgggaaaacataatttggatgtagagccatttgttggagcattccttcgtgtcccgccatttgaaaaacgttatggcgcatattctgcaaaagcgattaagaaattattgccgttgatgcggatgggcaaatattggcgagaagaggctattgattcaagtacgcgtgttaagatcaccaaaattataacaggggaatatgatgcgcagatttcagaacgtgtgcgtgagaaagttgggcatttggaagatgtggcggatttttgcggcttcccattgtggaaagcgtgttatcttgtatatggtcgccattcagagccaaatacggctgagcagtggaaggagccttcagatatcgatcgttatttgaaatctttcaaacagcattcgttgagaaacccaattgttgaacaagtcatcatggaagcgttgcgtacggtccgtgacatatggaaacaagtgggtcgtatcgacgaaatccacgtcgaattggggcgagaaatgaagaatccggcagacaggcgggcagctatgacaaaaaggattctggaaaatgaaaatacgaatttgcgcatcaagtcgttgctttatgagtttatgaataatccggaatggaagatagaagatgttcatccttattctccgatgcagcaagaaaagcttcgtatttatgaggaaggcgccatggcagaggatgcgaaaggagtaccggtcgatattttgcgaaagtttaatgagaaagatgccaagaaacgtccgacaaagtcggatgtggttaggtataaactatggttggagcagcattatcattctccctatactggggaagggattcctttggcaaagttgtttacgccagcttatgagatagaacacgttattccaagaaaacgatattttgacgattcgttgagcaataaggtgatatgcgaaagcgcggtgaataagttgaaaggagcgatgacagggtatgagtttatcaaaaaccgttctggcgagatcgtgattacaggagaaggcaatagcaaagtggaaatattctcggttgagaaatatgagcagtttgtgaaagataattattcccaaaacagggcaaaaatgagaaaattgttgatggaagacattccggatgactttatcgaccgtcaattgaatgatagccgttatataagtagaatggttaagtcattattgtccaatattgtgcgtgaggatggcgaactggaagcgatatctaagaatgtgatagtttgcagtgggggcgtaaccgatcgtttaaaaaaagattggggaatcaacgatgtttggaatagaattattttaccacgttttgagcgcttgaacgaactgtcaaaagatggaagcacttatacggtgtataacaaaagtgggaaattaataccgtatatgccgcttgagtatcaaaaggggttcaataaaaaacgtatagaccatcgacaccatgcgatggacgccatagtcatagcttgtgcttcgcgtaatattataaattatttaaacaatgaatcggcgaaagggaatgcggaggtgtcgcgtcgagatttgcagaaaattctgtgtagcaaacaagtgacagatgaacaggggaattatcaatatcttgtcgacaagccttggagtacgtttacgcaagatgtttatacggctttgagcggcgttattgccagcttcaagcaaaatgttcgtgtaattggcaaagcatccaattattattggcattataatgaaagcggaaagaaagttttatcgaagcaagtgaaaggtaatggatggaccgttcgaaagccattgcataaagatacattttatggtgaagtgaatatacgcaaagaaactacgacgacattgaaaaaagcaatggaaaatccgaaagttatcgtggaaaaagatttgaaacggaagttgcttgaccttcttaaggagagagccgattatgccggcatcaaaaaatattttgaaacaaacaaggatgcttggcaagatgtcaatttgcaaaaaataagggtgtattgtttcactggcgatacaaaagaccgctttttcgcatcgcgtaaatcattgaatgatttttctgcttcaaaaatagaaaagatagaagagtcgataggaaaagtaacggatacagggattcaaaaaatattgcggcggcatttggctgccaatggcggcgacccccaagtcgcattctcgccggagggaatagagcggatgaatgcaaaccttgttgcattgaatcttggcaaaccgcaccagcctatttataaagtgcgcatttgcgaacaagccaataaatatcctgtaggcaagcgaaatggaaagattgcgaagtttgtggaagcggcaaaaggaacgaatttgttttttgccgtttatgaatcggaaagcgttgatgggcaaacgggagaaatcgtgcgaaaacgagtgtttgatactgtgccgttgcgagatgttattgagcgtcaaatgcatggattgtcgtcagttcctgaaatggattcttccggaaatcggcttaagtttgtgttgtcgcccaacgatctggcttatgtgcctacggaagcggaacgcgcagctggcaaagtctttgaacctattgacaaagagcggatttataaaatggtgagttgtacaaatacacaatgtcattttattaaggcaaacgtagcaactgtattgcgtgatggcatcgaatttgaaaaacaaaataaaatggaacgggctctcacaggggaaatgataaaagaaatttgcatcccgatcaaagtggaccgattaggcaatattattgataaaaacttgacgctatgattaagaaaacgctctactttggaaatcctacgtatttgtcgctgcgtgatgctcagcttgtcattaaattgcccgaaatagagaagtcgccgcttccggaagatacgaaacggatgtcggagacttcgaagcctatagaagatttaggcgtggtagtcctcgacaacaagcaaataaccataacggcaggggtgatcgatgctttgctggaaaacaattgtgcattaattacttgtgatcgtcgcagtatgccggtaggtctgatgttgccattgtgtgggaatacaacgcaaaatgagcgatttcggcagcaattggatgcttcgcttccattgaaaaaacagctttggcaacaaacggttcaagctaaaatacgtaatcaggcatcagtgctggaagaatgcacacgagaagaggtaaattgtatgcgtgtgtgggcgaacaatgtgaaaagcggtgattcggacaatatggaagcacgggctgccgtgtattattggaaaacattgtttgccaccgtcgatggcttttcaagaagcagagacggtgttgctcctaataatttattgaattacggatatgccattcttcgtgcggtggtggctcgaggtttggtggcaagcggattgctgccgacattgggaatacatcatcacaatcggtacaatgcctactgtttggcagatgatgttatggagccttatcgcccatttgtcgataaacttgtgttttgtttgtgtgagcagtatggggaggatgtggaattgtccaaggaagtgaaaagcaaattgttgtcgattccgacgttggacgtgcgaatagggggaaagcgcagtccgttgatgattgctgtggggcaaacgacagcctcattgtacaaatgtttctcaggagagcttcgtcgcgtgatctatccggaatacaatggatagccgttttagtgaatatcgcattatgtgggtgatggtattttttgatttgcctacggaaaccaaaaaggaaaagaaggcctatgtggcgtttcgtaaaaatttacaaagggatggttttgcaatgtttcaattttctatttatgtgcggcattgtgcaagtagtgaaaatgcagctgttcatataaaacgagtgaagtcttttcttccggataaggggaaagtggggattatgagtgtgactgacaaacaatttgctcaaattgagattttttatggcaagaaagagcatttacgagaggaggtcaattcgtggcagcaattagaattattttaaaacgaaaatcccatctgtttgatgggatttctcgtttcatatctgccatttttttattttctaatttgtgctataactttttgattagtagcataaaatagatatcctgttgtttctaatggctcaaagatacaaatttgaaagcaaatcacaacgtgatgttgcactcgttgacaatgattggagttgtttctaatggctcaaagatacaaatttgaaagcaaatcacaacacacgggcatttccgcaatgccgaaagattgttgtttctaatggctcaaagatacaaatttgaaagcaaatcacaacaccgagacatacagcggataatggacagcggttgtttctaatggctcaaagatacaaatttgaaagcaaatcacaacaacatgtttgtttataattaagtatttttttgttgtttctaatggctcaaagatacaaatttgaaagcaaatcacaacaggttgacacggattctattccgtttcggcgttgtttctaatggctcaaagatacaaatttgaaagcaaatcacaacgttaagcaaggaatattgacggatgcgcaggttgtttctaatggctcaaagatacaaatttgaaagcaaatcacaaccctcgtgataatacggatgtctctcctgctgttgtttctaatggctcaaagatacaaatttgaaagcaaatcacaaccgacaccgtcgacaaaggagactacaacgagttgtttctaatggctcaaagatacaaatttgaaagcaaatcacaacctccgcttgtgggtgatttcggcaagcggggttgtttctaatggctcaaagatacaaatttgaaagcaaatcacaacaacggaggtagtgcaggaattgcaggtagtgttgtttctaatggctcaaagatacaaatttgaaagcaaatcacaacggatatgttcctcgttattcgcagttgaaagttgtttctaatggctcaaagatacaaatttgaaagcaaatcacaacgcctcgtgataatacggatgtctctcctggttgtttctaatggctcaaagatacaaatttgaaagcaaatcacaactggtaatgctcagcaaaagcgagccaatgagttgtttctaatggctcaaagatacaaatttgaaagcaaatcacaacactcggactgtccccgtacagacttctgcggttgtttctaatggctcaaagatacaaatttgaaagcaaatcacaacacatttgatgctcccgtctgtgaagatagggttgtttctaatggctcaaagatacaaatttgaaagcaaatcacaacgacttacagagatgtaattatacaaaggatgttgtttctaatggctcaaagatacaaatttgaaagcaaatcacaacggattttggtgcttctgttgcttctgctaagttgtttctaatggctcaaagatacaaatttgaaagcaaatcacaacacgtcgcgatcgcgattttcaaacgcgggtgttgtttctaatggctcaaagatacaaatttgaaagcaaatcacaacacgaagtctatgatgaacaagtatggcaggttgtttctaatggctcaaagatacaaatttgaaagcaaatcacaaccgttgcgtccggttgtcctccagttttgaagttgtttctaatggctcaaagatacaaatttgaaagcaaatcacaacgcaagcaacattgtctttttcatttacattgttgtttctaatggctcaaagatacaaatttgaaagcaaatcacaactttagtggtagtatgaaaaatctttcttctgttgtttctaatggctcaaagatacaaatttgaaagcaaatcacaacggacgaggagaagagaaagatatcgttttggttgtttctaatggctcaaagatacaaatttgaaagcaaatcacaacgccacggtaattgtctatcagatccatcggttgtttctaatggctcaaagatacaaatttgaaagcaaatcacaaccggcttcggcgctttcgtggtccacgcccgttgtttctaatggctcaaagatacaaatttgaaagcaaatcacaacactatgcgtgttcagtatcgttatcagcggttgtttctaatggctcaaagatacaaatttgaaagcaaatcacaacagcctcatacaaattttttatacgcatattgttgtttctaatggctcaaagatacaaatttgaaagcaaatcacaaccaataaaaataacagaacaatgagcaacacgttgtttctaatggctcaaagatacaaatttgaaagcaaatcacaacgccatgccctcgcgcaacgtctcggcacgcgttgtttctaatggctcaaagatacaaatttgaaagcaaatcacaacaatcacttgaatacattgatgactgaacaggttgtttctaatggctcaaagatacaaatttgaaagcaaatcacaacaaaaaacgattatcttgaagtgtttataatagttgtttctaatggctcaaagatacaaatttgaaagcaaatcacaactcattctctattctccagcttcgtcaaaagttgtttctaatggctcaaagatacaaatttgaaagcaaatcacaacacattgcgaagtcattgttcatagcttgatgttgtttctaatggctcaaagatacaaatttgaaagcaaatcacaacatactacgcccttacataccaagtgcgcccggttgtttctaatggctcaaagatacaaatttgaaagcaaatcacaactggattctaatacgaaatgatatggattctgttgtttctaatggctcaaagatacaaatttgaaagcaaatcacaacaagccgcctcgcggacaatagggctattcgttgtttctaatggctcaaagatacaaatttgaaagcaaatcacaacaattgtcctttcctggtgataaatgggattgttgtttctaatggctcaaagatacaaatttgaaagcaaatcacaactattatggaaatgaatattgaatttggcaagttgtttctaatggctcaaagatacaaatttgaaagcaaatcacaaccgggcattagcgacgcggacatggcggaaagttgtttctaatggctcaaagatacaaatttgaaagcaaatcacaaccacttggggatagacaaagaccgcgacaaggttgtttctaatggctcaaagatacaaatttgaaagcaaatcacaactaacataactggcattatgataaatgttaagttgtttctaatggctcaaagatacaaatttgaaagcaaatcacaacacagccttgtcgctcttcctcttttatatagttgtttctaatggctcaaagatacaaatttgaaagcaaatcacaacattatgacggtatgccttattaatctttaagttgtttctaatggctcaaagatacaaatttgagagcgaatccacatcgcaactgatttaacaagcacttacgcgttggccgagaatagcagatatgcgcctttgaagcaggaattgaaattgcatgcgtcgcctatgctttcatagaaatggattgcttttttttctatggcgtcggcaaaaggcatgtcgtttctgtattttgccgtggcgaagtcgtatccgagagacgcgccggcattggagtagtcatagattttttgaaagcgttcggcttcttcctcgcctttgtcggccctgcacttctctaccacttggtagaatatggcttcaatgtcgcgggcagtcggaaaatcatctgcgagcattgccgccattgtcaattttgagaaaagcatggcgtttgattcgatattctcgagtgttacgacttcattgaggaaggcgttggaaatggctctgatttcgtcggacgatttgtatgttttggttatgcgttttatttcgttgttaaagtgaagcagccgctcttcgtcgtcgaagtcggtcgagaaaaacaaatggcctaactgtttgccaacttgttgcatgtcgcaggttgtcgtttcggaggcggtgtcgtagttttcctctttcggtgttgttgaaatgcccgccatgtaggtcatcaccgaaatagcccggagtaaatctttcattgcgactgtttttttagacggtggagtattatagacaagcaaatatacaaattggttttgaaacacgatgcgcataaatgcaaatatttacagttaaaaaagattaatatattggtttaaaatttctttaaaaagagccatgtttgtcaaggttgcacgctaaatattattaatggcatgaatagattgttgaattacgggcaatcgtcgtatctttgcatatatatgtatatcagagcaaatctgccatttcatgtgtttgatttgctttttctttgttgattatgggagtatgcagaatcaagaaagctgtgattgtgggagctacgtcgggaattggcaaggcggtggcgcaattgctgtggcaaaaaggcgtggacattgcgatagcaggccggcgcgaaaatttgcttgccgattttgcttcgtcgaaaggcggacgggtgatatatgctccgctcgacgtaacggcagaagatgccggcgagcgtttggccggtttggcggaacggcttggcggagcggatttgatattgctatgttcgggcattggcactcagaatcagcaattggatgccgaaaaggagttgcaaacgacggcaacgaatgtggtcggattcacgcgaatgattgatgccgccttcaactatttcaaagcaagaggcggagggcatattgcggcggtgacttcaatagccggcacgcgcggtttgggagcggctccggcttattctgccacgaaacgttaccaaaacacatatattcagagccttgcccaattgtccaataccaatggctttggcattaaattcacggatattcgccccggatttgtcgacacggcattgttgaacggtggcagctatccgcttttgatgaagccggaccatgtggcgcatctcatcgtgcgggcgttggaacgacagcggcgaacagtcgtagtcgattggcgttatggcatcgtcactgcgctttggcgattgattccgcgctgtatttgggagcggcttccgattaaaacgaaaatttaatattaaaatgaaattgatatgaaaaaattattgttcggcatcgctttgtgcggtgtgtcgatgacagcttcggcagaagagccgttgtggatgcgcgacgtgaggatttcccccgacgggacgcaagtggcattttgctataagggagatatttacagagtttcgtcgaatggcggcaaggctgtgcggctgacgacgcacgattcttacgagtcgtcgccggtgtggtcgcccgatgggaaaaagattgcatttgcgagcgatcgttatggcaatgccgacgtgtttgtgatgtcggcaagcggcggggccgcaacgcgtcttacgtttaattcggctgcggaaacgccaagcgcaatttcgcccgacggcgtgtatgtctatttttcggcaagcattcaggatcctgcttccagtgcgcttttcccaacatcgtcgatgacggaactgtatcgtgtgccaattggcgggggaagaacggagcaagtgcttggcacgcctgccgaaatggtatcgttcgcgcccgacggacaacgatttctttatcaagaccggaaaggcttcgaggatgaatggcgcaaacaccatacgtcgtcggtgacgcgcgacatttggctgtacgacgcggcgaccggcaagcatgtcaatttgaccggcagagccggtgaggaccggaatcctgtgttttcagccgatggaaagactgtttattttttgagcgagcgcgacggcggctcgatgaatgtttattcgtttccattggattcgccttcttcggcaacgcgtctttctgcattttccacccatccggttcgtttcttatcggtttcgaacgatggaacaatgtgttatgcttatgatggcgccatttacacgcaacggcagggcggaaaagcgtcacgattgcatatcgacgtggttcgcgacgacatggatttgccggccaaacttcgtttcacatccggcgctacatcggccggcgtttctccggatggcgaacaggtggcattcgtagtgcgcggcaatgtgtttgtcacttctgtcgaatatggcaccacaaaacaaatcacgaatactgtcgaatctgaatccgacgtggtgtttggccccgacaatcgcactctcgcttatgcgagcgagcgcgacggctattggaatatttatgtggcaaaaatccaacgcaaggaagatttgaatttcccgaatgctacgttgatagaggaggaagccgtattgggcgatgccaagatcgacagggagcatcctcaattttctcccgatggaaaagaacttgcttacattgaaaatgaatgccgcttgatggttgtcgatttggagtcgaaggcggtgcgacagatcaccgatgggtcggaatggttttatggcggatttaattatgaatggtcgcccgacgggaaatggtttgtgcttgaagtaataggcaatgggcatgatccgtattccgatgtcgcaattgtggctgccgacggcaagagcaagcccgtcaatctgacaggcagcggatatttcaacatgcaaccgcgttgggtgctcgatggcaatgccgtgctgttcttgtccgatcgttacggaatgcgaagccatgggtcgtggggttcgctcaacgatgtgatgctggcattcatgaataaagacgcttacgacaaatatcgattgaacaaagaggattacgaacttttgaaagaccttgaaaaagagcaagagaaggacaaatccgaggaagagaaatcggacgacaagaagtcggacacaaaggaagaaaatgattcgatcattgttgttgaattagacggcatagaagacagaatcgtgcgtgtcactcccaattcatctgatattgccgatgctgtgatagccaacgatggcgaaagcctgtactacctttctgcctttgaagaaggctacgacctttgggaattggatttgcgcgagcatagcacctctcttttgaaaaaactgaataccggctgggcaagcctgcaaaccgacaaggaagccgacaatttgttcatacttggcggacggacgatgcagaaaatgtcggtggtgggaagcacgttggagccgatttcatatagtgcggaaatgaagatggatttggcgaaagaacgcgaatacatgttcgaccatgtgtgccgtcaagaagcgcgccatttctatcgcacagacatgcatggcgtggattggcagaagatgacggctgcttatcgtaaattcttgccgcatatcggcaacaatgcagattttgcagaaatgttgagcgaaatgctgggcgagttgaacgtgtcgcataccggcggccgttactataagagcggttcgggagaatcgacggcaaatcttggattgttgtttgatttgagctattccggtaatgggatgcgcattgcggaaatcattgaaggcggtccgttcgacagggcaacgaccgatgcaaaagaaggcatcatcgtggagaaaatcaacggacgtgaaattttggcaaattccgatttctattcttatctcgaaggacttgccggagaaaaaacattggtgtcgttccgtgatccgtcgagcggaaaacagtgggacgaagtggttaagccgatttcttcccgcgcatgcagcgctttgctgtataagcgttgggtgaaacagcgtgccgaagacgtgaagcgttggtcgggcggccgcttggggtacgtgcatttggaatcgatggacgatgaaagtttccgcacgatatattccgatgtgctcggtaaatataacaagtgcgaaggcattgtcatagatacgcgtttcaatggcggcggacgtttgcatgaagacgtggaagtgttgtttagcggcgaaaaatatttgacgcaagtgcatcgcggacgtgaaacgtgcgacatgccgagccgtcgctggaacaaaccttcaattatggtgcagtgtgaagccaactattcgaatgcccacggtacgccatgggtttataagcacatgggtcttggaaaattggtcggtgcgcctgtccccggcacgatgacaagtgtttcgtgggaaactttgcaagatccggaattggtgtttggcactccggtgattggttatcgcacagccgatggcaattatttggaaaatacgcaattggagccggatgtttatgtgctgaacacgccggaagagattgtcaatggcgaggacgcgcaattgaaagcggcggtggaagaattgctgaaagaaatagattccgccactcgctgacagataagcgaatagaaacgaatcaaagccggcaacaattcgccggctttgatttttttgtgcaggggcggatgttttttttgattacttgcgtttttatgtgcatggttgtgtaatcactcaaacatattatctttgttttttaatcgttatggaaaaagagccgtttgttttggaaacaccaaggttgctattgagaaaaatgcgtctttccgatattgatgcattgtctgccattatacaagatgagagggtgatgtatgcttacaatggcgcatttaatgatgaagaaacagccatgtggctggaaaggcaacttcaacggtatgaaa

SEQ ID NO: 1123 - DNA, 24533 bp, synthetic construct
  source 1..24533: mol_type = other DNA
  misc_feature 1..24533: note = Synthetic
accttgctgatcgtagatactcagcatggaattcaccatgtcgggcactaactgaggttggagaatggtaagcaacggatggagagtgcggtacgtatcccacaacgaaaacgtagaatagttagtccaatagtcggccttgtagattttatcatcgtgcccacggaactctccgttcacatcggcatacagtgtcggagcaatgaacatgtgatacaaactggtataaaaaatcttcttgccacgttcgtcaccactctctacgttcacacacgacagcatgcgattccaacgtttttcggcatccgaacgaaccttctcaaagttccattcaggttgttccgctttcagattagccagagcattggcacaactgacggatgaaagggccaccttgagctgcaccttcttcggattgttccgaaaggtcagtacccctttcaccgcttcgccggaaaggctatctgatccgacagccgcatcatcgtcaaatacggccacactctcaatcggttgatcggacttcagcacaaaaaataccttgtgctgcggactccatcccttggaaaagcggtatccctcaaccgtatattcatccgtccgtttcaacgcagtcgcaaaagcacggtcgccgttgccttcctttaagttcaccaacagccggggtgttccttcggggtaagtataacgatgaatggcaacacggtcggtagccgtcagttcggcacgcacgccattatccatcagcaatgaataataaccgggagcaacttcttcgttctcgtgcgagtaataggtcgaacaggctcccttgatgttatcctgttcgccacgggcagtacggacatcgcctacataaggcatcagaagcacatcgcccaagtcggcacatccagtaccgctgaggtgcgtatgactgaatcctatcagtacactgtccgagtaatgatagcccgaacaccaatcccaacctttatgaatgttctgcggccccacctgcaccatgcccaaggggacactggcacctacaaatacatgtccgtgcccacccgagccgatataaggatctacgtaacggaggtaatcggcaccagccatactgttttctttttgcaaaacgcatgcggacggcagcacagccagcagtccacacagcaatatacctatagtaaatgaaagtattctcatggcattatgtttgtttgaaagtttattcgttacagactgttcaataaatccagcttcccgtcattgattaacttgatgatcaactcaccgaacagtgtgttctgccaggcaaaccatttacgggtgaacttttcaggattgtccttatggaaagattcgtgcatgaaaccggtaccggcatcagttgtcatcagcatacggatacactgtttgatttcctcgtcgtcctgactggtgaaagctttcatcatgatgctcatgggccacaccatatcgtatccgatatgcggtcctccaatgccttcgcctgcctttcccctgaagaaataaggattgtcctcgctccagacaaagcggcgtgtattctgatagacgggatcgttgatatcgacatctcccagatagggcaaagccaacaggctgggaacattggcatcgtccatcagcatgcagctgccataaccgtctacctcgtaagcatagattgtaccatatttaggatgctcgcaggtggcatattttttcagagcctgctctacttcattggccagatccgtgcattgatgtgccagttccccattcttgttcacttccgtcagaatctcggccgctttccgcaaagaagtcacggcaaagaaattggacggaatgaggaaaggcagggtcgtagcatcgtccgacgggcggaaaatggagactatcaggccaaccggattggcaggggctccccaaccgtcgttgatggtagtatcggtagcacgttcggttttgcgctggaaacggtaaggtcccctatcctctttacgttgctgttccttaaaagtacggagtacgttaccgatagccttcagccagttttcatcgaaaatactggcatcgcccgtcactttccaatagtgataggcaagccgcaacggatagcataaagagtctatctcccatttgcgctcgtgcagttcgggcttcatgtcagtacggtcggtctcccactgactgcccttgggaccgtcattgaaagcattggcgtaaggatcctgattaatgcacagaaactgacggcgaatgactccttcgagcatcgccttcaattgaggatcatcgttggcaaactgtacgtaaggccatacctgtgcacccgagtcgcgcagccacatggcatggatgtcgcccgtatagacaaaagtgtccggtttaccgtccagcatacggaagtgcacggtggtatccagtgtatttgggaaacagttctcgaacatccaggccagataaggattcttcagcaacgcttttatttccgcaattttcttttcgatgatatccgactgaaacagacgctcctccggcttgggacgttggctgatatagcgaccaacgttatcgttcggtgccgtaaaagattcttccggaatttgttcaacggggcgggacatcccgtaacggttttcggctgcagcagtgcccgacaccagtcccgacagcatcagggcggcagccagtagtttttggttcatcatatattctatttacttatcttacttaagtttcgcaagtctcaacttattagttgacaaggcttcagttaacaagtctactaggctggaactcccggtttgacaaagtgttgcttgaaacggcttgctacaaacgccttgttaactcgtcaacttgttgcttgtcaactgcaacttgagcttgcgaattgaaaatcgacgaagtcaaagttgaattatcttacttaactacaatttcatcggtaaacagccagcccatcacctcccgattcatgaatccctggaaacggacatatcgtacttttgcattgccttcccaccgatagttgcggaaggtaagccgttcctcggtaacagggacgtcggtcgcaatgcgcttcacctcttcgaagtggagcccatcctcggacaaagaaatcacgacctccttcggaagccatacttcaggaccacgcagttgcagaaagtccgcttccaccagcctgatatccgtcagtctgcccagatcgatggttacgtccacatccttacacaggaaaccttgccagcgacggtcgccatacgtccagcctccacgccatccatcagtcagcgtagaatcgcccgaagccggataggccgatgagaaaggttgggcatacgtcaccggacaatgcaaggcaagatgttcgaccggctgcaaagactccggacgctcgcccacttctttctttaagtcgaaaggatgatagtcctgcgactgcaaccattccgtttccttcaagacggatttccggaaacgggtccagtctttccgttccggctctgtccacgccacttcggccaaggccagcaagcgcggataaatcatatattcggcatgttcggcagtgggaatatactcagtccagacattagcctgtactcctttaatgaaccgacgctgctcactgctcagttcggcaggaactggattgtaggaatatactttctccaaagtcagataaccgccaatcgcttcgggctgtgaaacaggagcatcctgataggcgtccaaatagcaaaactcgccgggagtcatgacaacatcgtggccagccttggtagccgtaatgcctccctgctcgccccgccacgacattactgtagcactcggagccagcccaccttccagaatctcgtcccatcctatcagtttacggccgtgactgttcaggaacttctctacgcgatgaatcagatagctttgcaattctttctcgtctttcagtccttccttacggatacggttctgacacttcgggcacttctcccaactgcttttggctgcttcatccccaccgatatgaatatactccgaagggaaaagctccatcacttccagcaacacgttctccagaaaagtaaatgtttcttcgttgccaatgcatagttcaccgttctgataaggcttgcccgagcaggacaactgaggaaagacggccagtacttcttccgagtgtccaggcatctcgatttccggaatgacggtaatgtgcagtttgcgtgcatgttccacaatctcgcgtacgtcgtcttgcgtataatatccaccttcggcatcggcctcatcccgacggcaatatttacgtcctcccctccaccaggctttccagttgggataaggacgataggcagtctgttccgtcagctgaggataacgtttgatttccagacgccagcccgcaccgtcggtcaggtgccagtggaaacggttcagcttgtaacgggccatggcgtcgagctgcttcatcacaaactccttcgaacggaagtgacgagatacgtcaagatgcagaccacggtaatcgaaacgtggatagtcactgatatctacataaggtaaactccaactaccttcttcaggcccttcctctgccagttgcaacagggattgaaaggcatagaaaagtcctgtcgcagtaacagcctcaacatgtaccccgccgcggcctacagctaaggtatacccttcggcagaagctatacccggaatagaatctgtcagttcgaaacagaaaggtgcccgctcatcctccgacatctgcagcctgaacggggaagctccaagcacagcagccagatcggagcgttcagttcctttcagattggtagtaaactgtcctccaaaagaaaatgtgtacataccagaatgtaccttatacatctgaggttgaggaatgagggctaacggggaagtggacacacgcccacatccgacagccaatgccatcaagacagtcaaaagggaaatcaaacggattttcatagcctaaaagtattaaatcttcttcggccgcctaaattagcaaaaatatttttaaatcaaagatttaaccgacaaagaaaaacaaagccaccggaaacagctccgtccccgtctaatacagattacctaactttgtccggtagctggcagcaacgctctgctgaaccgacaatggaaactcatcgttccaaacagatttctgcatagcggtatcggacaactcagcccaatgggaagcgggcaaagaatagttaccatagaccggcaaagccacaggagccttacccgacctgcgggaaatataaagagctccccccacaacaagcaacaacgccatgccggcagccaagatccggtaacgcctcaagaagacagacttttcctgcacactgcaggacacctccaatgccgaagcataacgttctgccggcttacgacgcgtacatctccgcgaaacagcagccagttttttgtcctccaggatttcggccatctcgccaatgattatgcccaacgaataaatatcggcacgcaggtcaagaggctgtccaggtttcagggcttcaggagccaagtaatagcgggtaccggcaggaagctttaacgcatcgtaatcgtcacagtcggacaagccgaaatcgatcaattttacattatgaccattatgagtcaccagtatattttccggtttcaagtctcggtgtacaatctgtttcccgtgcagataatgaagcgcactgcaaagttcggttataaacttacgcgccagttccggtgtcagcagaccacgctgcataacttccttcagcgtaattccgtcaatgtactccagcacaatgcaatgtcccagctccggtaaggtttcccagcctaaggctctgcagatatgagggtgctccagttgataaccgatatcgaattctttccgcaacgcctgttcatagaaatcgctgccaatgtattcgggcttcaacgctttcaaaatatgcaagcgattataacgctgacaacggaacagacgtgcataacccgacacggacacatacacctccgtcagattcgaaaagctctgttcgcccgactgaacgtcagcatcgataaatccggacgaaacttcattctctgccattggccagcccatttaataatgtcaatccaccgttacgccctgcgatgaaaggcgaaagcttcacaccgtcgcgcaatacgtaaggcaggaaaagcggttgtcccatcaggaaagagactgcttcgaaacggtcacccaccaacaatttagactgccgggcttcctttacttcgaacaaatcgcctccttcgtagtacagacgcagataacgattaggcgaccatccgatctccaactccgaaccgggtgacaactcgcgggtcacgatctgatgagccgagaaaaacgatgaattataaaccggactattcttcagccatgcgcaaaactgcttgaaattggaatgccccacatagcgtgccaaaacatccaatgtacgcatacgaggcaaatgagaatcacccacatacccccacaaacgtttcaaggtagatgtcgagaccaaatcgtccacctgctgcttcagatgtagagaaaactcatcgaaatcggtcgaagtctgcaacggcttctgatatgtcttctccacctgtaataacaattctgcaatttccggtttatatatattcatttttgtcttgcattatttaacgagacaaacttacggaaaaatcttcatttataacacctccacaacaaaaaatgccaattaaaagttgaatgtgcatctgttaaatctgcgtcattgagctgtctttctctgttttgtctcccaaaaaatcttatctttgcacacaccgaaaccgtgcgacaaaggcagttataccgccggtcggcacgaagcccgacgaaatcaaaccaatactataacaatatgaaacatctaaatcttttgcttatggcagcaaccatgacgtgtggagcatgcggaagtatccaaaacagcgatacaccggatgcagaagacctcatccagcgttcggacatccgtatcgaaaaccgccgtatgacacccgaagccctgtgggccatgggacgcatcggaagcgtagcaccctcgcccgacggtaagcagatagcctatgccgtcacttactacagcgtaccgcaaaacaagagtaacagcgaactgtttgtcatgaacgccgacggcagcgccaacacacaaatcacccatagtgccatgcgcgaaaaccaacccgcctggataaaaggcggtcaaaaactggcctacctcagcaccgaaagcggaagcagccaggtatgggaaatgaatcccgacggaagcggaaagcaacaactgaccaactacgatggcgatatagaaggtttctccttcagccccgacggtaaaaagctgcttttcattgcccaggtgaaaacagtgcaaagcaccaaagacaaatatcccgacctggataagacaacaggtatcatcgtcaccgacctcatgtacaagcattgggacgaatgggtaaccactgccccacatcccttcgtagccgacttcgacggttcgtccatcagcaacgtgacagacatcctgcaaggcgaaccttacgaaagcccgatgaaaccttttggcggtatcgaacagctcgcctggagccccgacagcaaggaagtggcctatacctgccgtaagaagacaggactggaatatgccatttccaccaactcagacatctacatctacgacctggccagtaaacagacacgtaacatcaccgaagagaacaaaggatacgacaccaatccgcaatactctcccgacggcaaatacattgcctggcaaagcatggagcgcgacggctacgaggccgactggaaccgccttttcgtgatggaccgccagacgggcgagaaacgtttcctgagcaagggcttcccctcgaacgtggatgctttcttatggaacagcgattcgcagagcatcttcttcaccggtgtgtggcacggtatgactcctatctataacgtaagtctgaagccggacggctggatttaccagctgaccaacggcctgtacgactacggcagcatcgccctgtgcggcaaggacctcatcgccacccgccactccatgagcgaaggcgacgaaatctatgccattaccgacctggacagcaagcctttcccagtaagcttcttcatggagggcggcccggagcggttcagcagcacggacagcatccgtcccgactaccccgtcaagcaactcacccacgaaaaccagcacatctacgaccaactggacatgggccgcgtagagggacgctggatgaagaccaccgacggcaaacagatgctgacatgggtcatctatccgcccaagttcgatcctaacaagaaatatcccaccctgctgttctgcgaaggcggaccgcaaagccccgtcagccagttctggagctaccgctggaacttccagatcatggcagccaacgattacatcatcgtagcccccaaccgtcgcggcttgccgggattcggcgtcgaatggaacgaagccatcagcggcgattacggtggtcagtgcatgaaggactactttaccgctatcgacgaaatggccaaagagccgtttgtcgacaaggaccgtttaggatgcgtaggagccagcttcggaggattctccgtctattggttggccggccaccacgacaaacgcttcaaagccttcattgcccacgacggcatcttcaacatggaaatgcaatacttagagacagaagaaaaatggtttgctaactgggatatgggcggcgcatactgggaaaaagacaacgccacagctcagcgtacctttgccaattcgcctcataaatttgttgacaagtgggacacgcctatcctctgcatccatggcgaaaaagactgccgcattctggccaatcaggccatggctgccttcgatgccgccaagatgcgtggcgtaccagccgaacttcttatctatcccgacgaaaatcactgggtgctgaaaccacagaacggtgtgctgtggcagcgcgtattcttcgaatggctggatagatggttgaagaaatgataatgaattatgaatatagaattctgttcaaaatccataactaacttttaacattccaactgctttcttcccttgatgaaagcagacataaacctataacggttattcaacatacaaagtccctctttagaaaactaaagagggactttacgttcgtatatggctatcaatattgcatagctttttatcctgcatcatattgttttcacaacagcattgctttccctatcacacaatacagcttgtgctttccccctacattttatcctttttcaccgaaaatgccttcacgctttcacctccttacaaatggctcgttataaggagtttccggtgaaagctatgtttcaaaaacaatttcacctttctaattcaggaaaacacaactatttgcgaatacccaacaattgtgaaaggtatgtttcactatattcttctgtttatcaatgcaatgaaagcaataaagcggtaaaagtaatttcaggaaacaaagttcaaagagcggtgaaacttatacgttctctttcagacaacaactaatcacctttcaccgacatcatatggatattttcactcacttgcaaggctaacgaaccacacaagtgtcccacgcgagaaacataagtgcggctcgtcttccacactggtgtctctcgcgagccgtacaagtgcggaagagaacgcgtagatgcaatcactatttcaacccaaacaggcagaaataaaaaatcccccgttaaaggacgagggaacctaatgttttcacaacggaataatccttattgtgagttgcttcaaattagtatggcaaatatacaaagaaaaaagcatttagcaagtgatttctcatttatttttgtagatttgtggcagatataaagatttccattaccatgaaaagaatattagggttagatttaggtaccaatagtattggttgggcaataataaataagtctttcgataatgagggtaacgaattgctatgcggtatagaagcagcaggtagtaggattatcccaatggatgctactattttaggagatttcaataaaggtaacaaagtttctcagacaaaaaacagaacacaggctagaagcgtcagacgtatgtacgaaagacagcatctaagacgcgaaagactccatcgggtactatctgtgttaggattcttgcctcctcactattcacaacaattagatcgttatggtaaatttttgcctgataaagagcccaaattggcatggtatataaacgatgctggtaaatcacattttttgtttcaagactctttccaagagatgctagatgtatttagaaaatacaatccatctgtcattattggatctcataaagtaccctatgattggactatttattatctaagaaaaaaagcgttatgcaaaaagattaaaaaagaagagttagcttggattttactaaactttaatcagaaaagaggatattttcaattacgcgatgaagaagaagaacaagtttctaccaaaactcgacaatatttcgatcgccagcaagtggttgatattatagatactcaagaagtgtataaaggattgaaaatcatacaggttgtgctggctaatggtactcaagggaaaatcttcaaaaaagaaattcctgattggatcggacaaataaaagatattattgtaactgttgatatagacaaggatggaaaagataaatatgatgaggacggctctctttcatgtcgttttaaagtcccttctgaaaccgaatgggaaacagaatggaaattaattaaagaaaaaacacagcatgatttagaggcatctggtaaaagcgtaggtgaatatatattcgataccctccttcacaatccgacgcagaaaattcgcggaaagctggtccgtaccattgaacgaaaatattacaaggaagaactatatcggatattgtcgaaacaaaaggaattccatgacgaactaaatgataagcaactctatgaaagatgtctggaagaactatatcccaacaatccggctcataaaaatctaatggcaacacatgatttgccttactttttaataaatgatgttttattttatcaacgtccgttgaaaagtaagaagtcattaatagataattgttcctttgaaggacatgaatatatagatagagaaacaaatgaacgcaaattttcgccaataaaatgtattgcaaagtctcatcctttatttcaagaattcagattgtggcaatttgtttcaaatcttcgtatttaccaaaaggaaaaggaaattgacggacgcttgatgacagatgtagatgtcacgcaagagtttctacgtgacgaagaagactatgttgccttattcgactggctgaatgggaagaaagaaatcaagcaagaacaatttttgaaatatccgacatttggcttaaagaaaaaagcgaaccaatacagatggaattatgttgaagacaagccttattgctgtaacgaaacacgttctctaatgttggttcgtttagaacaagctggtattccgcttacatttctgactcgcgaacgcgagaaagctttgtggcatattttatattctgtatcgaacaaacaggaactaaagcaagctcttgcatcttttgctggcaaaaatggtttaaacaagaactttgtcgaaatatttgtcaatacaccagcattcgaaaagtcttatggatcatattctgctaaggctattaaaaaattacttcctttaatgcgtatgggacattactggaaagaagaaaacatagatgtgcacacactcgaaagaatcaataaaattctgtcaggagaatacgatgaaaatatcaagaatcgagtccgggaaaaagctatccatttggaagatttatcttctttcaggggacttcctctgtggcttgcaagttatattgtttatgaccgtcattcggaagtgaaagaagcctgtcaatggaaatccccccaagatattgatgaatatctaaaagcgtttaaacagtattctttgcgtaacccgattgtggaacaggtcgttctggaaactttgcgtaccgttcgtgatatttggaaacaaatagggacaattgatgaaattcatgtagagttaggacgtgaaatgaaaaatccagctgagaaacgtaagaaaatggctcagaaaatgctagaaaaagagaataccaatctgcgtatcaaatccttacttgttgagttcatgaaccccgaattgggcatagagaacgtccgtccttattctccttctcagcaggatttgttacgtatctatgaagaaggcgcatggaatgcttcaaacgctgatgataaaatgcacgatgaaatgctgagtattctgaagaaattcaatgagtcggacagcaaaaaaaggcctacttcttctgatatcaaacgctatcgactttggttggagcagaaatacagatcaccctatacaggtgcagtcattccattaagcaaattattcactcctgcctaccagattgagcatgtcatccctaaagccctttattttgacgattcgttcagtaataaagtgatctgtgagtctgaagtgaacaaacttaaagataaacagctaggctatgaattcattaagaaacatcatggtgaaaaagttcaattgtcgttaggcggtgtagtcgaaattttttcagtagatgcctatgaacaatttataaaagaaaactattcacagaatagtgccaagatgaagaaacttttaatggacgagataccagaacaatttacagaacgccaaatgaacgacagccgatatatcagtaagttagttgtatcattgttgtcgaacatcgtccgtaatgaagaagaacaagaagctcagtcaaagaatgtcgtagtatgtacaggtggagtgaccgacagattaaagaaagattggggagtgaacgacgtgtggaataaaatcattctgccgcgatttgaacgtatgaatcaacaaacaggaacctccgattttacgtcggtcaatagcaatgggcatacaatacctgccatgccccttgatttacaaaaagggttcaacaaaaagcgtattgatcacagacaccatgcgatggatgccatagtaatagcatgtgcgagcaggaacatagtcaactatctgaataatcaatcggcaggagaacacgggaagatatcccgctatgatttacaacatctgctgtgcaccaaggtgcaagatggcaatgggtatcagtgggttattaataaaccttggaaaacatttacccaagatgtatatgaaacgctgagaaacgtgattgtcagcttcaaacagaatttgcgtgtcattaacaaaacaagtaattactatcagcggaaagaaaatggaagaacgattctttccaaacaggataagggagataattgggcaattcggaaatcgctacataaagaaactgtttttggagaagtaaatttacgtaaaacaggtagtacttctttaaaggttgttcttactaacccgaaagtagttgttgacaaagatttaaaaaagaaactaatagaactcatacaacaaggatttaacgaaaaacaaataaagaattattttaaagaacataaagacagttggcaggatgtaaatctaaaaaaaattcctgtgtattttttcacaaaagatacccaagaacattattttgcttcccgaaaacttttagatgacactttcaaacaagattcaattaaagaaagtattacagatacaggaatacaaactattttgttgaagcatctgaaagaagaaggtaatgaccctaaagttgctttttcaccagaaggaatagagcgtatgaacaaaaatatagtgcatttaaacaatggacatcaacatcagccaatttataaagtacgaaaatatgaaaaaggtgacaagtttgcagtgggtgcaagaggcaacaaatcctcaaagtttgtagaggctgctaaaggcacaaatttgttctttgcaatctatgaacaggaacaagtcgaaaaaagcaatggtgaggtagtgaagaagcgcacatttgccacaattccactgaatgtagttatcagtcggcaaaaacagggcaaatcttctgcacctgctgacgaaaatggaaatttgcctttattcgttctttcacccaacgatttggtgtatgtgccaaccagagaagagctaaagaatggacaattacctgacaatcctcatcctgatagaatttataaaatggtaagttctagtggtaaccaatgcttttttattcaatatggagtatctagtatgttatgggacaaaaatgaattttctgctcttaataagatggaaagagctataacaggagaaatgattaaagaaatctgtattccattaaatattaaccgtttggggcatatcacttatagactataactatcatgataaaaaaaacgctatattttgggaatccagcttatttatccttacgcaatgggcagctggtaataaagctaccggaagttgaacgaaatggttcacttccggaagctatcaaacaacaaacggatgttacacgacctattgaggacatcggtgtagtggttctcgaccataaacaaataactattacttcgggtgctttggaaaccttactggaaaataattgtgctgtcatcacttgcgatagtaaaagtatgccagtaggattgatgttacctctttgtggcaacaccacacaaaatgaacgttttcgaaaacaactagaggcttcgttgccattaaaaaaacaaatgtggcagcaaaccattcaaaccaaaatccgtaatcaggcacaaatattagcgcaatgtacaggagagaaagcaaagtgtatgtttgtgtgggccaataatgttcggagcggtgatcctgataatttggaagcccgagctgccgcttattattggaaaacaatgtttgctgatgtagatggttttacacgcgatagagacggccttcctcccaacaatctattgaattatggatatgctattttgcgtgcagtcgtagctcgtggattagtatcgagcggattactcccgactttaggtattcatcaccacaacagatacaatgcttattgcctagcagatgatataatggaaccctatcgtccttatgttgaccgtctcgtttattctttatttaaagaaaaaggagaaaatgtaattatggacaaagctgttaaaacagtcttgcttaccatcccaactttagatgttcatattggtggcaaacgtagtccattaatggtagctgttgggcaaaccactgcatccttatataaatgctttgcaggggaattaagacgtatccaatatcccgaagaagattaatggaacgctttagcgaatatagagtaatgtgggtattagtattttttgacttaccaacggatacaaagaaagagagaaaagcagcgtccgatttcagaaaaatgcttcagcgtgatgggttcaccatgtttcagttctccatttatgtccgacattgtgccagtagcgaaaatgccgatgtacatattaaaagagtccaatcctttcttcctcaattaggtcaggtgggtatcttatgtattacagataaacagttttcccaaattaagattttttatgggaaaaagactgtagagcctaatgctccaggacagcaattagagctattctaaaaaagtaaatcctactatttgtaggatttacttcaaagaaacagcatttttacaaattctagctatactcataaatccctgatttactagtcgttgcatacattgagctgttctttatggttcaaagatactaatttgaaagcaaatcacaacattgtgtctaaattaggggtggggtattggctgttctttatggttcaaagatactaatttgaaagcaaatcacaacgataggactaattcatccctgtacttgtaagctgttctttatggttcaaagatactaatttgaaagcaaatcacaacacgtattcgttcgcgtataacagactttatgctgttctttatggttcaaagatactaatttgaaagcaaatcacaactcagaagagcgaagcatgatttcaccagatgctgttctttatggttcaaagatactaatttgaaagcaaatcacaacagggtttagaatgatactcgaaaatccttcgctgttctttatggttcaaagatactaatttgaaagcaaatcacaacatactcttgattgttccgtccgcttccgttgctgttctttatggttcaaagatactaaaactcgcccacatacggatcgattttggagaaataatgcaaactgttggaaatgaaaggtgatgtgcggttgtattccgtatccgtcattggggcacatttgccattttttgaggggttaagaaaataaatcgctacctatccgttgcctttttcagattgggaaaaccgtgcgaaacgggcttccgattcctctgtcatatcaccgtaaagaacgctgttcctgcatattttgcgttagcgaagatagccattttttcgcaaagcagaaaaaatacgggccggttctttcgagcatgggacttgtttccatattctgccatattcgtcatgcctttcatttggcttttatccggtaattttgcaacgaaaggaaaagagtatgaatcagacgaatgtaaaggtttcgttctacctgaaaaagagcgaggcggatgctgacgggaattgccccgtgatggcaaagttgaacatcggaaaatattccgaagcggcattcagtgtgaagatgaaagtcccccagtcccgttgggcttcgggacgcgcgtccggcaagagtgtggcggcaaaggaaatcaacaacagtctggatgaaatccgtgcaatggcattgagcatttatgcggacttgtcggctgtccgcgacggggtgacagccgatgaggtgaaaaaactattgctcggaatggcttgcggacaggaaacgctcctgggctatttcaggcaattcatcagtaattttgaaaagcgcgtaggagtcagccgcacggaaggcagcctgagggcgtaccgtaatgcctacaaccatatcgaaagattcctgcattggcaatacaggctgtctgacatatcgtttgccgcattggaccgttccttcatcgacaaatacgacttgtacctgcggacagagcgcaatctcgcacccagaaccatcatcaacctgaccgtccaattgaagactgtcgtgggcgaagccatagcggagggcatcatcaccacttatccgtttggcggatatgagccggtacacccgaaagccgtgcagaagtatcttacggcagaggaactgcggcggattatgacgaccccgcttcatagaaagaccctctaccatgtacgtgacctgttcctgttttcctgctacaccggcattccatacggggacatgcgccggctgacaaaggacaacctttcatgtgctgaagatggcacatggtggatcaagagcgccaggaagaagaccaaggtggaatttgagatacccttattggagttgccgctgcatatcctgcaaaagtatcgtgatgccgctcctggtgacaagttgctgccggtgtactgcaattccatgctgaacctttacctgaaagagattgcccggatttgccgcatcgaccgtccgctcgtattccatcaggcccggcatacatacgctacagaaattacgctctcccatggagttccccttgaaactgtcagtagaatgctcggccacagccgtatcgaaaccacgcagatttatgcgaaagtgactgatgacaagataaactccgatacaaaagccttgaaccggaaaatattggaacgcttttctgtcatcatttgacgaacccttaaaagcaatgatatggaaaagaatacaggcaatcagaacaccaaacgccgcagcacctttgcggtattgttctatatcaaccgcaccaaggtgcgcaaggatgggatgtgccagctgctatgcaaggtcagcatagatgcggaatgggaacaaatcgggacgaaagtttctgtcaatcccgccatctggaatccggaaaagggacgggcggacggacggagcgagaatgcacttaccgtgaaccgtgccatagacgacctgacgcatgagatttgcggacattacgaccggataaagaacagcctggggttcatcacggcggaactggtcaagaatgcggtcaagggcatcggacagaaaccgcttaccctgttggccctcttcagggagcataacgaggaattcaagaagcgtgtcgggatagaccgcatacaggagacatacgattcctacttgcgttcctacaaacacctttcggcattcatccgtgaaaagaagggtgtggaggacgtgacattgcgaagccttgaccgggcgttctatgacgatttcgagctgttcctgcgcactgaccacaacttgaagcccaagagcgtgcacgaacacctgtaccgcctgaagaagctcacgatgcgggctgtcagccaaggcacattgcgccgcgatccttattgccggctgcatcccgaactgcccaagaggaaaagccgccacatgaaactggaggatctcaagacattgatgaccacaccggtggagaaaccgcagttgcagttcgtaagggacatgttcatattctcgacgttcaccggactggcatatgcggatttgaaaaaactgtcaatcaatgatattgcccgggcagatgacggtacatggtggatacatctacacaggcagaagacagacacgctttcgtctgtccgcctgttggatattccactccggatcattgaaaagtaccgcagccaaagaacgggggataaagtattcaacgtgtactcccgtggatatttcattttattgacaagggaactgggagaggtttacggctttgacttgacctttcatcaggccaggcataatttcggcactcatatcaccctctcgctcggcgtaccgatagaaacagtcagccgcatgatgggacacacatccatttccaccacgcagatctatgcgcaggtgacagacacaaaagtggatgaagacatgaaaaggctgagagccaccggattttgggacaaaacaggcctttatgaggaggatttcactgccgggaaaaagtggaaaaggaattctgactctcagaaataagaaaacggagaaacagcctgcgatccggacaggttgtttctccgtttctgattatgaggaaggctatacccacctctgttcttcccggcacctcttgtaggcatcctccagaagtttctgtatgtcggattccttgtagagcacttttccttgaaggaggtaatatggaatgacaccgaatgtgcggtattcctgcaaggtgcgccggcttatcctgagtatgccggacagttcctcatccgtcaggaagcgttctcccttgaatatcggtttgggggtcttttccatgtcggacagcattctttccagattttccagcccttgaaaaaggacttcaatgtgagggtctttcttctctatgaaatggtaactcatggttttctttttatggggtgataacttgattccaacaggttctgcacgtcctccggcttgtagaacatcttgtgtttgatgcgcgtgaaaggcaggaggcccttgtcgcggtaaacctgcaatgtcttcttcgatatgtggagcacgtcgcagacatcctggttgtccatccagttcttcaagtctgtgtcctcctgtgaatggcacagccgcgccatccgtccttcaagttcgcagaaacgtgtccggaactcgtcaaaggtctttttgtctatacatattatttccatacatcatgtctgattaagattgaatacccaattcctttttgattcttgcgggcaacgcctttcctttccggttcaggaactcctgcacctcggaagccttgtaataggtacgcccgtcaatcatatagtaggtcacgagcttcttctggcggtaacgcgcaagggtgcgcttggtcacgccgagcagctcgcacatgtcctggttgtcgagcagcttgtcgccttcaagggcggccgtctgccggttcatacggctcagcctgtcctcgattctgtcgaagcgttccataatctggtggagcatcatctggaatgtctcccggtctatctgtatcatactgaattctgtttttagtgcgtgaatacttcgtttaccgcactgttgcgcaacaggcttcggtataataaaggccaaatcatagaccaacgcggcagtttatcctttcataagcagataaaatactgaaaaccatagaaataaaaaatcagcctccgtttcggaaggctgacgggcatattgcaaatgcaatcttttgcaatggtctattgcaacatcctgcaataattcaggcggcacacgccgttccggaaagtcttggacttgacaagccgccagttgcccgacgggaggtgggcggaaacggataaaggggaagcgcagaccgtagggataagaaagattacaagttcgtcaatgagccggtatatcgacagccctctcaagagttccacgctttcctcatcgtatatttccgcatggaagacagtggaagacccggaagtgtctttctcgcaaataaggtcaaccagcggataaccgggaaataagtgtctggtggaatgttcccgccagtacgggaagcccatcctgtccgattttacccattccatcaacggttcgccttccgacgggatgttcccgtccaatgtcattgctatcactgcctgtaaccttgccatagtcctacccttaatgagaaatagcgtgaaatccacgcattatcaggtagaggctctggcaagcccaaaaacagatctgcatggactcacgctatagggtatagcataagcctcacgcaaaagcctctgtttttgaaattttgccagatttctacctgagacgtcttgcgacttatgtatgataaccggcaggactccggtccttgccgtcatcagttcagtatgttgcggccggaacttatgcggcgcacagttttccgacctctgtgcaaaagtaggcattttctttcattctgtaatgccttttgctcctatatcttgcgcccgacaatgaaaaacatgccgttcatttgtcaagcaggtagtattttttcattttccggtacagggtggacgggtcgatatgcagcatctccgccgccttcctgcggtgtcctccgcttgcctttaacgctttcagtatggatagtttctcttccgcttccgtttccgggaacaggttgattccaccgtccgtgtcgtccgtccggatattcagttccgccgcttcaatcaccggttgccgtgccattagcaccgccctcttgaccttgttctgcaattcgcgcacgtttcccggccaccggtaggaaagcatcagccgcgcggcttcaggagtgaacccttccgcttgtttcttgagttccttggaaaatttctccctgaaatgctccgcaagcggaaggatgtcttccgggcattcatgcagcgacggcatgactatctcaaactcgcacagcctgtggtacaggtcctcacggaaacgcttttccctgatggccagctgcaaatcctcattcgtggcggccactatacgcatgtcggccttcctttccctgccgctgccgatcggaagataggtcccttcctgaaggacacgcagcagcatggcctgcacttccggagacagcgtgcctatttcgtcaaggaacagtgtgccgcccctggccaggtcgaaatagccctccttgttcccgtccgcaccggtgaaagtccctttcacatgtccgaaaaagagggtcggtgccagttctttgggaatcacggcgcagttgacggccaccaacggctgttcacggcggtcgctggaataatggatgcgctgggcgacggattccttcccggctccgttcggcccgaggataagcacggatatgtcaaatggggcgacagtccgcgcaagattctccacctcaagcatcttcgggctgttcctgtggaaaaggtccttgtccttgccatagaccagggctttggggcgcagtatgtccttgatcaactcaaggagttcttccatctgcacgggtttcgctagataatcttttgcgccgaacttgatggccttcaccgcgtcaggcacggaggcatagccggtcatgacgatgaaaggaatatctatcttttccttgtgcatccattcgagcagggatatgccgtctccttccggaagacgcacgtctgcaaggatcagttcaaagtgttccgattttatccgctttctggcacccggttcgtctattgtagtatgaacctcgtagccggacttctcaagccactttttctgctgaccggccagcatgatgttgtcttctacgataagtattctatgcttcatatattaatttctttattgttcattttccgtttccgacaataacctttcggcttcagcaatcagcccgcatatacgggcgatagtttcttccgtatacctttgaatcatatcctcgtcagaatcatcatgtagaacctcgctgtacctttcaagttcatgggaaatacccagctgttcccataccggatacatgcggtggagcgtttccctcatccgccctaaattcatttcaatgtccgaaagggattcctgaagctccgccttgttcttatgggactcttcaatgaatgtctccagaagccatttcctgtcctcaatgtcggctgccagtgtggaaaagtctgctgaaagtggctgcgttgttttctcctttcccataatggaagacatgaatgtcagcagttcgtttattgaaaacggtttgcgtatgcatccggcaaatcctgcgtccgtatagcggcatccgtccccgtcattccgggctgtcattgccgcgaccgggacggtccttgaatcacctatattggagtgccgcaacaggtatagcaggtcgaagcctccagtaccacgcatctgtatgtctgtcagaatgatgtcataatgtgtccggcgaagttcattcaccacggcctgggcactctggcatttgcagcagaacacgccgtttctttccagcatttccccgatgatgcacaactgtatcgggtcgtcatcgacgacaagaacttttcgtggaagagcaagcctgccttctgttggaacagcggtggctttcaccggctcgtccgtcctggggagaggaatccgtatttcgaaggaggtaccttctcccaaacgactggatacggaaatttctcctttgagcaggctgacaagtcccttagttatcgctagaccaagtccgaacccttcggcatccatttccggtgccgcgcgttcaaaaggccgaaatatccgttccatggatttttcatccatgcctatgcccgtgtcctgtatcctgacagtcaacatatctttttcatacgatgcgaaaaagttgattgagccggatcttgtgaacttgattgcgtttgacagcaggttgtcaatgacctgttccatccggtcggcatcaccggaaaccgtgatgtccggaacatttatattcttggaaaagagcagccccttgtcattggcaggccgcgtatattcttccgctatgctttcgaggaaggaatcgagacggaaaggaacaggattcaagatttccttggcctcgtcaagacgtgacagatcaagcaggctgttggcaagccggaggatatgccgtgatgactcaaggatgttctcaatgtgtgcattgcgccgcttcctgtcctttgtatccaaagccagttccgcactgccgctgatggcgttcaaaggaccacgtatgtcatgcgagagtgtcactatgattttcttgcgtatgtcggacagactgcggttctgagccagagtatcctccagactattcctatcatgttcccgacgccggagatcgcgcatgatgataaggtgcgaaatgatgagcaggagtatggccgctcctacgagtccggctatgagacggaaggaatgtctttgcgcctcggcgagtttctgttcccgatattggaaagaggtctgtgcttgcccgtcaagttgggtaatgaatgaggtgagccttgtgttcagttcctgattgtagaaccgaagactgtcggtgtaggtgtcgagatcgcggatgcgcttctcttgcagggatataagccgttcgttcagagaatgaagaggtgcggcgggaaccggaattgtcaccgtatcctttttgccgaaccatccggctatgcctttctttctcctgatttctgtcctggtatgggtggcctgtgaggtcactttcggcagctgctccgcta

SEQ ID NO: 1124 - DNA, 24533 bp, synthetic construct
  source 1..24533: mol_type = other DNA
  misc_feature 1..24533: note = Synthetic
tgatggcaggggtaatacggatctgttgcccggcgattttatctataaagacgtaaataatgacggtattatcaattctcttgatgagaggccgataggttatgctttaggtgcccagccatatatcagttatggattgaatatcgggttgaattggaagaactggtctctcactgccgatttcgccggtgcaaccatgcagagttacaggagaaactgggaacttaagttcccattccagaacaacggcagcgcaccgcactatatgtttgaagaccgttggcacagggaagacccttacaatcccaatagcaattgggtctcgggaacgtatccggccatcaggcaaaacctgagaggtgatcacccgatctattggacaaatgacttttgggtaaccaatgtgaattatttccggttgaagaatgtggagttgggatatgtcctgcctaagaactggagtgaaaaaataggttcttcccatgtccgtttatatgtcaacggaacaaacatattctcattggataatgtagggagatttgaaatcgatccggaaatagcttcggaaaacggactggtttatccgcttcagaaaatgcttttattcggtgttaatctaacgttttaaaaataatcgtatgaaacgagcatgataactgttctcatccgagttcatcactaaatgcgagttccatacgacaccattgaaaataaataattttagtcgtatgaaaaaagatattcaatactatagcataatagctttattatctgttattcttgtatcgtgtcatggggattggcttgacaggaatcctaaaacgatcattatggaagaacaggtttggaacgatccgaagcaaatcgtgggtctgctggccaatttctataaccgattgccggtatttaccggactcgaaggcaattggagagatatgacaatgtttgatgacgctatgtggtccggttattcaggagaggagtggaggaatcagatgtcgtcttacgggaacaatctgggagaaatatgggattatggactggtacgtgatattaatctttcacttgaaggtattgacgaatatagtacagcactcagtgagagtgaaaaaaacctttacaaagcagaattgaggttcataagagcgtattattacttcgaaatggtaaggagaatgggaggaataccgctgattaccgaacaactggtatatgattttagtggcgatcctacttatttacaacatccccgggctacggaagcggctgtttatgaatttattgccaatgaaatggatgaaatcaaagatcaactcggcaatgaagggagtacgacgagagccaacgagtttattgcactcgcattgaagagcagggctatgctgtatgccgcatccttggcaaaatacaataaccttatggccgtgcccgttacaactcccggtggggaggtcgggataccggcttctaaaattgaggaatactacaatgcttctttagaggcttcgttggcaattattaattcagggaaatattcattatacagaggcaaccctcatttaggtgagaactattatgaaatctttgataagaaaacaggtaacaatgaagtgatttgggtaaaagattataaagcacccgataaaagacactggttttcttacgataatattgcccgcggattaagagaggataatctggcttcttcttgtgtaaccccatcgttgaatctggtggaaagctatccttatctcgacggaacagccggtacgctgaaaaacagaaccaatgataactccgattacatatattacgatgatctgtcggatatttatgccaataaagactggcgcttgtatggaactgttctcttctcgggagcatcgttcaaaggtttgtcggcaggtattcaggccggagtgaaagtctggaatggcacatcatacaatactgttgaaggggaagacatcggaacaatgtataccgatggtggagtattggtcggaaattcaggacctcaccgctccatgcaggaagtttccaatactggcttttatttgaggaaactcatccaatcaggggcagggacaagtacccgtggtattttgagcgataactggtggatacatttccgtcttgcagagatatacctgaatgccgcggaagctatgatggagctgggccttccggatgcggtcaggtacgtgaatgaattgagggaaagagcaggacatcctgctaacagtctttcggatttgaatttggatatcctgatgaatgagagacgaatagagttggcgtttgaagatcaccgctatttcgacctgaagagatggagaaaagcacatactgtttggaatggcgatgcaaataatcccaatacaatgatttatgccctttatccttaccgggtagtaggtggccctaatgatggaaaatatgtattcgataaaatgatcgcaccgcgtttcaggaatccgagatattttcaattggctaattactatacatttattcctcaacatgcaagggataataatcctaaaattgttccaaatccatttcaataaaaaaatgaaaacgatgaaaacgaaaatatttttgacaacatatatcagcgctattctccttctgctgctttttagttgtgagaaagataattttagtgctccggagtccatgttatccgggaaaataacttataacgacgaatcaataggtgtcaggtcaaacgccctgcaattagagttgtggcaacatggttatcagaatttcacgaaaattcccgtacatatcgatcaggatggaactttctccgccatgttgtttgatgggaattataaattagtccgtatgaacggggctccgtgggaaaacaatacagactctatagatgtggtagttaaaggaaatactgtagtggatgttcccgttgtcccttatttcacgataagtaatgctgcttattccagaaatgccaaacagataacagccacatttacggtcaacagggtaagtaatcagagagagttgagggcggttcgtcttttcctgggaagaactattattaccgataatgggtataatattgcgagtgcagaaaaaccggcatccgaagttacactcggtacagcggttacgttaaccgttactataccggattcccatactgaaaagttcctatatgcaagaataggagtggagacagagggtataggccaattattgtattctccttcggaaaaaattcaattggattgatgatgtagagaagattataaattaagtacttaaagggcatgagcaaggtaaattctacctgttcatgccctaaatttattattactctgatatttacacctattatctgtcataaattttgtacttttgtgcaaaagttaggttataagcattttatggttaaagcaatattttttgatattgacggtacattggtcagtttcaaaacacatcggatacccgattccgcccggaaatcgatcgagatgatcaggaataaggggattaaagtatttatcgccaccggcaggcactcttcagtgatcaataatctggacgacatggagttcgacggatatatcacgatgaatggatgttactgcctgcaaggtaacgataatgttatatttaaaaaaagtatcgaccaggcagatgtcaatagctttatcgattatatacaacagaaaagggaacttccctgcctctttgtagaagaacaccgtctttcttttaattatatcgatgaagatgtgaaatttctgatgagcctgttgaaacaggaaatgcctcagataaatgatcttgattattaccgggacaaggaattattccaattaacggcgtttttcaaagattctcaggaagaggaagtgatgagtctgttgccgaactgttcagctatgcgatggtatccgacttttgccgatgtcatagctaaaggggtggataaaggtgtcggaatagaccaattctgtaattattatggattctccctggaagagacgatggctttcggtgatggaggaaacgatattgaaatgcttcgtcatgcgggtataggcgtggcaatgggaaatgcaaaggaagagatcaaacaggcggcagattatgtgaccgacactgtcgatgatgatggtgtactaaaggcattacaacattttgggttggtgtaagatcgagtatctatcctatcgaaattaatcaagatactaaactatacaaacgactagttgtctatattataaaaaatgcctcgcagataggtgaggctctaaattacttaataatcataattcctcaaaataatcatgcgaaaactttgcaaaatgtaaagttttccatatatttgcatatatgaccagaagatcagtagaagataatgattataattgagagtcaaatactcgatgaatttgtagagaagcatgccgattgtcggaaagcagtccaaaactggattaataaagtggaagatgctgaatggaaatcgcataccgacttaaagatggactttccttctgccgattatgtgaaaaacggacgatatgtattcaatattcggggtaataaataccggttgatcgtggttgttgttttcgtagcaggtcaattaattgtccgttttataggtactcatgctgagtatgataaaattaatgcagaatctgtttaaaaaaggagatgagttatgaaaatgaaatatttagatctgaaagaaataaaggatttatctcaattcacagagataaaagcatattatgaagatatattgcagaaagctacggaaaccggagctctggaagtgcaggatgctgataatgaatatatcaaagaattagaccgtataggcaaaatagtatatgcgtatgaaaggttacattttcccgcgaagaatttgaagtttaaatctcctttgattatctcaatcgaaaatgaactcgacaagaggcaattaaaacaacgtcaagcggcagaactgttggatgtcaaagaatcaacattcagccaaattatgaaaggaaagcggtctgttccaaagataatggctaagaaattgtactcggaattcaatattgacccggtacttattttggaaaatttataaaattagaataatattacattggccggttattacgattttgtttttgccctgggttctgggctctggatatctacttaactaaaaactcccttacgagaacagtgtcgtaagagagttcaaagtttgaatgtcttctttattttgatgcttctgtgagtgctctaaagagcggcaggaatgtgtcgtctcctttggatacaaatccttcggggtggaattgtactcctacaacgaattggtctccctctttttcaatagcctctaccactccgtcttttgctcttgcactgatcttaaaccctttggcaatatcttttaccgcctgatggtgaaaagagttaactactaccgactctctgccgagtattttatagagttttgagttcttatcaatatcgatagtatgcgttccgtagctgcttggagcattttgagagtgcttcacaaatgtaccttcgacctgggatgggatgtcctgataaagtgtcccgccaaaggcaacattcatagcttgttctccacgacagattcccaatacaggtaatcccttttctacggccattctgataagagttatatcgaactcgtctcttttcggggcaataccgcccatggcacgtacaggctcttcgttaaaccattttagcgggtcaatatcttctcctccggtcataacaagaccatcgattacttccagaacacgcgtaagctcctccttatcggaggtcatagggataacaagaggaacaccccctgctcttttaatcgagttgatataggtaagtggagcagatgcagaactttcggttgcgactgaagatacaccgataataggttttttctgggcataagcagatataagtgtaaatatcagtacaatggataatagacttcttcttttcatactcaagactttacaagttatccaggctaatagtataactgtatctgtattctttgtctgagaacctgtactcgttcagcggtttagctccccatgaatttagtccggctacgccgcgttggaacagatcgacacagagaacagtctctttacggggaagtacatccgaccagtgttgttgtttcttggtcattcccggatcaaggtcttccggacggtagttggtcgcacttaccgacaacggttgaggtccgtccacccttatgcctttacctgcttcattctggagtgtcagccagcggacatcggttttattcccggtttcctgtggacgataataggtataggcctgattctttacaagaccttcccagatacccataaatgtatcggtattgcggtcgatgtaattctcccacggcccgcgcccgtaccagcggaattgattgtattcttccggcagaaccatcagcataccgaaacgcatcatctccggaagctcgttgctctgtgcctgataatggagatcagtggtaaagctcccgtcgttattgacggtgtaagtaatatccacaaaggcttctatccctctgagtttggcgcggtacataaatgatacgccgttgttgttttctttcatatcgcggtaactgtaaatcacattatgacttgctgcgtcccagagacgaagattatattgctctcccgaaccgaagtcattgtcgaccggagccctccagaaattcaggcggggcagttccttaaagatatttttcccgtttacttttgcactggtcaatgacctgccatctcttaccgaaaagacgtactctttgttgcccgatgttacggttacgttttcatcctttcgggatacattaagagttcccgtatgttcaccggaaacaaaatagttattggcttcgaaagcaaattcttctttggccacttcaaaaccgggtttaataaattcatttccttttttgtcataagcgaacagatggaggaaatactccgtgcccttttcaggttgtattgaagggagtttcaattgaacatccttgccggaatttaccgggacttctacggcgaaatctccttcggcaactttttcaccgtttttcaataacacccacttatagccgaacccatcgttggtcagattggtgaatttaaaatcattgatcacagtgataagacctttgttgaggtcttttgcctcaaaaagaatgttctgataaacctttttcactatatgggtatggggcatataattctggtcgggagtaacaagtccgtccatgcagaaattgccgtcgttttgtttgttgtatcccttcaggtctcctccgtatgcccagtagaagcgtccctgttcgtcatgggcaggatatccgtgattgtaccattcccaaatgaagcctccctgcatattcttgctgctgcgcatcagttcccagtattccgggaaattacccatactgttgcccatcgcatgtgcatattcgcacataatatagggacgccccaggtcctgggcagcatcacgcttcatactttcccaggagggatacatcgggcagataatatcagtattcctgttacgtccggcttgttcatactgtaccgggcggctcggatcgcgttgcttggcccagtcatacatatcgaagaacgcttttccgttgcttgcctcgttacccagtgaccagataatcacagagggatgatttttatccctttccactaaacgggtgacgcgatccatatgttgtccgtgccactccgggaagttggaaacattgtcggggccgtaacccagcccgtgtgactccagattggtttcatccacgaggtagataccatattcatcgcagagtttataccataaaggttgttgaggataatgagatgtgcggacagcattgatattcagttctttcatcaattgcaggtttcgcatcatgatctctttgtctactacctgccctttattggtattgaattcgtgtaggttgacgcccttcaggaatattttttgcccgttcaccagaagttgtccgtctttaatttccactctgcggaatccgattttggaagaggttgcttcaatcaggttgcctctttcgtctttaagggttagcagaagggtatagaggttcggtgtttctgccgtccatttgtccggattgggtactcttcccgacaggctgatctcttcagaaagagaagcgcctatcgttgcgtcctttgtctgttggaaaacattttttccgtttttatccaggatggaaatctccagtttacgattttggatctgatcggtatagtttttcaactctacttcaatactgaactgtccatgcctgtaggagtcatccagatcgggatgagcgaagaagtcctgtatgcgggtatcatctgtgctgtacaggtaaacgctgcggttaatccctcccaaacgccacatatcctggtcttccaggtaagagccgtcgctgaatttatgtacctggcacgccaacaggttcttacccggacgaatatagggtgtaatatcgaactccgccggacttttggcgtttttattgatacctacttgtttcccgtttacaaagacaaccatgaaattggtacccccctcaaaatggaggaatacccttctaccgttccatgtctcgggaatagtaaatgtctgacggtaggcgcctaccggcgaatcattccggtcgatatgaggaggatttttcgggaatccgaagccgatattcacatacataggaataccgtatccattgaattcccagtttccgggaacgggcattttgccccaggcgctgtcatcgtagttttcattgaaaaaacctacaggaacttcatcaactttcggcacccaatgaaatttccaggttccgttgagggactgataataaggtgaacgttcatattcatcggcgatggcagtctgttcgtcagcataaggaatagccgtagcccttgttttttcggtatttaccgcgaaaatttccggattttcccaatcaggagccttatcctgtgcctgaactcttcctgaaccctgatcctgcgcatggataaatgctatatgcatcaacattgttaaaaaaataatataagaaaatgacttcatgtgtatatacttttatactttggtgaataaatttaatatctgttttctgtttttccttgcagtgcaaatttacatgattttctttgaaaaaaccatatgtccagacggaacggccagtttgtttgacgtgaaagaacatggctttcttgaatgtgttgtaaagatagttgtttttttattatttttgtgtcgattgatcatagtttaattgaaatagtattaaggaaatgaatagcagaaatagagataccagtgagaatttaattacatccacgttcatgctaattttaattgaacgtgacgatggagagaagaaacaaacattggagaattgaacaacggaacagggtttacaaagctaaaatgaagttattcgcctcttatggcggtatttttattcttaataacgaaagagtaactaatccccggtggattgaactgtacaaggcgaactggagtccggtctataagtccgttaggactccgtgtagttgtaggatgtgtcgaggagaaatttataaccgttgtgcatacaagaaagagacaataagattgatcgaagaaatcatttgaatttgagagagggacctaattccctcttttttaatattttccccaatctctttgacgtacagaataaaaaaggcgagttgccccgccttacatgttttcacaacggaataatccttattgtgatttgctttcaaaagttgtaacggcaaatgtatgaaaataaatttaatatgcaaaatgatttgttaaataaaatattcattttaactttacgggcaataaaataacgtgtttaattgtatacgacatgaaaaagcatattctgggtttagatctgggtaccaacagtattggatgggcattggtggaggttgatgaaaacaataaaccatgcagtatagaaggtatgggaagtcggattataccaatgagtcaggatatattgggaaattttgaaagtggaaattctatttcacaaacagcagaaagaactgcttatcgcggaacaagaagattgcgtgagcgtcatttgttgcgtagggaacgtttgcatagagtgctgaatgtgttaggctttttgcctgaacattatatgaatcagattgattttgagaaacacttggggaaattctttactgacctagaacctaaattggcttggaaagaaaatgcgaatggaaaatatgaatttatttttcagtcttcgttcaatgaaatggtctccgaattcaaaaaagctcaaccttatttatttgaaaacggaaagttgattccttatgattggactatttactatttgcgtaaaaaagccttatctcaaaaaataaaaaaagaagaattggcttggattttattgaattttaatcagaaacggggttattatcagttgcgtgatgaggtggacgaagaaaatccaaacaaattagttgaattccattcgttgaaagtgattgatgtcgtgccggacgaaagtgctaatagcaaaggcgaaacatggtattctcttcatttggaaaatggttggatttatcggcgttcgagtaaaacacctctttttgattggaaagataaagtccgtgattttattgtcacgacagatttaaatgatgatggtacgataaaaaccgataaagagggtaatgtcaggcgttcgtttcgggcaccggcggaagatgattggactttattaaaaaagaaaaccgaagcagacattgataaaagcaagaaaactgtcggaacatacatttatgatgctttgttggaaaatccatcacaaaaaataaaagggaaattagtacgcaccatcgaacggaagttttacaaagaagaactgaaacagattcttcaaaaacaacaggagtttcatcccgaattacaggatgaggatttgtataacgaggctgttcgtgagttgtatcgtagcaatgaatcccatcaactcgctcttggtaaaagagacttcacgcatctttttttggaagatattattttctatcaacgtccgttgcgaagcaaaaaatcgtccattgggaattgttcgttggaatataggaagtaccgtgataaggaaggagtggaacatatcgaatacttgaaagcggcgcctaagtcaaatccttattaccaggaattccgtttgtggcaatggctctataatttaactatttacaggaggaatgacgatacgaatgtaacccaagaattcttgaacagcgtggaagattatgagactttgtttgattttctggataacagaaaggaaattaggcaagacacgttgataaagttcctgttggagcaaaaaggttttaagggaaaaatgttggctaacgaagcatcaaaatatcgttggaactttgtggatgacaaggaaaaagtatatccatgtaacgaaacaaaagctttgattgtatcccggctggcgaaagttgaaaacctgcctgacggtttcttgaaaagggaaactgaacaacaactctggcatattatctactccgttactgacaaggatgaatacgaaaaagcattgaaatcgtttgccgaaagacatggattggatgtagcatcatttgtggaaaattttaaaaagtttccgcctttcaaaagcgaatatggttcattctcggaaaaagccattaaaaaattattgcctttgatacggactggaaagtactgggattgggggaaaattgacgaaagtacgaaaaaacgtattgataaaattataacaggagagtatgatgaaaatataaaagagagagtccgggagaaagccattcatttgaaagaagagggatattttcaaggcttgcaactttggttggcaagttatatcgtttatggtcgccattccgagccaggcattgccggaaaatggaattctgtcaatgatttggaaaagtacctgcatgaattcaaacaacactcattgcgtaatccgattgtcgaacaaattgttaccgaagcattgagagtgataagagatatttgggcgcattatggtaacggagtgaaagatttcttttcggaaattcatatcgagttaggccggcaaatgaaactacctgccgaagaccggaaaaaattaagcgatcaagtgctcgaaaacgaaaaaacaaaccttcgtatcaaagccttacttgcagaaatgttgcattatccggaagtggaaaacgtgcggccatactcacctatgcaacaagaagccctgaaaatatttgaagatggagtgttaagttctaatatcgaaatagacgatgatatccttaaaataagtaagaccgctcaaccttcttcctcggaattaagacgctataaattatggttagagcaaaaataccgatctccgtataccgggcaagtcattcctttgaacagattatttactgccgattacgagatagagcacatcattccacaaagccgttatttcgatgatagtttcaacaataaagtgatatgtgagtcggctgtcaataaactgaaagacaatcagaccagttttgagtttataaaaaaccaccatagcgaaatcgttgaagtaggttttggcaaaacggtcagaatttttgaagaagaagagtatcaaaaattcgtgaaagaacattatgcgaaaaatcgctccaaacggaataaattattgatggatgaaattcctgagaaaatgattgatcgccagatgaatgacacacgttatatcagtaagtttatttcttccgttttatccaatattgttcgttcggaaacaaatgacgacggaattaattcaaaaaatattgttccactgaatggtaaaataaccggtcggttaaagcaggattggggactgaacgatgtttggaacgatttgatattgcctcgttttgaaaggatgaacgaactgaccggttctaaagacttcacggcttacaatgaacgttatcagaaatatctgccgacagttccgctcgaattcgcaaaaaactttcagaaaaagcgtatcgatcaccgtcatcatgccatggacgctttggttgttgcgtgcgctacgcgcgatcatgtgaatttccttaacaatcaacatgcgttggacaagaagaaaacaaaagaagaaaaagacaaaagtcgattcgacttgcgtaataaattgtgtttcaaaaataagggagatgataaaggcaattataactggcagtttttcaaaccttggggtaattttaccgttgatgcccgcaatgaattggaaaaaatcattgtcagtttcaagcagaatcttcgtgtgataaataaaagtgtcaattattaccaacggtacatagatggtgagaaagtggttgacaaacaaaccaaaggtgataactgggcgatacggaagcctttgcataaagatacggtatcgggattagtgcgattgcgaaaaacaaaaactgtttcattaaatgcggcgttagataattatcttgatattgttgataaaagtttgcgaaaacatattatttcgttggtcagtcaaaattacgataagaaaaaacttgtgagatattttaaagaaagggagaaccaatggaatggaatagatataacgaaagtcgctatttattattgggaaaacgacaatgtggcttcgagggtaagtttagacacctcgtttaatgaaaaacgaataatagaaacaataactgatacaggtatccaaatgattttactaaatcatttagaaaactacaaaggcagattggacgatcaaggaaaagaaattgtccccgaaagtttggctttcactcccgaaggaatcgacgagatgaataaaaatatcattttgctcaacaatggtaaattccatcagccaatttttaaagtccgaacctatgaacccaaaggtaataaattcaatgtcggatatgttggcaataaaaaaactaaatacgttgaagccgcaaagggaacaaacttgttttttgctatttatgtagatgatgagggcaagcggagctatgaaacaattccgctgaacatcgttattgaacgcttgaagcagggactaaaagaagtgcctgaaagaaatgaaaaagggcataatcttttattttctttatctccgaatgatttggtgtatgtgccgggggaagaagagctaactacttcattaaatcatcaattagatcgaaatagaatttataaaatggtaagttcaagcgggaaccaatgtttctttgtcaaaagcgaggttgcaaatcctattgttaataaggtggagtattcagtattaaacaagatggaaaaatcaatcgacggaataatgataaaacaagtatgtaggaaattacaagtagatagattggggaatatacaatttgcatagcaccatatcaaaatctttattaaaaaagaatatcaaagcctcgtacaacaaacaaagccgtaaaaaattacaaataataaagatgcgcatgtctacagaacaattattaaacgaatgccttgttattttgcgaagtattaaagacgacaggaaaagtcttgaaaaattgcttggatttatgaaagaagaatttgttgaaaacaacgaaatcaatctttttgaaataccagactataaattacaagttcctccgaaatacagaaacttaattagcgaagttgctggtaatatgtcagcagggttgattagtttcgtaaatacggaaacattggaagttgatggaatgccgaaagaaatttactcggatttaccgttggaagaagatgatgaagagtatgaagaaagaagaagaaatgacagacactgatacgtattctgatgaaatattcagttttcgaaaatggaaagattttataacgattgaacctttggagtcgtcggaagcatatcgcattatggaatattttgtagacaatctgcctaagggacatgcgaagaacatattgaacaatgccatcaacggcaaaaaaccattcgcaaatttcaacaattttattcatcaatcggaatatcgtgaactttggtttgaatttaaggatagaatgtatgaaaaatacgtgattgatagttatttatataaaataacagataaaggataaccctatgtccaaaccccggttgaaaaaagaactccaacgcctcaccaaagaacaattggtagagcaaatactggatttgtacgaaaaaaataaagctgtaaaagagttttacgatttttatctcaatccgaagaatgaaacggccttggctgaaaagtataagaaaattatccgtaaagaatttaatgtagagcatcccgaacgtggcggtgaaaaattttcggttgccaaacgtgctatttcggattttcgtagtttgcaaccttcacccgaagcattagcagacgtgatgttgtatttacctgaaagcgcatgtgaactgacttattgttacggtgactattcggaacaattctatgattcgacttacaacaattacaaggctgccttggcgtttatgcaaaaacacggtttgcttgaacaatttaagttgagagccgaacaatgtgtacgttgggcttcaccctgcggttatggctttgcgagtgaaattgccgatctatattatgaatattataatgaatcaccatgattaaacgcacgctttacttcggtaatccggcctatttatccctccggaaagaacaactgcttattcaattgccggaagtggtgaaaaacgaaacgctgcccgaaacatttaaagacgacgccgtgaaaaccgttcccatagaagatatcggtgtggtgattctggataacaagcaaataaccattactcatggtgtcattgaaaaactgttggccaacaacgttgcactcattacctgcgacagtagccggatgcctctgggtttgatgttgcccttgtccggcaatactacccaaaccgagcgctttaaacatcaactgggggcatcggttccgttgaaaaaacagttgtggcagcaaaccgttcaggcaaagatacaaaatcaggctcatttgcttcattctgctaccggcgaggtggtaaagaacatgcaaatatgggcttcggatgtaaaaagcggcgatccagacaattatgaagctcgcgccgccgtatattattgggcgaatatctttccgcagatatccggattttcaaggaacagggacggtattccacccaacaatctcctgaattatggatatgccattttaagagcagttgtggcacgctcattagttgccagtggactacttcctacgttgggtattcatcaccggaacaaatacaatgcttactgtctggccgatgatatcatggaaccgtatcgccccttcgtagataaagtggtcgttgaaattatagaaagtgaagaggattatcaggaattatccaaaaatataaaaatgagactattaaacattcccgtattggatgttatcatcaacgggcaacgtagcccgcttatgattgcggcatcgcaaactaccgcttctttggcaaaatgctacaaaggtgaaatacggaaaatagcatatccgaattttgagtaaaaggcaatatgaacctgaatttgacaaatatcccggaaaaagagagcctgaaggaaaagtatttccttttgaaaggagaatacgtaaaattattgaccgacaaagatagtttgttgcaatggggtaaaccacagttagaagcgttatatgttgtgaagatcggtcataaacagttgcagttgctcgaaattcaattggaaacgagagctggataataaacacgacagttttactatagctatttacaattcacaaggcgataaattaggttatattccacgtgataaaaatgagatgttggcacggctgatggatgccggcaaatggttttatgccaaagtgaaaaataaagagtgggagggtaactggttaaaaatagatatggaaatatatttgaaagaatagaggttttatgaatcgactaagcgaatatagaattatgtgggtactcgtattttttgacctgccgacggagacgaagaaagatcgtaaggtctataccgtttttagggataaactgatcaaagacggttttaccatgtttcagttttccatctatttacgacattgtgccagccgtgaaaacgccgatgtgcatattcaacgtgtgaaaaacaatcttccaccacatgggcaagtcggcatcctgtgtattaccgataagcaatttggcaacatggaattgtttatcggaaaaaaagaaaaagaagtaaccacgccctaccagcaattagaactgttttagaaaatagaaatcccgccttaccggcaggattccatgttcggaacaacgtctttttttaattgtaattttcggtataaaccactggaaaatagcgaaatgttcaaatccagttgttccagataccaaaggtacaaacttttgagagccaatcacaacaaaaatattaattttaaactttgtaaaaaagttgttccagataccaaaggtacaaacttttgagagccaatcacaacgatcagccaattggctttggtaaagcggctgttgttccagataccaaaggtacaaacttttgagagccaatcacaacaacaacaatcaaaatgaagacgacgaagaagttgttccagataccaaaggtacaaacttttgagagccaatcacaactggagagcgagaatattaaacttagagtcagttgttccagataccaaaggtacaaacttttgagagccaatcacaacacttcgacgtgatggctattgagatggtcggttgttccagataccaaaggtacaaacttttgagagccaatcacaacctatacttccgtttttgcgtctctgtttggttgttccagataccaaaggtacaaacttttgagagccaatcacaacagacttgctccaacctatctttaactgcaagttgttccagataccaaaggtacaaacttttgagagccaatcacaactattaccaataaagctccaagtttgtcaaggttgttccagataccaaaggtacaaacttttgagagccaatcacaacaccttgtagtgttttatcaaaaattactagttgttccagataccaaaggtacaaacttttgagagccaatcacaacagtgattggaaaacaaagattgaaacaaaagttgttccagataccaaaggtacaaacttttgagagccaatcacaaccgaataaccttgtggtggcgatgctacccgttgttccagataccaaaggtacaaacttttgagagccaatcacaacagtatgtttaccgtacgaaagaaacttcgcgttgttccagataccaaaggtacaaacttttgagagccaatcacaactgtaaatacagagaagactcttgattaaaggttgttccagataccaaaggtacaaacttttgagagccaatcacaaccgaaagccgcattatgaaatacaatatctagttgttccagataccaaaggtacaaacttttgagagccaatcacaacgattaagtctacgtaatttctcttcaagaggttgttccagataccaaaggtacaaacttttgagagccaatcacaacgtttgcgcttgtggtcaggaatctgaaactgttgttccagataccaaaggtacaaacttttgagagccaatcacaacagtatccagaaagtgatgcaagcatggacggttgttccagataccaaaggtacaaacttttgagagccaatcacaacttcttcaaccctgttgagttgtgcctggaggttgttccagataccaaaggtacaaacttttgagagccaatcacaacgttatggatcattggcgtttatcgtcggcagttgttccagataccaaaggtacaaacttttgagagccaatcacaacatagtccacagagtaaacaacgacttcatagttgttccagataccaaaggtacaaacttttgagagccaatcacaacagcacatagcggaaattgcatcggcaattagttgttccagataccaaaggtacaaacttttgagagccaatcacaacaatggggcggggtttgacgaacagacaaaagttgttccagataccaaaggtacaaacttttgagagccaatcacaacaaatctgcacaaatcctgacgggaaactgggttgttccagataccaaaggtacaaacttttgagagccaatcacaacataattgtggttgtggcattgtctgctttggttgttccagataccaaaggtacaaacttttgagagccaatcacaacagttgctttacaacgaaggatgtgaacactgttgttccagataccaaaggtacaaacttttgagagccaatcacaactacttatccccattcgacaaccagaaaaacgttgttccagataccaaaggtacaaacttttgagagccaatcacaactgaaacatcttacgtccatccgcagaataagttgttccagataccaaaggtacaaacttttgagagccaatcacaactccctttagctatgtttgatttttcattatgttgttccagataccaaaggtacaaacttttgagagccaatcacaaccggattggattaagtcaggggatcgcaggtgttgttccagataccaaaggtacaaacttttgagagccaatcacaacagataagcagttttcgttagccattgttgagttgttccagataccaaaggtacaaacttttgagagccaatcacaaccgacctgaaggccatctcccaactccaagcgttgttccagataccaaaggtacaaacttttgagagccaatcacaacatgccacatcatatactccaatccgtcatcgttgttccagataccaaaggtacaaacttttgagagccaatcacaacaggagcgttatctggaaatgcagacacagcgttgttccagataccaaaggtacaaacttttgagagccaatcacaaccattgatggtgcggaggaataaccgccacgttgttccagataccaaaggtacaaacttttgagagccaatcacaacggctgtgtttaatacgtttaatcgttcttcgttgttccagataccaaaggtacaaacttttgagagccaatcacaactgcttccggccattcgccccagtcaccctagttgttccagataccaaaggtacaaacttttgagagccaatcacaacgacacaaccgaacgacctttactgcatcagttgttccagataccaaaggtacaaacttttgagagccaatcacaacttattatgacaccgttgctggtatgcaggtgttgttccagataccaaaggtacaaacttttgagagccaatcacaactatctttacatcattaaaataacacaacggatgaaaattccttacctaatttatggaacccttctatgattttctcacgttgcttttgtctgggtttgcgatatccggtagcataatgtcccaactggcgttcattgatgccagttatccgggagagtgccgagcgggtaagaatgccatcaaaatattgcaagagagccgaaatctccattctaaactcaatctcatacccattttttacccagtcaggtgcaggctcattaccttccaagtgaccctctttagagaattcgagggattcaataatagcctctttaagaccctcaaatgttttatgagtgaccactaccacttcgtccggcagttcaaccaaggcactataattatgttcagcatatccaattctggcgatgagtttttccattttgtcgttattttatgcaggagactatctccaccctgcctgtttccaaatactatttaaaagaaattgatccaatacctcgttaggttttccgtttacagtcactgtccccttttttacgttatgcttaaattgcctgtgacttccctttttccttgcgacataccagccatcttccaataataaatctatatgattatccgcagttattcctaaagaatttagcgggaaaaagttataaataagtttcaaaaatacttatacaattcactgatattcattatatttacatcgataacgatataaagattcaagctatgaatatcctggattttgctataaattaccccgatgaggaatcctgtcggaaaaaattcaaagaacaaagagaccaaatgggagtaacctgtcggcattgcaattgtaaagaacattattggctggaaaacaagcaggcctatgaatgcaagcgttgtcgcgcacgccaaaccttgcgttcaggcaccgtcatgcagcactccaacctgccttaccgttactggttcgtggccatgcacctgctcacggcgaccaagggctccttttccgcggcggagctgcagcgccagctggggcacaagcgttaccagcccatatgggaaatggtcaataaactgcgtgacgtgatgggcaaacgcgatgatgagtacacccttgagggagccatcgagttggacgacgccttcttttccaccgaaatatcccttcaagagagggacaaaccgttgaagcgcggccgcgggagccaaaaaaagaccaaagtgctggtaatggctgaaagcaaaaccgttgaaaaccccaaaccgggtaagaaacccaagaaggtcagatacctgaagatgaaagtcatcaacgacttgaaagccggtacaattacaaggaatgtcaaagagcacgttgaaagcacggcggacctgaccaccgatgactcaacttcttacactaaattgaaagagcatgtccattcacatacggcatccgttattccacacgaggatctttccaatgtgctgccctgggtccataccgcgatcagcaatgccaaacgacagctcttgggcgtgtattacaagataaaaccggaatacttgcaatattatctcaaccagttctgttataaattcaacaggcgttacttcggggaaaaccagtttgaaagactgttgatagccgctgtaacgtatgctcctgatttcaagtcaagaatttacaataggaactattgcggataatcattttaattttttaaaacttccgctattgcgtcaattgatgttgctatttaacattttcgttaagcaatacgaacagaagacaagtttacttggattatgtcgttgcgagaaaatgtttaatgtaaatgaacaatttacccggcaaaaggtttaacgcgcgcctacatcggttttcggccgcggtgcaggcataggtccagcaactcggcgatggaggcttcgccggcgcacatcaccgtgtcggctcctccccagtaaacccggatagtatcgtcccctgtctttagcgcgccgcacgtgaataccacgttgtggacatagccggtaatctcgtggggctcctcgggctgcagtatccagtcgtcacccacgccaatcacgcgagaggggtcttccaagtcgtgcaatgccgcccccaatcgatacacgcttccgtccatggtgggaaaaacgccgtggtagatattcaaccacccttcatcggtctttacgggtggagctccggggccgatcttcatctcgtcccagtggtatttttccggcttcatgatcactttcgagtcgccccagtaccgcaggtcgggcgagtagctgatccatagggaccacgggctgatctcggagtggggccgatccagccgggcatacaggccgttgaacttctcggggaagatgaccgtgttgcggtagtctgcctgggtgatgagcgagacacgctctacctccttccagtcccgggttttagccagcccgatccggaccccgtgtcgcgagtaggcggagtaggtgattaagaactccccgtcgataaaggtgatccgcgggtcttccaccccgtactcctcgtactcggcaaatggttcctcccgcgcgggaaccatgaacggctcagggtctaccgtgaaccggtagccgtcgctgctacgcgccagcccgaggatgctcctcccgttcatccggtgagaccggaacagcatgatatactcttcgttgaaacgggtaacccccgcgttgtgcacggtggcaaccgggtagggcacctgctcgcgggtgaggatggggttgcccgggtatcgttttataatcgacataacgttattggtttagcattgttttatacacgtcaatgtagcggcgagccatcacctccttggtgaagtgctgctccacgttttcccggcaagaatgccggttgatgttcgtcacgttccgcacctgttcgatggcttcttccacgttttgcgcgaggtaaccattcctcccgttaacgatcaactccggcatgcttcccttgttgaaggcaaccacgggcgtgccacacgccatcgcttccaccaccgagagcccgaacggctcgctgaaggagatcgggtggagcagcacgcgggcattgcccaacaattggtcgcgccggtcggcacccacgctgccgatatattctaccttaccctcttcgaggaacggcttcacgtgccggtcaaaatacccttgatcctggatgatgccggcgatgacaagccgggtatccaatgctttggcaatctgcactgcctcccgggttcccttgtcgggatgaatgcgcccgtaatagagcaggtagtcgcccgccgggtctggattgaacgtgaagttgccggtatcgatcccgtggtataccgtggcgatgtaatcgagctcgggcgaccggtcagcatcgcttatcgagacatagcgggtatgtgggttgtacttcttgtatacaggaaggatgcgcggggacgagaaaccatggatggtggtgaccaccggcgtcttcaccagccccgagtaggtgaggggtaaaaaatcgaactggttatggatgatgtcgaactcgtcggcacgctcgaaacattccgagatatgcaggcattcccacaccttggggtcaatcgcgcgatcttcctcgtagccccggggagttaccgcggtcaacttgccttgggtgattgaatcgcccgtggcgaatagggtgacgtccaccccgttttttaccagctcctcggtgaggagcgacgttaccagctcccatggcccgtagtgcaccgggggtgtccgccaggcgatcggggagagcattgcaattttcatcttgtttattttatttcaatcattttatccattaattcatccacgctgaccgtggcaaaggtggtaaccacgtccgcgatggcataggggagtatcagcgtgcggtttaccaccatcgcgccgcacgtgtagatcacgttgggcacgtagcccgaccgttcctccttcgccggggtgagcagcggttc

SEQ ID NO: 1125 - DNA, 24530 bp, synthetic construct
  misc_feature 1..24530: note = Synthetic
  source 1..24530: mol_type = other DNA
cgtgctttccgccattcccgtgccataaagctgttcccattctgtcacagctttttccagctgtttgtccaagctgtccggggtgtcatacttccctatattcaggtcgatgtgcagcacggggcgttttatccagtctttctccagcttctccatcgccagcccttcaaagagttccttctttccctggaagtaggcttcgagggtggagatgagcaggctcttgccgaagcgccgggggcggcttaggaagtagtagctgcccgtctttaccagccggtagacaagggcggtcttgtcgacgtagaaatagccgcctttgcgcatcttctcgaagttctgtatgccgatggggtagattttgttgctctgtatgggttccatatttccggttctcctttcttatatatcacttttcttatatattacctgtaactttcttatatattacttgcaacgcacaaatatacgaatagttcttgtaactgacggcctgcaatctgttaaactataggctctgtgcatggttctgcggacttgtccggcaaagtctcccggtactgcacgggtgtcatgccaagcagtttgttgaacgccacatagtaggtgttgcggctcttgaagcccgaagcggtggctatggcatctatggaatacattctgttgtctttcagcatcgatatggagtgctccacgcgcaggcggttgatgtagtcgctgaagccgtcggcaccggcatattcgcgcaggaacgggttgaggcggttcttgctcaaggccgttatcttcatcaggtcttcgcggttgaagttggggtttaggaagggcaggtcggtgagcagggcatcttccatctgcatgaaccggcggcggttgtcttcatcgtcggcagcggagggggaagtgttggcttgagcggcaggcggctcttcgttaggggcatcttccgggtgaagcggctgccggcggtatgccttgcgcagttcttctttctgtgccagaagctcttctatctggcgggcggctatctggttgcgttcgcgggtgcggcgcaggtggaggtgcttttcccatagcaggatggcgagcaggatggcgatgaagctggtggtgatgaacagtacgcgttgccgtgccagcttgtgttgggcttcgcgtatctgcgcatccttttcctgggtttggtagatgatggcgaattcgtgtgcctggccggccttttcgcgggcatagatgctgtcggtcagcatggtgatgcgctgttggtagctgtcggccagttccggacgtttcagtccgcggtaggtgcgggcatagcggtccagcagaatcaggtggccgtagttgaaggtatcggccggttcggccagggcggaagaggcgtcaagaagttgcagcactttatggtactgacgcgtacccagcaggtaggggacgatttctgtttgtcctgcctgcgattgtgcaaagccggtgctttggtatttccgggcggtttcggcggctttttcgctttgtccgttttgcaggtagtaccaggcaagtttggagtagaggtaaccgtattgctggtctatgtatccgggcggcggtccgggcagcaggctcatgcggctgataacgtcgagacgcttctcgcagagggcaatggcttcgtccaaacgctcgttttcggccagataggcggacaagtcgccgtaggaggtggatagttgggccagttcgcgcacattgtccgtgccttgcagcagttcgatggaacggtacatgtaccggaacgctttgtcgtcgagcttcatgccttgatacatgcggcccaaagtgaacagcagttcgctttctttggccttctgtccttgctcctgtgccagctcgatggcttcggtacagatgcggatgccttcttcgtatttgttcaggcggtcgagggcggtggcgagctgcgtgaggacttgcagtttccggagaggagtgtgctgcatggagtcgctttgcagggcgcggcggatgtaccgctccttgaggtggtacataccttgacgttcgtagactgtgccgcgcagcatgtcgatgcggaattgcggcaggtggggaagacggcgggcttcggcttcgtccagcagtgacagagcgctgtcgggcagggtgtaatagatgctgcggatatgctgttcggtcagcaggctgtcgggcagggaagcggaggttttgtatcggttaggggtgcttgcggtggaaaataggcttatggtgagtgccagagcaagatagaggggacggaagtaatgtattttctccattgtttattttctcttttgtatggcaaagatagggattatttttatctttgcctgcgtttatcataagaagttactgcaatgaatatatacataaaatctgtcattttgtcttttttctttatatctgtcggggctcgggcacaagaggcttccttcactccgccttttgattttcccatcattttctccggtaactttggcgagatacgtgccaaccattttcatggcggactggatttcaagaccggtggcgccataggcaaaccggtacgtgcgctggcggacggatatatttcgcgtatccgtgtcacccacggctcgggctatgtgctcgatgtggtgtatgataacggctataccgccatctaccgtcatcttagcgcctttgtgggtgaagtggcaaagcgagtgaaggctcttcagtacgaaaaggaaagctgggaagtagagataattcccgagcctgctcccgtgtcagatgagggagacgatagagatagaggcagtaataatctcggggtgcatatcttgggcgaatatcccgtgaaagccggtcagataatagctttaagcggaaacaccggatactctttcggtccgcacctgcatctggatatgatagagacggctacggacgaatatatagacccactgcctttcttcatggacaaagtgaaggacaagactgccccgcgtgccgaaggtatcatgttgtttcctcagccgggcaaaggagtggtggaaggtaagcagacgcgacgggcttttccggcacatcctacgaaacccattaccgcctggggattgattggtgcaggcatccgtgcttatgattatatggacggagtgcagaataaatatggcgtgaagacggtgattctcgaagtggacggcgaggaagtcttccgcagtacggtagaccgctttgcgtacgaagaaaaccgctatatcaattcgtggacacacggccagtatatgaagtctttcatcgagccgggaaaccacttacgcatgctgcatgcatccaacggtaaccgtggactggtggacatcaacgaagaacgcccttaccggtttgtctatacgctgagcgatgcgctgggaaatacctccaaggtctgcttcacggtgcaggggcagaagacgacaattgctccggtggaacatcgtgagaaatacgccctcaagtgggacaaggtgaactatctgcaggaaccggggttagaattggtcattccgaaaggaatgctctacgataacgtcctgttgaactattccgtgcgggctgatagcggtgatatagctttcacctatcagttgaacgatacccgcattccgatgcacgatgcctgcgatttgcgtatcggcttgcgccggcgtccggtagaggatatgaccaaatattatgtggcgggcgtaacggcgcgcggtggaaaataccgcatcggcggtaagtatgaggatggtgtcatgaaagtgcgtatacgggatttggggacttataccgtggcagtggatacggttccgccggtgataactcccgtgaaccaagctcagtggggacgtacgggaaaaatcatcttcaaggccaaggacaaggaaaccggcatcaacacctatcggggtacgattgacggaaaatatgccttgtttggaaagcccaactccatcagtggtaacctggtgtgcgagctcgacccgaaacatgtggagaaaggcggcaagcatgtggtggagatgacggtgacggatggctgtggcaactgtaccaccgaacagtttgaatttgtatggtaaagcctctcccccgacccctcccccgtagggaggggaggtcggaagttacttttgctatatatagtgtaataaataagtgtaataaaaatatgtgtaacaagctatcattttcttctcccctctctttcggagaggggacgggggtgaggccttaatttattagaagtatgaaaagtaaaagactgactctttccgtcttgtttgttgtggcagccgtggcgaatgcactggcctgcaccaatcttatcgtgggcaagaacgcctccgcggacggttctaccatcgtttcttattctgccgattcctatggcttgttcggcgagctatatcattatcctgccggcatgcataagaaaggcacgctgattgacatacacgagtgggataccggcaaatacctcgggcagatagcgcaggcccgtcagacgtacaatgtcatcggcaatatgaacgaattccagctcactatcggtgaaacgacattcggcggacgccccgaactggtagacactaccggtattatcgactacggtagcttgatttatctcggactgcaacgttcacgcactgctcgcgaggctatcaaggtgatgacggaattggtgcaggaatatggctattacagtagtggagaatccttcaccattgccgaccccaacgagatatggattatggagatgattggcaagggacccggtgtgcgcggtgccgtatgggtagctgtccgcgtgcccgatgattgtatctccgcacatgccaaccagagccgcattcatcagttcaatatgaatgacaaggaaaactgcatgtactctgccgacgtcatctcctttgcacgtgagaagggttactttgatggtgtgaacaaggatttcagttttgccgatgcctatgctccgctcgattttggtgcccgtcgctattgcgaggcccgtgtatggagctatttcaatatgtttaccgaccgtggtaacgagttcttaccttatatattaggtgagacgaacactccgatgcctctgtttgtgaaacccaaccgcaaggtttccgtgcaggatgtgaaaaatgccatgcgcgaccattatgaaggtactcctctcgacatcagcaaagatttcggtgcaggcccgtatcataccccgtaccgcctttctccactctctttcaaagtgggcgaccgggaatatttcaatgagcgtcccatctccacccagcagagtggtttcgtattcgtggcacagatgcgttccgagttgcccgaccctatcggtggagtactgtggtttggcacggatgatgccaacatgacggtatttacgcccgtatattgctgtacggacaaggttcccgtatgctatacccgcgtggatggcgccgattacatcactttctcctggaactccgctttctggattttcaattgggtggccaatatggtatatccccgctatgacttgatgatagacgacgtgcgtgccactcagacagagttggagacaactttcaatgaagcgcaggagggcgttgaggctgctgctgccaaacttttggaaaaagaccctgccaaagcgaaggcattcctaaccaactatacgaacatgaccgcccaaagcactttcgatacctggaaacgtcttggcgagtttcttgtcgtaaagtataatgacggcgttgtcaagcgtatgaaaaacggtcaattcgaacgtaattccatcggccagccggcaggcgtaatccgcccgggatacccgaaggagttccttgaagagtatgttaagcagacgggagacagatataaaatgcctgaataaaattaggatatttgaacttattcttctacatttgtgtcttacaaaaaagtttatattaacccttaaaacaataacagtcttatggaaaatcaggaactgattaagcaggtgactgagaaagccgaaaaatggcttaccccggcatatgatgccgaaactcaggcagaagtgaaacgcatgttggaaaatccagataaaaccgaattgatagacagtttttacaaagacctggagtttggaacgggtggtctgcgtggcatcatgggtgccggtacaaaccgcatgaacatctacaccgtaggtgccgcaacacagggcttgtccaactatctgaacaaatgttttgccggaaagaaggatatttccgttgttgtggggcacgactgccgcaacaatagcgacaagttcgcaaagatttctgccgacatcttctctgcaaacggcatcaaggtatatctttttgacgaccttcgtcctacgcccgaagtttcatttgccattcgccacttcggctgccagagcggtatcaacattacagccagccacaaccccagagaatacaacggctacaaggcttattgggatgacggtgcgcaggtgctcgctccgcacgatacagccatcatagacgaggtaaataaggtgacggtggccgacatcaagttcaacggcaacaaggacttgattcagattatcggcaaggaagtggataaggtttatctggacatggttcactccatctccatcgaccccgaagtcatccgtcgccagaaagacctcagcattgtgtatactccgcttcatggcgcaggccgcgtgctcattccggactcattgaaggagtggggatttgagaatatcaactgcgtgcccgaacagatggtgaaggacggcaatttcccgacggtggtttctccgaatcccgaaaatgccgaagccctttccatggccattgcgctggccaagaagattgacgctgacatcgtgatggcaagtgacccggatgccgaccgtgtcggtatggcctgcaaggacgataagggcgagtgggtgcttatcaatggtaaccagacttgtctcatcttcttgtactacatcatcaagaaccgtattgcaatgggtaagatgcagccgaacgacttcatcgtgaagaccatcgtgaccaccgaactcatcaaggctgtggcagacaagaacaagattgaaatgcgcgactgctacaccggcttcaagtggattgcccgcgaaatccgtctgagtgaaggtaagcagcagtatatcggtggtggtgaagaaagctatggcttcctggccgaagactttgtccgtgataaagacgcggtttctgcctgctctttgctggccgaaatctgtgcttgggccaaagaccagggcaagacactctatgacgtattgatggaaatctatgtagaatatggattctctaaggaaaccaccgtgaacgtggtgaaacccggtaagagtggtgccgaggaaatcaaggcgatgatggataacttccgtgccaatcctccgaaggaaatcggtggttcggctgtcagcctgattaaggattacaagacgctggaactgactgatgcccagggcaacgtaagcaagctggatatgcccgagacttccaatgtacttcaatatttcactgtagacggcacgaagatttctgtccgtccttccggtacggaaccgaagattaagttctatatcgaggtgaagggcgagatgggttgtccgaaatgctataccagcgccgatgccgaagctgagaagaaagtggaggcagtgcgcaagtcactcggcatttgataggaaagaggaaaaaatgtgtatatagtgttcggagaggcgtaacccgtgagggctgcgcctcttccttttgcttctgtgttgaaagaaaacttaaataaagacttaaacccgatggttgatgaacaaaacgtttgcagggaagtttagtatatgcagattgcggttacacaccgattggttgatgtgaatgagagtcgtttcattcgtagttgttcgtttgtgagtgtgtgttttccgcaatttgcttttttaaatttcttcccccctctttttaattctttaatttttaattgttctccatccaccagtctatcagccttcttgcgatactcagctttcgtggaatttcgggcaggttgtctttggaatagaaggcggcagcggttagctcatcttcctgcagttttatctccccgctttcgtagtcggcaatgaaacccaccatcaatccgctggggtagggccagggctggttgctgaagtaggtgatgttctttaccttcagccccgtttcttcaaaaacttcccgttccacacattcttccagtgtctcgccggcttcgaggaagcctgccaccagtccgtagaaggttcctcggaagttccgggcatgcaccagcaggatttcgtctcctttgcgtatcagtacaatgatggcggtggaaacgggagggtacatctcattgccgcagttgggacacttcttcatgatgggggtctggtgctccatggcggtgccacacacggggcagaagcggctgtgctcgtcccaatagagtatctggaaggcctttcctgcagaacggtactcgtccggcgagatgtagtcgtacgatgcgcgcaggcctatcatgacccattcatcggtttcggccacgggctgttccaaagcaaatgcacgtacttgcttgccgttgggtgggaacacttcgtgtatattacttccggcttccggtgtcagaggaggctctatactgacgggtacgctgtattttatttctcctttgtctgtatatccttttttcagcagcagttggtctttgaagaagacgaaccactgcgtgcagggttggggttctgttgatttttccattgtttgttgttttattatttggggggatgaacaagaaaatacaaaggcacagagattcttttcaaagagataaagcattaatttctatgtctttgtgtctctgtgttcaccccccccctaaatttcgtttgctgtgtctttttcttgccgcacatagaccgttgaccttcccattccgcggcggcgcaggaacccttgccggatgaatttgttcagctcgtctatggcggcatgtctggttagtccgctcaattggatgtattcgttcttgttgatgcatacattctgcttgaggaacagttccagttcggcttttcttgttgcttcggtggtctctactacttttttcgatttcttggtagtggagtgtacacgttccaacgtcattttcttcttgatgttgttgcggaacgtgctgctgatgcgcaggtgcacgttttggaattggacggattcggaacggattttctttttctcatcgtcggtctcgcgcaagcatttcagtgaagtgctgaagaagccgagttctcccagttccacgatgtttccgttggcaaggaggtcgcacaactcgtcaatgcaggcatccaatgctgctcctatcacattcttgggcagatgttggaaagttgcgatatgttccacaaactccttttgggtataagtccttttcgggcagatacgtgcatggagtgatttcttgtcttctttcccgtcgggcgaaggcgtttcgtaaaggtcgtaatacgcgctcataagatatttatttttgtttatagcgataaacagttctcgtcgcttcggggaattatttttgtcgctaagcggattaattttcttcttcctaaaaactaatcgtccgacaactgttgcattatcgttcgacagttgtttaattatcgtccgacagctgtcggacgaaacagaaacgggtatgggacgattaattcttagtgagcaaaggtataaaaaattgtgatacgaaaggtagtgtttggggagaaaaaaaatcccccgttaaggacgagggaacctaatgttttcacaacggaataatccttattgtgacttgcttcattttagtatggcaaatgtataaaataaatatggaaatacaatacttatattaataaaaaaaatacctttgaagagaatactcaaaatatgatactatgaaaacaatacttggattggatttgggaaccaatagtgtaggatgggctgtaataaactctgtaattaaagagcaggccgaaagaatttggatagaaacggccggaagcaggattattccgatggatgctgctgtattgggagatttcgacaaagggaattctatatcgcaaacatctgaaaggacacgactcagaggggctcgccggttgcgcgaacgtcaattgttacgtcgtgaacgattacataaagtgttgaatattttaggttttttgcccaatcattacttagaatatattgattttgagaagcatcccggaaaattcttagccgatgccgagcctaaattagcgtgggtaaaagatgagcaagggaaatatacttttttatttcaagctgcatttgatgaaatgttggcggattttgcaatacatcagccttcattggtttctggtgataaaaagataccttacgattggacaatttattatcttcgcaagaaagctttgacagaaatgattagtaaggaagaattggcttggattcttttgaactttaatcagaaacgcggttattatcaacttagaggagaagaggaggaagacaatgccgggaaatcagttgaattttatgcgttgaaagtgctgacagtggaagcgactgatgaaaagaaaggccgggacgtatggtataatgtacatttggaaaacggttggatatatcgtagaagcagcagtgtgcctttggattgggaaggtcaggtaaaagagtttattgtaacgactgacttgaatccggatggtactccgaaattagataaatatggagaggtaaagcgttctttcagagctcctaaggaggatgactggatgttgataaagaaaaggactgaagctgacattgccaatactcataaaactgttggagcttatatttatgatactttgttgcagaaaccgcaacaaaaaataataggaaaactggtgaagacggtggagcggaaactttatagggacgaactgagcttgatattgcagaaacagtgtgcttttcatgctgagttgcaggacagagctttatatgcgaggtgtgttgaagcattgtatccgagcaatgaagtgcgacggaagaatatagccaatcgggattttgtttatttattaatggatgatatcttgttttatcaaagaccgttaaaaaccaaaaagtcgttgatagccaattgtccttacgaggagaatgaatatgtagatcgggaaacgggcgaaataaaaaaggctcctttaaaatgtatagccaaatcacatcctctttttcaagagttccgtttgtggaatttcctttctaatattcggatataccagaaagaaaaagaaataaatggaactttacatcttgatgtggatgtgacagcagagttcctgaaaacagaggatgattatgtggcattgtttgattggctgaattctcggaaggaaatagaacaaaagaccttcctgaaataccctaaatttggattgaaaaaggaaatcagtaattatcggtggaattatgtagaagataaacagtatccgtgcaatgagacacggcatgctattctttccagtttggaaaaagccaatgtctgtattgatttcttgtcaaatgagaaagaggtagctttgtggcatattctatattctgtaagtgacaagcaggaaatagagaaagctttacgcacttttgcggcaaagaatgggttggatgaatcttttgtggaagcgtttaagaagttccctccattcaaatctgaatatggggcttattctgccaaggcgataaaaaaaatgttgcctttgatgagatgcggaaaatattgggacgtgtcttcgattgatgatacaaccaaagaaagaatcaaaaagattgttacagatgagtatgacgagagaatagccgtcaaggttagggataaggtgatgaacttatcggatatttcttgttttaggaggcttccattatggctggcttgttacattgtgtacaatcgtcattcggaggataaagaggcggtcaaatgggaaagtcctgcggatattgatgcttatttggcttcttttaagcaacattcattacgcaatcctattgtggaacaagtgataaccgaaacattgcgtgttgtacgggatatttggaagcaggtggggagaattgatgaaatccatatagagttaggacgtgagatgaaaaatcctgcggataaacgtaaaagaatgactgcgcagattttggaaaatgagaatgccaatctgcgtataaaggcattgcttgctgaatttatgaatccggaatatgagatagagaatgtccgtccttattcaccaagccagcaagaaatcttgcggatttatgaagatacggttttacatgccgaagaccaattgcctgaagagatagatgcaatattgaaaaagttcaatagcagtaaagtgccgaccaaatcagagttcctgcgttataaattatggctggagcagaaatatcgttcgccttataccggtgagctgatacctttgggcaagttgtttactgctgcttatgagatagagcatgtcattcctcaatcccgctattttgatgattcattttccaataaggtgatatgcgagtctgctgtgaataagttgaaagacaatcagctgggatatgaatttatcaagaaccatcatgggcagaaagttgaagtgggttttggaaaatcggtcgaaatcttttctgtggatagttacgaaagatttgtaaaagagcaatatgccaaatctgccgtgaaaatgaaaaaattgttgatggatgatattcccgaacaatttatagaacggcagttgaatgatagccggtacatcagtaaggtgattaagggacttttgtcaaatattgttcgtgaaaagaatgatagcggtgaatatgaaccggaggctgtttccaaaaatatagtagtttgcacaggaagcgtgacggacaggctgaaaagggattggggaatgaatgatgtctggaacagtattgtatatccccgttttgaacgtttaaactccttgactgatactcagagttttgggcattgggagaataaaagcgggaagaaagtctttcaaacggagttgcctcttgaatatcaaaaaggattcagcaagaaacgcattgaccatcggcatcacgctatggatgcaatagtgatagcttgtgctacgcggaatcatgtgaactacctaagcaatgagtctgcaagccggaatgcgaaaatctctcgttatgatttgcaaagattgttgtgtgacaagaacaggacagatgataatggcaattataagtgggttataaagaagccatgggatacttttacgcaagatgcgagggaggtattgagcaaaatagtggttagcttgaagcagaatttgcgcattataaataagacaactaacgtttataggcattttgatgcaactgtgaatcgtgtttatgagaaacagaaaaccggtgatagttgggctatccgtaaaccgatgcacaaagatacagtctttggagcggtgaacctgagaaaagtaaaagttgtgcgattatcggtcgccttggatactcctgccatgattgttgacaaaagagtgaagaacaaagtgtttgaactgctgtcttataaatatgataagaagagaattgaaaaatattttaaagaaaatgctttcttgtggaaagaactggatttggctaaagttgcagtttattattttacagaagctacgacagagcctttggtcgcagtacgcaaacctctcgattcaactttcaatgagaagaaaataaaagaatcggtaacagacaccggtatacagaaaatacttctaaatcatttgtgtacaaaggaaggaaagcccgatttagcattttctgcggaaggcatagaggaaatgaaccgtaatcttttgcagctgaataatggtaaaagtcatcagccgatatataaggtgagggtgtatgaaccacgtggaaataaatttagtgtcggtgtacttggtaataaagggactaaatgggtggaagctgccaaaggaaccaatttgtttttcgctatttatataacggaggatggaaaaagaacgtatgagactattcctttaaatgtggttatagagcgtgagaaacaaggacttgttcctgttccggatagaaatgaaaagggagataaactgttgttttggctgtctcctaatgatttggtatatctgccaactgaagaagaacgggaatttggtaggataaatgagccgatagatagggggaggatttataagatggtaagttgtacaggaaatgaagggcatttcattcctgcaaacgtggctaatccgatagtacctgttattgagttgggcagtaataataaggcacaaagagcatggactaatgaaatgataaaagatatttgtatccctattaaagttgatagattgggtcatattatagaagttaagtatagaatagatgaataatataaagttatttcaagaaaaaaagatccgttccgtatggaacgaggaagaacagcaatggtgtttttctgttgtagatgtagttggtgtattgaccgatagtgtgaatcctacagactatcctgaattggcccaagaacgtatgaaggaactctatgaatagaaaggttatcccaaagattggattgacaagcgtttgagaggtattgccattcgttagagtctgacggatgagtggaaggaaaggggaattacggaaaaaagtgattatgctattcttacggcagaatttctaaagcaacgtttggactgactccctcagactataagatatataaaggactgacaaagaaaaatcaaaatcttcgtggccacatgtctgatttggaactgatttttacgatgcttggtgagataaacaagtggcacagcgtggcggaaacattgctggggtggctcgtgagcaagccgaaaaagagttgggtggtagtattgtttctcctgaaaaatttctatcggattccgataagcaggatgatactttagaacttcctttctttgaaaataatgaatgaataattataaaatctatatgctatgattaagaaaacactttatttcggaaatcctgtttatctgtctttgaaaaatgctcagttggtgataaaattgccggaggtggtgaaaatcagtgctttgcccgaagggttcaagcaaatgtccgaggtaactaaacctatagaagatattggagtagtggtgttggacaataagcagataaccattacttcgggagtattggaagctttgcttgagaataattgtgcagtcataacctgcgattctaaaagtatgccggttggtttaatgcttcctttgtatgggaatactacacagaatgaaaggtttcgtcatcaacttggtgcttctctgccattaatgaagcaactttggcagcaaacgataaaaaccaaaatagaaaatcaggcagtggtattgcgtgagtgtgttggggaagaaataaagtgtatgaaggtatgggctgccgatgtgaagagtggggatccagataacttggaggctcgtgcggctgcttattattggaagaatttgtttaagatagagggctttacaagagatagagaaggtattcctcctaataatctgttgaattatgggtatgccattttgcgagcagttgttgcccgtggattggttacgagtggacttttgcctactttaggaatacatcaccataatcgttataatgcttattgtctggcagatgatataatggaaccctatcgtccgtatgtggatagattggtatatgatgtgttcagggaagaagaattggattgtgttgaattgacgaaagaactgaaagcgaggttattgacaattcctacattagaaactgttatctcagggaagcgtagtcccttgatggtggctgtgggacagactacagcatctctgtataaatgtttcagtggtgaattgcgcaaaatttcttatccggagatgtaatggaccggtttagtgaatatcgtattatgtgggtgttggtgctgtttgatttgcctaccgaaacaaagaaggataaaaaggcgtatgcggactttaaaaaaaatctgcaaagggatggatttaccatgttccaattctctatatatgttcgtcattgtgcaagtagtgagaatgcagaggtacatataaaaagagttaaatctttcttgccggagcatggaaatgttggaataatgtgcattacggataaacaatttggaaatatagaacttttctatggcaaaaagacagtagatgtaaatacccctgggcagcaattagaactgttctgaaaagaaaatcccgccatatagcgggattttcttcttggaaacgacgtctttttttatttctaatatcttatgtaactatgtgtatattagattgttgttgataatctgttgtttccaatgtttcaaagatactaaaatgagagcaaatcacaacaatgtgagaaaaacaaagcgatatttgaagttgtttccaatgtttcaaagatactaaaatgagagcaaatcacaaccctgtcttctcgccgtaaaggcggacttggttgtttccaatgtttcaaagatactaaaatgagagcaaatcacaactaaagaggaacgttttgaacctacattttgttgtttccaatgtttcaaagatactaaaatgagagcaaatcacaacagaatgtaaaattcataggagcaacagagggttgtttccaatgtttcaaagatactaaaatgagagcaaatcacaacataatctgatacaatttgcttctgccagtgttgtttccaatgtttcaaagatactaaaatgagagcaaatcacaacatgatattattagtagtgcttatgattgggttgtttccaatgtttcaaagatactaaaatgagagcaaatcacaaccttctgctatatcggctttacgttttttggttgtttccaatgtttcaaagatactaaaatgagagcaaatcacaactgtcaagcgttaatgcgccttggtcttccgttgtttccaatgtttcaaagatactaaaatgagagcaaatcacaacgtcttaacctctgcgaaccctaattacaggttgtttccaatgtttcaaagatactaaaatgagagcaaatcacaaccggattgtacatattattgaatggcttcccgttgtttccaatgtttcaaagatactaaaatgagagcaaatcacaactgctggacttgtgtagattattattgtattgttgtttccaatgtttcaaagatactaaaatgagagcaaatcacaacaatttcatgacgggcttgtttttcagtaaggttgtttccaatgtttcaaagatactaaaatgagagcaaatcacaacggacgcagccgtagggccttgaaaataaaagttgtttccaatgtttcaaagatactaaaatgagagcaaatcacaacaatctgcgaagtagtttccgataatggcagttgtttccaatgtttcaaagatactaaaatgagagcaaatcacaactatatccaataatacttccatgtttcccttgttgtttccaatgttccaaagatactaaaatgagagcaaatcacaaccctgtacaccattttcaatgctgttgaccgttgtttccaatgttccaaagatattaaaatgagagcaaatcacaacgtcctcgtgctgtggatcgtagtgcaactggttgtttccaatgtttcaaagatactaaaatgagagtaaatcacaactcttggaggaaaatatccttcatatcatagctattttcaatgtttcaaagatttttcgatgagtggtaacgtaatccagtgtatgcaatattgaatgacactggattgttatgttttcgtaatgattcatttgtttttcgatgaattcactgtcactactgctatttgttccatagaggcttacggatacctcttcatacatataatcgagatattgttgggcttgtgccatatctggatatgtgttcttagttagaaattctgtattggaggctgacacttactgtgtacaaaggtacacagtaagtatattgataagagttttattcgttttttcatgtttattttatctgtgtttaccaattatctgttctaaatggagctacaggaataccataggtactgaatacacttgcttttgcataatttttgtaagcgtatcgaactgctatcggatgctgcactttatcgcatgatacggcaaggcgggttgttttggtttctatttcggcatgagccggatagaaaattctatcttcaccggcaatctcaaatccttcgagcggggtccacatcggacaaagtccgcgttgtgcattatctatattaatgtatattttatttcctgatatttccatagatttgtaaatgggagtggcatagccgaatcctttttgcccataggtttgggcaagggcccaaagagccagacggctaccaacagtttctttatttgtcgggtggataaagacgggatgccctatatccaaagtagtgaccatcccgctattaggaatgtctttcatattttgttgttggacttcgcgcatacgggcggctgaggtaccatttgctccttcataattgaaaggagcaatctctacaaagtaaaaaggaaattcccctatattccatttgttacgtatgtctttgacaaagacgggcatcagatctttatataaatcaacattgtcgcgattactttcgccttgataccaaagaaagcctttaatagtaaaattagtgaatggtgctattttgctattgtaaagtacacatggagtagctgtaatgttttttattggttcattattattgagtatggataaatcgatacttttaaatggtgtaatagcttcccggctcatccatgcttctacttttgagccaccaagtgaagatataatgataccgaccggtacttctaagacttcttgtagatatcgggcaaaaaagtaagcagttgcacttgtatgggaaacgttgacaggagtgttttctaaccattcacctttacaatcctcttctggtgttttgctaaattgacgtatccattttccatccttagaatctgtattgtagatacggattggagtagaagcttttgctttggcaatgacgtcgtttgtaccttgagtcggttggcggtcaaagccgctcattggcatttccatattcgattgtccggaacaaaaccagacttcacctattaatatattttttaaagttaggagctctccgtcgttgaaagtaatttcataaggacctccagctactggtgtagagatattcaacaaccattttccttgtttgtctgctattgttttatacgttttgttatcccatgatgtttttatagtgatgggagaattcttttgagctttaccccaaagttttacatttgtatgttgttgcaataccatattactgctaagtatggagggtaattgtactttagcttttacaaatgtagaggctgatagaaaatgtactaatagaagaaaggttattaaggacttaactactgtgtaatttaaacatctttttttcataatactatttcattttaataaataagataatgtttagttctttgtgacaaaaatagataggggaacttaccttccaggttaaattgttattaatttgcacataatatcagtttaataggatcttgtttttaaaatcttatgtcctttatttgtcgcggggatttttttgttacctttgcaaagtgttttttaacaatatgctatgagaaataatttgttgatttggatattatgtttctttgctttgggagatttgaaagtgctggcctctacagattatggcctctattttaagtctcattctgcaccgggcaatgaacgcacttctttggctcttgatgaaaattctccttttcgtgtgaagaatgagtttactatagattttcaaatgtgggttcgtaatgagcctgattttggagctattcttcatttatgtacgaatgaaaaccaattccttcattttgtttttgcggcaggtgacaataatcggaacttcccggctttagtttttaatgaaggaatgttctctattgatactaatataaaaaaaaataaatggattccggtttctttgcatcttaatataaagaataatcaaatcgatttgaaatatgatgataaagatactacgatgatagtacctttgcagggtactgaggatatcacagttttgtttggaaaatctccttatttctcgtcagatgtggctcctatgaatattagggatataaaaattacttgtgatggggatttaatcagacattggaaattgtggaagcataatggtgaagtctgtcttgacgaagttaaaggagccagggcgatggcttcctatccctcatggttgattgatgaccatattgaatggcggaaaatatatgcagagaagacttcaggacgtttggacgtcgcttttaatgctcgtgatgctttgttttatttagttcgacaagataaagtagatatattaaatgggatttcgggtaatatggataaaatcactgtagagaagggatatccggtgatggaatatacggaccatttggtatatgacactttaacaaatcaattgttttcttactctttacatgaaaaacttgtttctttcttatctgttgatgaaagaacttggagcctgagtgaaaggcatttggacgagcctcgttattataatcatgcacgtacctttaattcaagtgattcttcattctatttttttggaggatatggtttttatcaatatagaaatgatctgtacagattgaaagttggtacgaagcaaattgaaggagttacttattctcctgcgatttctcctcgttattcatctgctgctgctatagtgggagatgagttgtatctttttggcggtcgtggaaatagacagggaaagcaagagtttaatgctcatttttactatgaattatgtgctattaatttgaaaacaggaaagtcgcgttgtgtgtggaagaaaaggcagtctacagatatattaatgatggcatcttccatgtattttgaaccttcagatagctctttttatgcagttagcatgaaagatggaggcagtctatggaaagtttttatgaatgactctgtttgggtggaggtttctaagcctattcataatgatttagtctatcaagattgtgattttagtttttattcatcacctgctcatcgcaagttgtatttggtaatggataagattttgagcgatcgcacacatgatgtagctatttattctatcaatactcctttgttgaatgataatgaaattatgcaggttgcagataaaagtttaacacctgtatggttgtggtggttgtgtggtatagtgttgctaggaggggcgtttttctttatctaccgaataaagtgtggtaaaaatagggcgatctctgaagatataaaaagcagcgatactccaatagaaacttttcattttagtgaatcagtagaagaaacagtggaggtagaaaagttctttgatcgaagccgttcggcaatctcgttattaggtacatttaatgtccgtgataaagacggtaatgatataactggtgcttttacacctcggttgaaaagtttacttgtattgcttgtcctttatacagaaaagaacaaacaaggtattttgactaaaaaagttacagatattttatggtcagataaagaagaagaggctgctcgtaataatcgaaatgtaactttgcgtaagttgcgtgtactgttagaaaaagtaggtgatgtagagattatcagtgatatgggattcttgtgcatcagatggggggaaggtgttttttgtgattatcggatggcattggagtgtattcgtcaatttaaagaaaaaaatgaagaacatggagatgataagctgctaaatcaaatactggagatattattgtatggtccgttgctttcaaatacaattgttgattggttggatgaattcaaagattcttattccagtctttccattgatttgctgagaaatttgttgaatgtgcagcgtaataattatgatacggtactacgcattgctgatatattgtttttgcatgatcctttgagtgaggaagctttagttgccaaatgctctgtcctttttgcacaaggtaaaaaaggtattgtgaaaagtgtttatgaccgtttttgtaaggagtataaagactctttgggagaagagtataaagtacctttatgtaatttgtacaaatagctttcaatgacataaaactagatgctttcttatgccaagaggtgtaagtgataatattttaataataaagcgtttaattgtaatgattaagcgcttttttaatattcctttaatagaagataatcctatattttaagactgagttctttattttgcacaggtagaaaagctcttgtggttctctacatggggtattgagattgtgtgtaactaacttaatcataacactatgaaaaggatttttttgcttgttttgcttatattaggcttggtaatttcttcttttaaggttttgtctgcaaattctccggagaaactctacgaaaatttacagaaaaaattggcctctgggtggaatacttgggatactcgtagcgtattgacgcacgtgtttcttccttatggctttgctgttgatctcaacatgattgattctgatgggagccgagtgaagagatttagaattggtgaccgaagtaaaggggcgcctatattgcagcccgggcctcattcttttgatggaacctatactaaaataacagtgaattggcgtggttacaaattgcaagtggaaagtgctgccataggacttaaaaatgtgattttgattacaccattggctgaaacaaaaaaaggtgggagattggcagtaattcctgaaattctttggaaacgtggtaatacactggttgtaaatactcgaagttttgttttggcatcacgcgatagggctgttgaaatagaaacatatatagaaggtgaacttctggagaaaaaaggcaaggagtttattgtttctttgaattctccgattgcactttgttgcggagaggctatgagtctggagaaagcaactgcttttgtaaagagacaggcgcaagaatttgttacaactaataaaaaaaggtttggtgagaattacgattgctacaatgccatgcaaagtgttttggcatgggataacatatatgatcccagtattaggaaagtgataacccctgtcagccggatttggagttctgaatggtttgccagtgaagatttcggtggttttacgttgttttgttgggatacttattttgcagcgatgatgctggctgttggtagtaaggaattggcttatgcaaatgctgtggagataaccaaagcaataactgaatgtggttttatacccaattgcttttatagtaatggctttaaatcaagagaccgctctcagccacctgtcggttctttggttgtttggatgttgtacaaacaatataaagagaagtggtttttggagttactttataaagaattgttgacttggaatcgttggtggagtaagaatagggaggataaaggtctattatgtttgggaagtaacccttatgaaaaggttacttattttagatctgaatttgatacgaattgtcattatggagctgttttggagtcgggcctggacaattcacctatgtatgatggagtatcttttaataagcagaaacacttattggagcaacaggatgtgggtatatcttcattgtatgtaatggattgtgattatttggcattgatagcagaggaacttaattataagaaagatgctatggagcttagggagcgtgcggattattatcgtactaatttgaagggcttatgggatgaaaagacaggtttttattacaatcgttctactaggaccatggattttaattatcgtacctcgcctacttgcttttatccattgttggcaaaagcacctacacaaaatcaagctgaacgaatggtaaaagagcatttattgaatactaatgaattttggggaaagtatgtgattccatctgttccgaaaaatgatccggcttttaaggataatgagtattggaggggacgtatatgggctccattgaattttttggtttatatggggctgaataactatgagtttcgggaagtgaaacgcctttttgctgaaaaatctaagaatttgttattgaagtcttggttatcacatggttatgtttttgaaaattataatgctcttactggtataggggatgatgttgtaagaagtgataaattctatcattggggtgcattattgggatatatttctcttatggagaatggagttgtttgt

SEQ ID NO: 1126 - DNA, 24530 bp, synthetic construct
  source 1..24530: mol_type = other DNA
  misc_feature 1..24530: note = Synthetic
cggtggatatgtcatctgcggactgacaggtagcggagagtgttttgctgtccgtgacccgtggggaatacgtccgggattctggtacatggacgaagaaatcatggtactggcatccgaacgccctgtgattcagactgcactgaacgtaccggccgacagcgtacatgaactgcttccgggacaggccattctgcttaacaagaaaggggagatgcgtctggcgcagatcaatgaacccaagcagaagagagcctgctcgttcgaacgtatctatttcagccgcggcagtgacatggacatttaccgtgaacgcaagctgctgggggagaaactggtagagccgatcctgaaggcgattgattatgatgtggtacataccgtattctctttcattccgaatacggccgaagtggctttctatggaatgctggaaggatttgacaattacttgaaccagttgaagatcaagcgcatcgaagccctgggacacaagcccagccacagtgagctggaacagattttgtcgcagcgcatccgcagcgagaaggtggccatcaaggatatcaaactgcgtaccttcatcgccgaaggcaatacccgcaaggacctggccactcacgtgtatgacattacgtacggtagcctgattccttatcaggacaacctggtcatcattgatgacagtatcgtacgcggaacgacgctgaagcagagtatcatctccatcctcgaccgtctgcatccgaagaaaatcgttatcgtttcttcgtctccgcaggtgcgttatccggattattacggtatcgacatggccagcatggagcagtttatcgccttcaaggcagccgttgccttgctcgaggaacgtgacatgcgccaggtactggaagaggcctaccgcaagtcgaaggcacagctgggattgccgaaggaagagatggtcaactacgtgaaggagatatacgctccctttaccgatgaggagatttcgcggaagatggtggaactgctgactcctgccggtactcaggccaaggtggaaatcgtgtaccagacgcttgacggtctgcacgaagcctgtccggaccataccggcgactggtacttcagcggcgactatccgactccgggcggagtgaaactggtgaaccaggccttcatcaattacatggaggaaatctatcagttttaagcaggtgagtgacgggacggcaacttcggggaagactcatacgccagtcgctggatggggaagaacgaagcggcatccgcacgcagatacggtgaatagacagaaaaacaattaaaaaagaatatatagtatataatagaaggtaatgagaaatgtaacattaatcctcgacgacgggagccgctttcatggcaagtcgttcggttatgagaagccggtagctggtgaagttgtgttcaatactgcgatgaccggttatcctgagagcttgaccgacccttcttatgcgggtcagttgatgacgttgacttatccgctggtgggtaactatggagtacctccgtttacgttcgaagccaacggtctgcctacctttatggaaagcgagaagattcatgccgaagcgattatcgtgagcgattacagtgagaaatattctcattggaatgcggtagagagtctgggcgactggctgaagcgtgagcaggtgccgggcattacgggcattgacacccgtgagctgaccaaggtgctgcgcgaacacggagtgatgatgggtaagattgtgttcgatgatgagccggagaatgttccggaagcagcttatgccggagtaaattacgtggataaggtttcctgcaaggagatcatccgttataatgagggagaaggcaagaagaaagtggtgctggtagactgcggcgtgaagtcgaatatcatccgctgcctgctgaaacgcgatgtagaaatcatccgggttccctggaactacgacttcaacggcctggaattcgacggattgttcatttctaacggtcctggcgacccggatacctgcgatgcggcagtacagaatatccgcaaggccatgcagaacgaaaaattgcctatcttcggtatctgtatgggtaaccagctgctgtcaaaggctggtggagccaagatttacaaactgaaatacggtcaccgcagtcacaaccagccggtgcgcatggtgggcacggagcgctgcttcatcaccagccagaaccacggttatgcggtagacaacaataccctgggagccgactgggaaccgcttttcatcaatatgaacgacggttcgaacgaaggtatccgtcacaagaagaacccttggttctcggcacagttccacccggaagctgccagcggtcctaccgacactgaattcctgttcgatgagtttgtaaagttgctgtaatccattaaaagttaagtagacaatgaaagaaaatataaagaaagtattattgttaggttcgggagctctgaaaatcggtgaagccggtgagttcgactattctggttctcaggcattgaaggcactgaaggaagagggaatcgaaaccgtactgattaacccgaacatcgctaccgtacagacctcggagggtgtggcagacaagatttatttcttgcccgttactccgtatttcgtagagaaggtcattgccaaggaacgtccggacggagtactgctctctttcggaggacagacggcactgaactgtggtgtggcactttataaggccggcgtattcgaaaaatacaatgcgcaggttctgggtactccggtacaggctatcatggataccgaagaccgtgaactcttcgtacagaagctggatgaaatcaacgtaaagaccatcaagagtgaggccgtagaaaacatcgaagatgcccgccgtgctgcccgtgaactgggatatccggtcatcatccgtgcagcttatgcactgggcggactgggttctggtttctgtgacaatgaagaagaactgaacgtactggctgaaaaggcattctctttctctccgcaggtactggtagaaaagagcttgaagggatggaaggaagtggaatacgaagtggtgcgcgaccgtttcgacaactgtatcacggtttgtaacatggagaacttcgacccgctgggtatccataccggtgagtctatcgtgattgctccttctcagacactgaccaacagcgaataccataagttgcgcgaactggccatccgcatcatccgtcacatcggtatcgtgggtgaatgtaacgtacagtatgcgttcgacccggaatcggaagactaccgcgtaatcgaggtgaatgcccgtctgagccgttcgtctgcactggcatccaaggctacaggatatccgttggctttcgtggctgcgaaactgggcttgggttacggactgttcgacctgaagaactctgttacaaagactacttcggcgttcttcgaaccggctctggactactgtgtatgtaagatccctcgctgggacttgggtaagttccacggtgtagaccgcgagctgggttcttcaatgaagtcggtaggtgaggtaatggctatcggacgtacgttcgaagaagctatccagaaaggtctccgtatgatcggtcagggaatgcacggattcgtggaaaacaaggaactgaccatcgaggacatcgataaggccttgcgtgagccgaccgacaagcgtatctttgtgatttcaaaggccatgcgtgccggatatactgtcgatcagattcatgagctgaccaagattgacaagtggttcctcgacaagctgatgaacatcatgcagacatctaaggaactgcacgaatggggcaacaaccatactcagttgtctgaactctccaaggacctggtatacaaggctaagcgtcagggattctcagacttccagattgcacgtgccatcggatggcagggcgacatggaagacggtatcctggctgtccgtcagtaccgtaaggctgcaggcatcctgccggtggtgaagcagatcgataccctggctgccgaatatcctgcacagaccaactacctgtatctgacttacagcggggtggctaatgacgtacattacctgggcgaccacaagtcgattgtggtactcggttcgggagcttaccgtatcggttcttctgtggaattcgactggtgcggggtacaggcactgaacaccatccgcaaggaaggataccgcagcgtaatgatcaactataatccggagactgtgtctaccgactatgatatgtgcgaccgtctgtatttcgacgagctgactttcgaacgtgtaatggatattctcgaactggagaacccgcacggagtaatcgtatctaccggtggacagatcccgaacaacctggcacttcgtctggatgcacagcatgtcaatattctgggtacttctgccaagagcatcgacaatgccgaagaccgtgacaagttctctgccatgctcgaccgcatcggtgtggaccagcctgagtggagcgcgctgacttcaatggaagacatcaatgcctttatcgacaaggtaggcttcccggtactggttcgtccgtcttacgtgctttcgggagctgccatgaacgtatgctctaaccaggaagaactggaacgcttcctgcagctggctgccaacgtatcgaagaagcatccggtggtagtaagccagttcatcgaacatgccaaggaagtcgagatggatgctgtggcacagaacggtgaaatcgttgcctacgccatttcagaacacatcgagtttgccggagtacactcgggtgacgctactatccagttcccaccgcagaaactgtatgtagaaaccgtacgccgtatcaagcgtatctctcgtcagattgccaaggaactgaacatttcaggtccgttcaacatccagttccttgcccgtgaaaacgacatcaaggtaatcgaatgtaacctgcgtgcgtctcgttcgttcccgtttgtcagcaaggtattgaagatcaacttcatcgaactggctacccgggtaatgctcggcctgccggttgaaaaaccgaacaagaacctgttcgaactcgactatgtaggtatcaaggccagccagttctcgttcaaccgtctgcagaaggccgacccggtactgggtgtcgacatggcttctaccggtgaagtaggatgtatcggtgaagacacttcttgtgccgtactgaagtctatgctgtcggtaggttaccgtattccggaaaagaacatcctgatgtctaccggaactccgaagcagaaggtggaaatgctgaaggctgcacagatgctgaaggcaaaaggctacaatatctatgctaccggaggttcatcgaagttcctcactgaaaacggcatcgagaatacccgtgtatactggccaagtgaagaaggacatccgcaggcattggaaatgcttcacaagaaggaaattgatatggtagtcaacattccgcgtgacctgtcggaaggtgaactggacaacggatataagatccgtcgtgcggcagtcgacctgaacattccgctggtaaccaacgcccgtctggcaagtgcctttatccaggcattctgcaccatgacgatcgacgatatcgctatcaagagctgggacgagtataaataattgctgctccctgcactgagttttacatacaagcctctttccggtggtctttctgataccggaaagaggcttttgttttgtctgcggaaaacctcctttttgaagctgaaagttttatttgtgttaaaatgttattattttacccgtatggtagcgaacttttggggtatatcctttgttttatgaataaaaagtagtaattatgtgataaaatgacaaaaggaaaaattttaatacagaagttatgaaagaaacaaataattttcgtgtagaaagcgacctgatcggttcacgcgaactttccaatgacgtactttatggagtacagactttaagaggtatagagaattttgaaatcagcaaattccggttgagcgaatacccgctgttcattcatgcactggccattaccaaaatggcagcagcccgtgccaaccacgaactgggactgatatccgatacattgtttgatgccattacacaggcttgtaatgaaattctggaaggccgtttccacgaccagttcccggtagacatgatacagggaggtgccggtaccactaccaacatgaatgccaatgaggtcattgccaaccgtgcccttgaaatcatgggccatcagcgtggagaatatacttactgctctccgaacgaccatgtcaactgctctcagtcgaccaatgatgcctatcctactgccattcatctgggaatgtatgccactcatctgcgcctggttcccgccttgcaggaactgatagaagccttccgccgcaagtcccgtgagttcgctcacatcgtgaaaatgggacgtacccagttggaagatgctgtaccgatgaccctgggacagacattcggaggttttgccagcatcctgaatgatgaaatcaagcacctggatgaggctgccgccgacttcctgaccgtcaacatgggcgccactgccatcggtaccggtatctgtgcggttccgggatacgccgagaaatgcgtcgctgcattgggtgacattaccggatggaacatccgtctggccgacgacctggtaggagctacctccgatacatcgtgtctggtaggctacgcatccgccttgaagcgactggctgtaaagatgaacaagatatgcaacgaccttcgtctgctggccagcggtccccgttgcggactgggtgaaatcaatctgccggccatgcagcccggctcttccatcatgcccggaaaggtcaatccggtcattccggaagtcatgaaccagatttgctacaaggtcatcggaaacgaactctgtgtcactatggcaggagaagcggctcagatggaactgaatgccatggaaccggtaatggcacagtgctgcttcgaatcggccgacctgatgatgaacggtttccgtaccttgcgtaccctgtgtgtcgaaggcattaccgccaatgaggcccactgcctggaagaggtacatcacagcatcggagtagttaccgcgctgaatccggtcatcggatacaagaactccaccaagattgccaaggaagcgatggagacaggaaaaagcgtttatcagctggtgcttgaccacggagtactgacgaaagaggaacttgaccggatcttgagtccggagaacatgattcatcctgtaaaactcaatatctctcacaaagagctttaaccggatgctctggtaatgaaaacgcctgtatgcccaatcccggaagggaggcggcatacaggcgttttttattagaataatagctgtgtaagcagcagtccgactacgatggccactgccgtagaaatcagtcccggaagcatgaaggaatgattcaggatgtatttcccgatacgtgtacttcccgtactgtcgaaattgatggcagccactaccgtaggatagttcggtatgaagaaataaccgttgacggccggaaacagtgcgatgaggagcagcggagagatgcccagtgcaatacccagcgggacaacggcacggaccgtagctgcctggctgtagagcaggatggacatgacaaacaatgccagaccgaagagccatggcatcgactggatgatctcgctgatgcccgatgtcagccgttccatgttgcccgacaggaaagtgtctcccatccaggcaattccgaatatggcaattacggcctgcatgcctgccggaaagatgtttccctgtacggccttgattccgtcaatccggcataccagcaggataatggccgccgtactgagcatgatgatttcaatcagtgccggcatattcagtgtcacatattctccctgatagaggaacgaagggcggagggtctcgatggaaccgaacagcacaatcagcagggtagccagcaggaagatacctaccgacagccgtgcctttcccatgtcctggatgtggcatgtctgtaccgatgtattctcgataataccttcccgtactctgcgctggtactccgggtcgtctgccagttccttgcccgtacgcagtgagcagaaagctccgaccatgactccgataaaagtagccggaaccgacactttcaggatatcgaacagtgtgagattaaagcccgacaacagtcccagaaaagccactgtagctgccgaaatcggactggccgttatcgcctgttgcgatgcaatgaccgcaattcccagcggacgctccggccggatcttggtttcccttgccacctcggcaatcacaggcagtacggaataggcaatgtgtcccgttccggcaatgaacgtaaacaggtaagtcacaatcggactcagtatcgtcacgtgttccggatgcttgcgcaggatgcgctcagccagtttcaccatatactccagtccccccgccgcctgcatgcacgaagccgcagttaccacagccgcaatcatcagcatcacgtcaatgggtggggtagtcggttgtatgccaaagacaaaagccagtatggccactcccagtcctccggtaatacccagtccgataccacccagtcgggctcccaatacgatagcccccaaaacaattaacagttgaagaattagcacaggataatcagttgtttaatttttgttcgtattcattcatccggcaaatctgccttccgggcgacaaagttactcatttttcagcagttaccgaaatgtttactgcccgtattctcctctcgtctgtatttttcctgcatattcagtcggcagggacataaatacgtgcaggacctctcccttcaaaacctattccgcttcctttcatcttgcgaaactcctgaagttccaaggttgctccagtccggcttagtcctgtcagctgcacatagtcgcttattcgcataaaaccatgttgtttcaggtattccaaagcccgtagtctgcgctcttccttcgaataaggagaaaccttcagtcggttttcttttccccgtttgagcctgcacatttctcctgtatgtttcaccagctgtttgtcagcccggaaacggatacgccgtactccgatgcttctggcattccgtcgggtttcctccgtgtcaaactcatccatctccttaccttccatcactcctagggaagcccggaatattccgatttcattcagtgatactgaatacccttttgccatgtaataagccatctgtctggccagttccgtcagtacgtggacgacggtgccttcttgcagcgcacttccatgcgcggcgatccgttccaccagttcctttgtcgtaatcattcccagactcttcatacggtaatagcatcgtgttccgtccgtaccgttcagttttccgatttcctgtttgatgtattcagccataataaaaagaattaaagttaaacaatagattgtcagttagtcgggttgtggaagacattgctgctgccggtatcggtaatccctgttttatcccttcttccgaccggggttcctgtcttcctgtgcggcccaagataatgtcacaaagaggcgaatgcaaattaaaaatgttaatttatcagttgacggtacagatttatccatccatatgaggtgtatgtgatccgtgttccgtgtgagaaatagctaacggaggtcaggctgacggaaagataaaaaataaggaacgcaatcggaaaagaacagtacaataggaatggcagaaaaaaaaagaaagcgacctttttcaagaccgctttaaatgttttcacaacggaatcatccttattgtgatttgcttcattttagtaattacaaatatacaaatctatttttagaaagaagtaggaaaaagctatttttttgcttatttttgaaaatattgataagaacagataggctatgaaaaaaatattaggtttggatttaggaaccaacagcatcggttgggcagtaatcaattcttttatagacagtgaaggcaaggaatcattgcaaggaatcgcttcggcaggcagtcgtattattccgatggacgcagcggtattgagtgattttaataaaggaaactcgaagtcgcagacagcagagcgtacccgtttccgcggtatccgccgcttattggagcgtcggttattgcgtcggtcccgtttgctgcgcgtactgagaattatggtttttttgcctgagcattatgcagctcagttggaccgatatggcaagtttctgtccggtgcagaacctaaactggcttggaaaaaagatgctgcagggaaatatgaatttttatttcaggtagctttcaatgagatgctggctgaattccagcaatcttgtccggatttgttgaaagatggaaaaaagattccttacgactggaccttatattatctgcgtaagaaagcactctcggctccggtcggaaaagaagagttggcttggatcctgttgaacttcaatcagaagcgtggatattatcagttacggagtgaagaagaggtagaagatacaaagaagcaagtggaataccatgctttgcgcgtggtttcggtggaagctacgggtgaatcaaaaggcaaggataaatggtataatgtttatctggaaaacggctggatatgtcctaaagcaagcagtatgcctttagactgggtcgggaaagtgaaagagtttgttgtcactactgaactggatgatcagggaaatcctaaactgaataagaatggagaggtgaagcgtacctttcgtactcctcaggaaaatgactggggattgctgaaagcccgtactcaaaacctgatagatagtagtggaaaaacagtgggaacttatatatatgattccctgttgaccaatcctggtctgaaggtaagaggaaaactggttagtaccattgaacggaaatattataaggatgagttgtatcagattcttaacaagcaggcagagtttcatccggaattgaaggactccgctctgttgacagagtgtctgttagaactttatccccaaaatgaaccccacaggaatgtacgctcttcttctgattttgtgcattttctgattgaagatatcttattttatcagcgaccgctcaagagtcagaaatcgcagatagaagactgtccttatgaatcaagagtttatcggaaagctgatggaactttgtgtcgtattcctttgaaatgcgtatcaaaatcccatcctttatttcaagagttccgtttatggcagttcatcgcaaatcttcgtatttacgaacgtgagaaaatcgtaaacggttctttgaaaacagacgtagatgtgacttctgaatttttaaaggatgaagcggactatgtggcactgtttgacagcctgagtaaaaaagcggaaattacgcagaaaaccttcctggcagagccggtgctgaatttggataaaaaaagacgggatgcttaccggtggaattacgtggaagataaaacttatccgtgtaatacaactcatgctgatatggctgcccgtttaagaaaagctggaatcagtgaagacgtactgacggctgatatggagttgagtttgtggcatattttatactctatatcagataaaaaagaactgaccaaagcgctgaccaagtttgcttcccaacgacacttgggagacgcctttgttgctgagtttgagaaaatgcctccgtatgcgagtgattacgcctcatattcgttgaaagcaatccggaaattacttccacttatgcgtatggggcattattggcaggaagaggcaatagatcctctcactcggaaccgtatcgagaaactgctgacgggagaatgggatgagaaaatccatcttcgggtacgtgagaaatccatgcatctgacggaactgtcttcattccgggggctaccgctctggctggcctgttacatcgtttacgaccgtcatgcagaagcaagggaaataacaagatgggaaaatccaggagcaatagatgatttcttggctgaattcagacaacattccttgcgtaatccgattgtcgaacaggtaattatggagacattgcgtgtagtgcgtgatgtctggaagcaggaaggaagaattgatgagattcatgtagagatggggcgtgaaatgaaaaatcctgcggataagcggaaaaaaatgacggcacaagctctggaaaatgaatataccaatctccgtattaaagccctgcttactgagttcctgaatcctgagttcggaatagaaaatgtacgtccgtattcaccggcacagcaggaaattctcagaatatatgaagaaggggttctggctgagacttcagataaggatcttccttctgatatagctgacatcttgaagaaattcaaggaagagcggattgagaaacgtccttcccgttcggaggtgcaacgttataagatgtggttggagcaaaagtatcgttcgccttatacaggcaaaccgatacctttaggaaaactgtttactcctgcttatgaaatagagcacgtaataccgcagtcccgttattttgatgactcgtataccaataaagtgatttgtgaggctgcggtaaataaactgaaaggaaatctgctgggctatgagtttatcaagcgccatcatggtgaagtagtggaactcgggggaggtgaatcggtctcaattttctcggtggcggcttacgagcagtttgtgaaagaacattatgccaataatcggcttaagaaagaaaaattattgatggaagatatccctgacggtttcattgagcgtcagttgaatgacagccgttatataagtcgtgtaatcaaatccttgctttccaatatcgtaagggaagaaggtgaacaggaaagtacatccaaaaatgtcatcgtctgtacgggtggggttactgacaggttgaaaaaagattggggaatgggggatgtgtggaatcagatcattcttcctcgtttccggcgcatgaataaactgacagattcgaaggattatactgcaatttctcttaatggtaatttgataccggccgttcctttagaactccaaaaagggtttagcaaaaaacgcattgaccatcgtcatcatgcaatggatgcgattgtgattgcttgtgcaaaccgtaatattgtcaattatctgaataatgcgtcggctttgtcagaggctcgtacagcgcggactgacttgcagcgcctgctttgcgacaaaaagaagacagatgcgaacggcaactatcagtggctgattcgtaagccatgggatacttttacgcaggatgcttatcaggtcttgcaagatattgttgtcagctttaagcagaatttgcgtgtgataaaccgtacgactaattattatcagcgttatgatgagagtggcaagaaagtatttgttccacagactggaggagacagttgggctatccgtaaaccgcttcataaggatactgtttacggtgaagtcaatttgagaagagaaaaaacggtttctctaaaagatgtattgaaaatgccggaaaggattgtagataagtcttttaaatataagttgaaagaattgcttacacaacagtatggtataaaggaaatttcggcatattttgagaaaaataagtcagactggcctgatattgacctaaagaaaataaaagtgtattattttaccggtgagacgaaataccgtttctttgctacccgaaagcctttagagggttcttttgaccaaaagaaaattgagaatggggttacggacacgggaattcagaagattctggtcaatcatttgctgcagaatggcaataatgcggaggtggctttttctcctgatggaatagaagccatgaatctgcatattgcctcgttgaatggaggtaagccacatcagccgatttataaagtccgtgtatatgaaaaggctgataaatttccagtggggtgtaaaggtaataaatctgataaatttgtagaagcggccaagggtaccaatttgttctttgcggtttatgagtattcacagatagataaggagactggaaaggtgagccgtaaaaggtcctttgcctcagttccgctgaaccaggtgattgaccgtctgaaacggggattgtctcctgcgcctgaagatgataagggaaatgctccagcgtttgtgttgtctcccaatgatctggtttatttgcctacagaagaggaacgtgaaaaaggtgtaatagaatcagtcttggataagagccggatttataaaatggttagctgtacaggtaatcgaagtttttatattccttttacagtagcaaatgtgattagtgataaactggaattttcttcgatgaataaggtggaaaaggcaatcagtggtgaaataatcaaagacagctgtattccaataaagattgaccggttggggaatattcgttgcataaataatttatgatactatgattaaaaaaacactgtattttggaaatcctgcttatttgtcactccagaataaccagttagtaataaaacttccggaggtggagcgtactgcttcacttccggatagcttcaaaaagcaaacggcagtcactaaacccatagaggacatcggactcgtagtattggataataaacagattaccattacctcaggagttttagaagttttattggaaaataattgcagtataattacttgtgacagtaaaagtatgcctgttggattaatgcttcctctatatgggaatacggttcaaaatgaacggttcagggaacaactttcagcttcacttcccttaaaaaaacaattgtggcagcagacgattaaagccaagattgaaaatcagtctgctgtgctgataaactgtttaggagaggaaagcagatgtatgaaggtctgggctgatgatgtaaaaagcggagattcggaaaatctggaggctagggcggctgcgtattattggaaaactttgtttgctgatattgatgggtttactcgtgatagggaaggaatatctcctaataatctattgaattatggatatgctgtgttacgtgcaatcatagcacgggcacttgtatccagtggcttacttcctactttaggcattcatcatcataatcggtataatgcatattgtctggccgatgacataatggagccgtatcgtccttatgtagatgagttggtttttggcttggtacaacaatatggaaagaatcttgaactgacaagagatattaaagcgaaacttttgacgattcctacgttagatgtcataataagtgggaaaagaagtcctttgatgattgccgcaagtcagacaactgcttcgctgtataaatgttttagtggggagttgcgcagaattgtttacccggaaaaataatttatggacaggtttagtgaatatcgtattatgtgggttcttgtattcttcgatttgccaacggatactaaaaaagataggaaggctcatgcactctttcgtaagaatctgcaaaaggatggctttaccatgtttcagttttcaatatatattcgtcattgtgcgagtatggaaaatgcttcagtgcatattaaaagggtgaaatcgtttttgcctgaatatgggcaagtaggtattatgtgtattactgataaacagtttggtcaaatagaactgttttatgggaagaaaatacaggaacctaatgctccagggcaacaacttgaattgttttaaatataaaaaatcccattcgatgtgagtgggatttttttataggaaacgtttttttatttctatgttataatgtaatattttggaaatcagtggaaaataacgagtctgctgtttcctatattacaaaggtactaaaatgagagcaaatcacaacaatttgctgcttcacagcaattacaaacaagctgtttcctatattacaaaggtactaaaatgagagcaaatcacaactttcgattccttcctctctctgttgctgtagctgtttcctatattacaaaggtactaaaatgagagcaaatcacaactagcaaaaacaaagatacgtttttctttcgctgtttcctatattacaaaggtactaaaatgagagcaaatcacaacactctaccgaagatgtttcctccttaacggctgtttcctatattacaaaggtactaaaatgagagcaaatcacaacgctagtaaggagcaaaagacggagatgctagctgtttcctatattacaaaggtactaaaatgagagcaaatcacaacaaagaagagtccggtgctcgtgtcgatgaggctgtttcctatattacaaaggtactaaaatgagagcaaatcacaacaatgctgttttcaacattggtaattttactgctgtttcctatattacaaaggtactaaaatgagagcaaatcacaacaactcttgcgtgttacttcttgttacactggctgtttcctatattacaaaggtactaaaatgagagcaaatcacaacaatttctaaatattttaaatctttctattgctgtttcctatattacaaaggtactaaaatgagagcaaatcacaactgtcggtgtatcctcgtgtcctgtgtcggtgctgtttcctatattacaaaggtactaaaatgagagcaaatcacaacgatatttcatgtagtatgtcagttcatccagctgtttcctatattacaaaggtactaaaatgagagcaaatcacaacttctgttgcccaatataatagcattctggggctgtttcctatattacaaaggtactgaaatgagagcaaatcacaacgaagttaataaatcaattttacggtacaaggccgtcttttactattgaaggtacaaccaagaatgcataggagttaatctactttcttggttgtacaagaggtactgtttctggtattgctgacgaatcagcttactccttcagcttatacattttcacccaatcaacctccatcttgacaggatattctttcgggtcggctttacctacccacgtaccttctatctgcatgtcaataagcaggtagtaaggagttccaaacgggtattgtcctttcttgtcggtttcaatcttgggataagtaaaggtatgattcccatttatggagaacaccagactgtcgggaagtatctccacggcatatacattatatccgtcgggatcaatcttaccgattccaccttgtttgggattatctttgtgcttcagtacaaatgtgtaatatgaatgaaccgtctgataggcaatcgagtcatggttcagacgttccataatatcgatttctcctccatccggccatttgccttcgttcggaagcatccagatagccggccaggcccctttagccccttgaagccgggcttttacttccaccttgccgtatgtgatggttttcttgtctttagtatatactccgccggttatgtagcgtgccgtgtcttccggtgctattccgtcatttaccaccccgtgcaggatcatattgcttttgtttacctcatataggctggggtgtgaagacatgtggcggtcccagtcagacccgccgcgcggtattttggtccagtatttgtcatttatcttttttccgcggaaattttctttccatacaagtttgtactgcggctgctgtgcaaaaagatctgctgttgaggctacggcaaacagcaacatagccgccaatgtgattttgctaaaatgtctcatatgattcaatgtattttaaatgtatgttttaaggtaatccaactccctcaggtaatgaggcaataaaaatctttccatatgattcagatatggccagtatggaaagcgaagataaagatactaaaatggaagtaaactgcaatacgtttccttgcactttaaaactatggggcaatgtgcgaggagagaatgaccggatgtaaatgaaaaaagacctttttcggaacaaaattggtatattttttagggatgtgtgaatgcccgtaaaataatattctaaaattgaaatctttttgtcaacttatttgttattatagtgtaaggggataaaaaaccagtgagatatggctggagtctttcgggtaagtttcttcccgaaaggtgatatagaagatggtgcatagaacctgacaaaaagcagaataaaagaagttgacgtctcagaatttacctgcaaagagtgaaatcttaatttaacagtttaatcaatcaaaattaatcaatcaaacaatttaaggacttagtgtaaagtaggggaaaggtatgttaataaagagtaaaatgtgaatttaaacccttttgcttatagtctgttaacacgatttttttctcttattatcagtaaactacgaacagaatagttatggaaatagataaagaaacattcaataatagcttccgttactattaccgtccgttgtgtatgtatgccttgcattacataaaagacgtggatagtgcagaagatattgtacaagattgcttcgccgaggtttgggaaagaaaagacaatttggaagaagtttccaatatgagagcttatctgtacgccatggttcggaacaaatgcagtcattttctcaaggaaaaatcaaaattggaaacgacaggtgacgatatcgtggacttggagggtgagattagtgatgaggactacgaagaacgttcttttatcgaagccagaatgcttacagccattgattcgcttccggaaagatgcaaggaggcacttttgttgtcaagaagagacggactgaaacacgaggaaattgcgaaatgcatgtcggtttcggtcaacacagtaaagaatcatataaacaaagcattgaagattataaaggaaagtagatataaaatgtatttctttgtcctgggataagatttcgggacaatgtgtggacggaagaataaatattcttgtaactttaagataattatagtataaacgaaatatgtggtaatgatgaaggatttggaagataaaagtttgcagtttgttttggataattacaaaaaaggaatgtttgacacccgtaaggctttggggaagattaccaaagaaaagccagttaagcagtcaagaaatttgtttatgtattatgcatcggggcttgtagcttctgtattgatattggtgggaggatatgtgttcttcaggacctccgaagaactggctaccaatatcgtatcgagcaatgaggtggtgcgatgcatacttcccgacagtacggtagtgatattggctcccggctctacgctgagttatctgcccgaagatttcgaagagaaaaaccggaatgtgaagatgaagggcaaggcttatttttctgtgaccagagacaagaaatctcctttcctggtatacggacagcattcggctaccaaagtgctgggaaccaagttccagatcaatgaacagcgccctgactccattacggaaatctatgtggtatcgggacaggtatatttctcgtctttgctgaaagaaggcgaaggacttgtcctgaccaagggcatggaggctgcgctggcattcaatgaaagcaagccccggattaccgaaccttctactttgaacccctcggcctgggcagagaatgtatttgtgtacaacgatgctccggtgatggatgtactgaaagaattgtccgacttttttggagtgaagcttgccacttcgaaaacggacaagaaaataaccgctgaattcagagcagatgatttggacaatattctggaaattatggaaaaaacattggaagtaaaaataaaaaaagaataaagaggaacttatgaatgggaatatgggtgtgtagactccttgtgctgatgacattgttctcaaagatataccaactccccgcccaacagagcgggaccacaatcaggactgcaatcgaaatgctgaaaaagaaatattcggtaatgttcgtatacgattcttcgattgatttggatatagcgtatgaagaaaaggatctggcagggaaggatttaaaaggggtactgaaagagatattttccaaaacagacataaaatatgagataaaagacagttatgtgctgctcaataagatcaagaaatatacgttgagcggctatgtgtatcaggacagtggtgagaccgtaatcaatgcaactgtatttgatgtcaataccaagaccggaacgctgacgaacgaacacggcttctacagcatgatgctgcgggaggggatacatcggatcagggtttcgtatatcggtacgggtgagactacgctggatatcgacctgagaggaaaccgggtggaaacgttctttctgaagtcgggatataagttgggagaagtggtggttaccaccgacctgaattctcccctgaatgtagcccagaccggaaaggtctccattaaggccgaggattttgagcggggagtatattttatgaattctcccgatgtagtgagtacgctgcataatatgtcgggtattgcttccggtgccgaaccggtatcgggactctatgtacacggaggagaccatgacgagaacctggttctgttggacggggcaccgttgtatcatgtgaaccatatgggaggactgttttcggcattcaatacggatgtggtgaaaaacgtggatttctataaaagtgctttcccggccagatacggaggacggttgtcttcggtactggatgtgcgtacgcgcgacggaagcatgcatgagtttcgtggcaaactgtctctgggactgatggacggaaggttgcagctggaaggaccgattgtgaaaaatacgacttccttcaatatcgggatacggcgtacctggctggaaattgtgaagatgccttggctggagatgattaataccaaacaggagggagatacggagacaaagtatctgtttcatgatatcaacgcaaaggtttctcacattttttcagagaaaagcagagccaatatctgtttttactccggccatgattacgcaagtatagataaccggctggaggatgagacggaaacgagggtagagtatgataagtttcatgtaagatgggggagtgttacggcatcggccaactgggaatatatttattcacagaaactgttcgtcaatctgaccggggtgtatgcgcacaattcttcaaagttttatcatcggaaccagctttattttactggcagtggggcagcgcagcagagggcggaggaagtgaaaaataatttctctaccattgatgacctgggatacagactggaatttgactacagtccgaatacccggaaccgcttgcgattcggctccaattacatgaaccattgtctgcgtccgcaggattttaccgtaactgtttcggggaatgacagctccggacagaaagggggagaacagcctgaaacgagggtcgcatacagaggcaatgagtttacgctgtttgtagaagatgaaatcatgctggaccggaaggtgaaaatgaatgccggaatgtactacagcctgtttgtaatagacgggaagaacttccgttcgctggaaccccgtctgtcattgaattaccggatagactattcgacttcattcaaggcttctgtcacgaagatgagtcagtatatgcaccgtttgtcgagtacttacctgaatatgccgaccgattgctggataccttctaccgccaggaccggatattcttactcctggcagttggctgcaggcctgtatcataggtttcctgcacacgtaagcatgaaactggaaggtttttacaagatcatgaacaacttgattgagtacagtggtaccaaccggctgaacccttcggctgtcgactgggaagacaatatcagccggggccagggaaaggcgtatggcattgagtatgacgtggtatatgataataagcgggcttacctgaatctgtcgtatacactttcgtggaacagacgttttttcccggattttcatgaaacatggttttatgaccgttttgacaaccggcacaaactgaatgtttccctcaattacaaactgggaaaatacctggatctgtatgctttgtggcgcttccatagcggaaaccgatttacgcttccgcagcaggtgattgatgcaccggtgattccgggaagcactgccgataatacagcactgctggtgtatgatgtacccaacaatgcgctgctgccggcatatcataaactggactgcggagtacgctttaaggtgcagttgaaaaacggggtggaacagacttgggacctggcagtctataatgcctacggcagacggaatgccttttatgcagagcaggtccgcaaagaggacagaagcatggcgtggagaaccgtaggagcctttcctcttcttccgtcattttgttataccgtaaaattttagtcacgtaaaaatgaaaaaactgtgggccggctacttgctggcggcttgtgtagtggggagctcctgtgatggagaagttaccatcaaggggactgaaggtgagcagaaacctgtgctgtattgtttcccttctaatctgagtgatacgacatttatccgtttctcatggagtaagtcggtcaatgggaacgaagggatcaatagaggcagggaaggggtcggcatttctttctggctgaatggtgaggagaggaaggtgacgtctgtcgtatctgatacacagtccggaggttctttttttgtattgggaagattggaggagggagatgatatctcggtcagggtaaagcttccggatggaaaaacggtgtctgccgctacggaggttccttcgccttttcctttaaaaaaggtaagaatcaaagaggtggaagcttatgggaccagggcggtcaggtttgaggttaccttgcaggaccgccgtactacggaagattattacggggtaaaggtgttatacagatatccgtatggcggactgggtctggatgaaacaaaagatcctgtatcctgtacgctcatgctgaatacagataacgagccgttgctgaatgaccgttttggggtagatgatgtatttcatctttccgatgatttttatcagcatctgtatatttggaacgaccggaagattgacggccgggaatatacactgtcgcttgattttcttttggataataaggatgccctccgcatgtcggaagggaatcctctctataaacttgtcttatattcgctttctgaagatttatataagtacttgaaatcggtaaatgcattgaacaataacgacctgggaaaggccgggctggctcctgtacataaaaagtataccaatgtcgtaaatggactggggattgtagccggatgcaatgtgtatgaaacggattggatggaagcgtcttctttgagtgaatagtaaaaaataatggtactataaaagtaataaattgcttattatctgattttcacacttgtacaaattacaatatagattcatcttgttaatgtaagttaattaataagtagcggaatagtcctaaaaggggttttttatcacttacggatggaaacagaaaagaagaaaaaagaagaaaaaaacaagaattaaaaactgttccgtttttatgtatgcaaagacaacaactaggcaggatgtgcagaatgaagatgatgaagcggtgcgtgtatttggcggcttttttattctgtcagaatatgagcgcacagcaaatcgctccgaatgattccgtccgtatatacttcaggcagagtattgatacgcttgatttaaattaccggtcgaataaggaaaagttggatttattctccaaacgcttgttggaactcaaggaacataaagtgcgttttcgtaatgtacagatactttcgtccgcttctcctgaggggccttcccgactgaatgagtcgctggcgaagaaccgtgcggaagtattgtcaaattatatccggaacaatgtggagttgagcaatgtggagtttgaggtagttccggtagagttggattgggagctgttcagccgattggtttccggttctgacttgaaagagaaggagcaggttctttatatcatcatggaggaaccgattgcaaagaggaagaggttattgagagagctgagtggaggaaatgtgtggaacgaaatgctccgaaccctgtatcctgatatgagaacctgcgtcctttacattaattactcggattcggcaggtaaggtagatgaaccggtgctggtaaagccggatatgccgctcgctgcttatcggatcgggattccgccacaggaactggtttctgcaacacggaagaagaattttgtgatgggagttaaaaccaatttgctgtatgatgcgctggcggttcctaacctgggggtggaattttacctgggaaagggatggagcctcggtggaaactggatgtatgcgaggtatataatccgacaaataggacaattgatataagaaattatggc
